(19) United States
(12) Patent Application Publication
(10) Pub. No.: US 2010/0144538 A1
(43) Pub. Date: Jun. 10, 2010

(54) GENEMAP OF THE HUMAN GENES ASSOCIATED WITH SCHIZOPHRENIA

(75) Inventors: Abdelmajid Belouchi, Beaconsfield (CA); John Verner Raelson, Hudson Heights (CA); Walter Edward Bradley, Montreal (CA); Bruno Paquin, Chateauguay (CA); Helene Fournier, Montreal (CA); Pascal Croteau, Laval (CA); Nouzha Paquin, Chateauguay (CA); Daniel Dubois, Laval (CA); Vanessa Bruat, Montreal (CA); Paul Van Eerdewegh, Carlisle, MA (US); Jonathan Segal, Efrat (IL); Randall David Little, Dorothee, CA (US); Tim Keith, Bedford, MA (US)

Correspondence Address: DOWELL & DOWELL P.C., 103 Oronoco St., Suite 220, Alexandria, VA, 22314, US

(73) Assignee: GENIZON BIOSCIENCES INC.

(21) Appl. No.: 12/449,899

(22) PCT Filed: Mar. 10, 2008
(86) PCT No.: PCT/US08/03125

§ 371 Date: Oct. 13, 2009

Related U.S. Application Data
(60) Provisional application No. 60/905,611, filed on Mar. 8, 2007.

(51) Int. Cl. C40B 20/00; G01N 33/68; G01N 33/48; C12Q 1/02; C12Q 1/68; G01N 33/53; G01N 33/50

(52) U.S. Cl. 506/2; 436/86; 436/94; 435/29; 435/6; 436/501; 204/403.01

(57) ABSTRACT

The present invention relates to the selection of a set of polymorphism markers for use in genome wide association studies based on linkage disequilibrium mapping. In particular, the invention relates to the fields of pharmacogenomics, diagnostics, patient therapy and the use of genetic haplotype information to predict an individual's susceptibility to SCHIZOPHRENIA disease and/or their response to a particular drug or drugs.

### PRIORITY

[0001] This application claims priority to U.S. Provisional Application No. 60/905,611, filed Mar. 8, 2007, which is hereby incorporated by reference in its entirety.

### FIELD OF THE INVENTION

[0002] The invention relates to the field of genomics and genetics, including genome analysis and the study of DNA variations. In particular, the invention relates to the fields of pharmacogenomics, diagnostics, patient therapy and the use of genetic haplotype information to predict an individual's susceptibility to SCHIZOPHRENIA disease and/or their response to a particular drug or drugs, so that drugs tailored to genetic differences of population groups may be developed and/or administered to the appropriate population.

[0003] The invention also relates to a GeneMap for SCHIZOPHRENIA disease, which links variations in DNA (including both genic and non-genic regions) to an individual's susceptibility to SCHIZOPHRENIA disease and/or response to a particular drug or drugs. The invention further relates to the genes disclosed in the GeneMap (see Tables 2-4), which is related to methods and reagents for detection of an individual's increased or decreased risk for SCHIZOPHRENIA disease and related sub-phenotypes, by identifying at least one polymorphism in one or a combination of the genes from the GeneMap. Also related are the candidate regions identified in Table 1, which are associated with SCHIZOPHRENIA disease. In addition, the invention further relates to nucleotide sequences of those genes including genomic DNA sequences, DNA sequences, single nucleotide polymorphisms (SNPs), other types of polymorphisms (insertions, deletions, microsatellites), alleles and haplotypes (see Sequence Listing and Tables 5-35).

[0004] The invention further relates to isolated nucleic acids comprising these nucleotide sequences and isolated polypeptides or peptides encoded thereby. Also related are expression vectors and host cells comprising the disclosed nucleic acids or fragments thereof, as well as antibodies that bind to the encoded polypeptides or peptides.

[0005] The present invention further relates to ligands that modulate the activity of the disclosed genes or gene products. In addition, the invention relates to diagnostics and therapeutics for SCHIZOPHRENIA disease, utilizing the disclosed nucleic acids, polymorphisms, chromosomal regions, GeneMaps, polypeptides or peptides, antibodies and/or ligands and small molecules that activate or repress relevant signaling events.

### BACKGROUND OF THE INVENTION

[0006] Schizophrenia is a severe psychiatric condition that affects approximately one percent of the population worldwide (Lewis et al., 2000). People with schizophrenia often experience both “positive” symptoms (e.g., delusions, hallucinations, paranoia, psychosis, disorganized thinking, and agitation) and “negative” symptoms (e.g., lack of drive or initiative, social withdrawal, apathy, impaired attention, cognitive impairements and emotional unresponsiveness).

[0007] There are an estimated 45 million people with schizophrenia in the world, with more than 33 million of them in developing countries. This disease places a heavy burden on the patient's family and relatives, both in terms of the direct and indirect costs involved, and the social stigma associated with the illness, sometimes over generations. Moreover, schizophrenia accounts for one fourth of all mental health costs and takes up one in three psychiatric hospital beds. Most schizophrenia patients are never able to work. The cost of schizophrenia to society is enormous. The most common cause of death among schizophrenic patients is suicide (in 10% of patients) which represents a 20 times higher risk than for the general population. Deaths from heart disease and from diseases of the respiratory and digestive system are also increased among schizophrenic patients.

[0008] Studies of the inheritance of schizophrenia have revealed that it is a multi-factorial disease characterized by multiple genetic susceptibility elements; each likely contributing a modest increase in risk (Karayiorgou et al., 1997).

[0009] Complex disorders such as schizophrenia are believed to involve several genes rather than single genes, as observed in rare disorders. This makes detection of any particular gene substantially more difficult than in a rare disorder, where a single gene mutation segregating according to a Mendelian inheritance pattern is the causative mutation. Any one of the multiple interacting gene mutations involved in the etiology of a complex and common disorder will impart a lower relative risk for the disorder than will the single gene mutation involved in a simple genetic disorder. Low relative risk alleles are more difficult to detect and, as a result, the success of positional cloning using linkage mapping that was achieved for simple genetic disorder genes has not been repeated for complex disorders.

[0010] Several approaches have been proposed to discover and characterize multiple genes in complex genetic disorders. These gene discovery methods can be subdivided into hypothesis-free disorder association studies and hypothesis-driven candidate gene or region studies. The candidate gene approach relies on the analysis of a gene in patients who have a disorder or a genetic disorder in which the gene is thought to play a role. This approach is limited in utility because it only provides for the investigation of genes with known functions. Although variant sequences of candidate genes may be identified using this approach, it is inherently limited by the fact that variant sequences in other genes that contribute to the phenotype will be necessarily missed when the technique is employed. A genome-wide scan (GWS) has been shown to be efficient in identifying schizophrenia susceptibility markers, such as the NRG1 gene on chromosome 8. In contrast to the candidate gene approach, a GWS searches throughout the genome without any a priori hypothesis and consequently can identify genes that are not obvious candidates for the complex genetic disorder as well as genes that are relevant candidates for the disorder. Furthermore, it can identify structurally important chromosomal regions a “that can influence the expression of specific, disorder-related genes.

[0011] Family-based linkage mapping methods were initially used for disorder locus identification. This technique locates genes based on the relatively limited number of genetic recombination events within the families used in the study, and results in large chromosomal regions containing hundreds of genes, any one of which could be the disorder-causing gene. Population-based, or linkage disequilibrium (LD) mapping is based on the premise that regions adjacent to a gene of interest are co-transmitted through the generations along with the gene. As a result, LD extends over shorter genetic regions than does linkage (Hewett et al., 2002), and can facilitate detection of genes with lower relative risk than family linkage mapping approaches. It also defines much smaller candidate regions which may contain only a few genes, making the identification of the actual disorder gene much easier.

[0012] It has been estimated that a GWS that uses a general population and case/control association (LD) analysis would require approximately 700,000 SNP markers (Carlson et al., 2003). The cost of a GWS at this marker density for a sufficient sample size for statistical power is economically prohibitive. The use of a founder population (genetic isolates), such as the French Canadian population of Quebec, is one solution to the problem with LD analysis. The French Canadian population in Quebec (Quebec Founder Population—QFP) provides one of the best resources in the world for gene discovery based on its high levels of genetic sharing and genetic homogeneity. By combining DNA collected from the QFP, high throughput genotyping capabilities and proprietary algorithms for genetic analysis, a comprehensive genome-wide association study is facilitated. The present invention relates specifically to a set of schizophrenia-related genes (GeneMap) and targets which present attractive points of therapeutic intervention for schizophrenia.

[0013] Current treatments do not address the root cause of the disease. Despite a preponderance of evidence showing inheritance of a risk for SCHIZOPHRENIA disease through epidemiological studies and genome wide linkage analyses, the genes affecting SCHIZOPHRENIA disease have yet to be discovered. There is a need in the art for identifying specific genes related to SCHIZOPHRENIA disease to enable the development of therapeutics that address the causes of the disease rather than relieving its symptoms.

[0014] The present invention relates specifically to a set of SCHIZOPHRENIA disease-causing genes (GeneMap) and targets which present attractive points of therapeutic intervention and diagnostics.

[0015] In view of the foregoing, identifying susceptibility genes associated with SCHIZOPHRENIA disease and their respective biochemical pathways will facilitate the identification of diagnostic markers as well as novel targets for improved therapeutics. It will also improve the quality of life for those afflicted by this disease and will reduce the economic costs of these afflictions at the individual and societal level. The identification of those genetic markers would provide the basis for novel genetic tests and eliminate or reduce the therapeutic methods currently used. The identification of those genetic markers will also provide the development of effective therapeutic intervention for the battery of laboratory, psychological and clinical evaluations typically required to diagnose SCHIZOPHRENIA. The present invention satisfies this need.

### DESCRIPTION OF THE FILES CONTAINED ON THE CD-R

[0016] The contents of the submission on compact discs submitted herewith are incorporated herein by reference in their entirety: A compact disc copy of the Sequence Listing (COPY 1) (filename: GENI 026 01WO SeqList.txt, date recorded: Mar. 10, 2008, file size: 37,722 kilobytes); a duplicate compact disc copy of the Sequence Listing (COPY 2) (filename: GENI 026 01WO SeqList.txt, date recorded: Mar. 10, 2008, file size: 37,722 kilobytes); a duplicate compact disc copy of the Sequence Listing (COPY 3) (filename: GENI 026 01WO SeqList.txt, date recorded: Mar. 10, 2008, file size: 37,722 kilobytes); a computer readable format copy of the Sequence Listing (CRF COPY) (filename: GENI 026 01WO SeqList.txt, date recorded: Mar. 10, 2008, file size: 37,722 kilobytes).

[0017] Three compact disc copies (COPY 1, COPY 2 and COPY 3) of Tables 1-38 are herewith submitted and are incorporated herein by reference in their entirety. Each compact disc contains a copy of the following files:

filename: Table1.txt, date recorded: Mar. 10, 2008, file size: 55 kilobytes;
filename: Table2.txt, date recorded: Mar. 10, 2008, file size: 426 kilobytes;
filename: Table3.txt, date recorded: Mar. 10, 2008, file size: 670 kilobytes;
filename: Table4.txt, date recorded: Mar. 10, 2008, file size: 2 kilobytes;
filename: Table5.1.txt, date recorded: Mar. 10, 2008, file size: 3 kilobytes;
filename: Table5.2.txt, date recorded: Mar. 10, 2008, file size: 3 kilobytes;
filename: Table6.1.txt, date recorded: Mar. 10, 2008, file size: 14 kilobytes;
filename: Table6.2.txt, date recorded: Mar. 10, 2008, file size: 99 kilobytes;
filename: Table7.1.txt, date recorded: Mar. 10, 2008, file size: 55 kilobytes;
filename: Table7.2.txt, date recorded: Mar. 10, 2008, file size: 178 kilobytes;
filename: Table8.1.txt, date recorded: Mar. 10, 2008, file size: 19 kilobytes;
filename: Table8.2.txt, date recorded: Mar. 10, 2008, file size: 49 kilobytes;
filename: Table9.1.txt, date recorded: Mar. 10, 2008, file size: 28 kilobytes;
filename: Table9.2.txt, date recorded: Mar. 10, 2008, file size: 27 kilobytes;
filename: Table9.3.txt, date recorded: Mar. 10, 2008, file size: 165 kilobytes;
filename: Table9.4.txt, date recorded: Mar. 10, 2008, file size: 164 kilobytes;
filename: Table10.1.txt, date recorded: Mar. 10, 2008, file size: 20 kilobytes;
filename: Table10.2.txt, date recorded: Mar. 10, 2008, file size: 24 kilobytes;
filename: Table11.1.txt, date recorded: Mar. 10, 2008, file size: 67 kilobytes;
filename: Table11.2.txt, date recorded: Mar. 10, 2008, file size: 336 kilobytes;
filename: Table12.1.txt, date recorded: Mar. 10, 2008, file size: 696 kilobytes;
filename: Table12.2.txt, date recorded: Mar. 10, 2008, file size: 1748 kilobytes;
filename: Table13.1.txt, date recorded: Mar. 10, 2008, file size: 55 kilobytes;
filename: Table13.2.txt, date recorded: Mar. 10, 2008, file size: 191 kilobytes;
filename: Table14.1.txt, date recorded: Mar. 10, 2008, file size: 12 kilobytes;
filename: Table14.2.txt, date recorded: Mar. 10, 2008, file size: 58 kilobytes;
filename: Table15.1.txt, date recorded: Mar. 10, 2008, file size: 66 kilobytes;
filename: Table15.2.txt date recorded: Mar. 10, 2008, file size: 359 kilobytes;
filename: Table16.1.txt, date recorded: Mar. 10, 2008, file size: 40 kilobytes;
filename: Table16.2.txt, date recorded: Mar. 10, 2008, file size: 38 kilobytes;
filename: Table16.3.txt, date recorded: Mar. 10, 2008, file size: 105 kilobytes;
filename: Table17.1.txt, date recorded: Mar. 10, 2008, file size: 21 kilobytes;
filename: Table17.2.txt, date recorded: Mar. 10, 2008, file size: 20 kilobytes;
filename: Table17.3.txt, date recorded: Mar. 10, 2008, file size: 44 kilobytes;
filename: Table18.1.txt, date recorded: Mar. 10, 2008, file size: 40 kilobytes;
filename: Table18.2.txt, date recorded: Mar. 10, 2008, file size: 39 kilobytes;
filename: Table18.3.txt, date recorded: Mar. 10, 2008, file size: 139 kilobytes;
filename: Table19.1.txt, date recorded: Mar. 10, 2008, file size: 25 kilobytes;
filename: Table19.2.txt, date recorded: Mar. 10, 2008, file size: 21 kilobytes;
filename: Table19.3.txt, date recorded: Mar. 10, 2008, file size: 11 kilobytes;
filename: Table20.1.txt, date recorded: Mar. 10, 2008, file size: 30 kilobytes;
filename: Table20.2.txt, date recorded: Mar. 10, 2008, file size: 28 kilobytes;
filename: Table20.3.txt, date recorded: Mar. 10, 2008, file size: 131 kilobytes;
filename: Table21.1.txt, date recorded: Mar. 10, 2008, file size: 32 kilobytes;
filename: Table21.2.txt, date recorded: Mar. 10, 2008, file size: 29 kilobytes;
filename: Table22.1.txt, date recorded: Mar. 10, 2008, file size: 194 kilobytes;
filename: Table22.2.txt, date recorded: Mar. 10, 2008, file size: 567 kilobytes;
filename: Table23.1.txt, date recorded: Mar. 10, 2008, file size: 55 kilobytes;
filename: Table23.2.txt, date recorded: Mar. 10, 2008, file size: 101 kilobytes;
filename: Table24.1.txt, date recorded: Mar. 10, 2008, file size: 230 kilobytes;
filename: Table24.2.txt, date recorded: Mar. 10, 2008, file size: 552 kilobytes;
filename: Table25.1.txt, date recorded: Mar. 10, 2008, file size: 8 kilobytes;
filename: Table25.2.txt, date recorded: Mar. 10, 2008, file size: 5 kilobytes;
filename: Table26.1.txt, date recorded: Mar. 10, 2008, file size: 36 kilobytes;
filename: Table26.2.txt, date recorded: Mar. 10, 2008, file size: 48 kilobytes;
filename: Table27.1.txt, date recorded: Mar. 10, 2008, file size: 170 kilobytes;
filename: Table27.2.txt, date recorded: Mar. 10, 2008, file size: 378 kilobytes;
filename: Table28.1.txt, date recorded: Mar. 10, 2008, file size: 6 kilobytes;
filename: Table28.2.txt, date recorded: Mar. 10, 2008, file size: 4 kilobytes;
filename: Table29.1.txt, date recorded: Mar. 10, 2008, file size: 10 kilobytes;
filename: Table29.2.txt, date recorded: Mar. 10, 2008, file size: 13 kilobytes;
filename: Table30.1.txt, date recorded: Mar. 10, 2008, file size: 35 kilobytes;
filename: Table30.2.txt, date recorded: Mar. 10, 2008, file size: 174 kilobytes;
filename: Table31.1.txt, date recorded: Mar. 10, 2008, file size: 36 kilobytes;
filename: Table31.2.txt, date recorded: Mar. 10, 2008, file size: 46 kilobytes;
filename: Table32.1.txt, date recorded: Mar. 10, 2008, file size: 61 kilobytes;
filename: Table32.2.txt, date recorded: Mar. 10, 2008, file size: 58 kilobytes;
filename: Table32.3.txt, date recorded: Mar. 10, 2008, file size: 241 kilobytes;
filename: Table33.1.txt, date recorded: Mar. 10, 2008, file size: 9 kilobytes;
filename: Table33.2.txt, date recorded: Mar. 10, 2008, file size: 47 kilobytes;
filename: Table34.1, date recorded: Mar. 10, 2008, file size: 7 kilobytes;
filename: Table34.2.txt, date recorded: Mar. 10, 2008, file size: 9 kilobytes;
filename: Table35.1.txt, date recorded: Mar. 10, 2008, file size: 27 kilobytes;
filename: Table35.2.txt, date recorded: Mar. 10, 2008, file size: 65 kilobytes;
filename: Table36.txt, date recorded: Mar. 10, 2008, file size: 15 kilobytes;
filename: Table37.txt, date recorded: Mar. 10, 2008, file size: 31 kilobytes; and
filename: Table38.txt, date recorded: Mar. 10, 2008, file size: 8 kilobytes.

LENGTHY TABLES
The patent application contains a lengthy table section. A copy of the table is available in electronic form from the USPTO web site (http://seqdata.uspto.gov/?pageRequest=docDetail&DocID=US20100144538A1). An electronic copy of the table will also be available from the USPTO upon request and payment of the fee set forth in 37 CFR 1.19(b)(3).

### TABLE DESCRIPTIONS

[0018] Table 1. List of schizophrenia disease candidate regions identified from the Genome Wide Scan association analyses. The first column denotes the region identifier. The second and third columns correspond to the chromosome and cytogenetic band, respectively. The fourth and fifth columns correspond to the chromosomal start and end coordinates of the NCBI genome assembly derived from build 36.
Table 2. List of candidate genes from the regions identified from the genome wide association analysis. The first column corresponds to the region identifier provided in Table 1. The second and third columns correspond to the chromosome and cytogenetic band, respectively. The fourth and fifth columns corresponds to the chromosomal start coordinates of the NCBI genome assembly derived from build 36 (B36) and the end coordinates (the start and end position relate to the +orientation of the NCBI assembly and don't necessarily correspond to the orientation of the gene). The sixth and seventh columns correspond to the official gene symbol and gene name, respectively, and were obtained from the NCBI Entrez Gene database. The eighth column corresponds to the NCBI Entrez Gene Identifier (GeneID). The ninth and tenth columns correspond to the Sequence IDs from nucleotide (cDNA) and protein entries in the Sequence Listing.
Table 3. List of candidate genes based on EST clustering from the regions identified from the various genome wide analyses. The first column corresponds to the region identifier provided in Table 1. The second column corresponds to the chromosome number. The third and fourth columns correspond to the chromosomal start and end coordinates of the NCBI genome assemblies derived from build 36 (B36). The fifth column corresponds to the ECGene Identifier, corresponding to the ECGene track of UCSC. These ECGene entries were determined by their overlap with the regions from Table 1, based on the start and end coordinates of both Region and ECGene identifiers. The sixth and seventh columns correspond to the Sequence IDs from nucleotide and protein entries in the Sequence Listing.
Table 4. List of micro RNA (miRNA) from the regions identified from the genome wide association analyses derived from build 36 (B36). To identify the miRNA from B36, these miRNA entries were determined by their overlap with the regions from Table 1, based on the start and end coordinates of both Region and miRNA identifiers. The first column corresponds to the region identifier provided in Table 1. The second column corresponds to the chromosome number. The third and fourth columns correspond to the chromosomal start and end coordinates of the NCBI genome assembly derived from build 36 (the start and end position relate to the + orientation of the NCBI assembly and do not necessarily correspond to the orientation of the miRNA). The fifth and sixth columns correspond to the miRNA accession and miRNA id, respectively, and were obtained from the miRBase database. The seventh column corresponds to the NCBI Entrez Gene Identifier (GeneID). The eighth column corresponds to the Sequence ID from nucleotide (RNA) in the Sequence Listing.
Table 5.1. Genome wide association study results in the Quebec Founder Population (QFP). SNP markers found to be associated with schizophrenia from the analysis of genome wide scan (GWS) data: CIAS1-1_cr1_not_w1. Columns include: Region ID; Chromosome; Build 36 location in base pairs (bp); rs#, dbSNP data base (NCBI) reference number; Sequence ID, unique numerical identifier for this patent application; Sequence, 21 by of sequence covering 10 base pair of unique sequence flanking either side of central polymorphic SNP; −log 10 P values for GWS, −log 10 of the P value for statistical significance from the GWS for single SNP markers (both T test and Permutation test p-values are displayed; see Example section) and for the most highly associated multi-marker haplotypes centered at the reference marker and defined by the sliding windows of specified sizes.
Table 5.2. List of significantly associated haplotypes based on the schizophrenia Disease GWS results using the Quebec Founder Population (QFP). Individual haplotypes with associated relative risks are presented in each row of the table; these values were extracted from the associated marker haplotype window with the most significant p value for each SNP in Table 5.1. The first column lists the region ID as presented in Table 1. The Haplotype column lists the specific nucleotides for the individual SNP alleles contributing to the haplotype reported. The Case and Control columns correspond to the numbers of cases and controls, respectively, containing the haplotype variant noted in the Haplotype column. The Total Case and Total Control columns list the total numbers of cases and controls for which genotype data was available for the haplotype in question. The RR column gives to the relative risk for each particular haplotype. The remainder of the columns lists the SeqIDs for the SNPs contributing to the haplotype and their relative location with respect to the central marker. The Central marker (0) column lists the SeqID for the central marker on which the haplotype is based. Flanking markers are identified by minus (−) or plus (+) signs to indicate the relative location of flanking SNPs.
Table 6.1. Genome wide association study results in the Quebec Founder Population (QFP). SNP markers found to be associated with schizophrenia from the analysis of genome wide scan (GWS) data: PTPRD-1_cr2-not. Columns include: Region ID; Chromosome; Build 36 location in base pairs (bp); rs#, dbSNP data base (NCBI) reference number; Sequence ID, unique numerical identifier for this patent application; Sequence, 21 by of sequence covering 10 base pair of unique sequence flanking either side of central polymorphic SNP; −log 10 P values for GWS, −log 10 of the P value for statistical significance from the GWS for single SNP markers (both T test and Permutation test p-values are displayed; see Example section) and for the most highly associated multi-marker haplotypes centered at the reference marker and defined by the sliding windows of specified sizes.
Table 6.2. List of significantly associated haplotypes based on the schizophrenia Disease GWS results using the Quebec Founder Population (QFP). Individual haplotypes with associated relative risks are presented in each row of the table; these values were extracted from the associated marker haplotype window with the most significant p value for each SNP in Table 6.1. The first column lists the region ID as presented in Table 1. The Haplotype column lists the specific nucleotides for the individual SNP alleles contributing to the haplotype reported. The Case and Control columns correspond to the numbers of cases and controls, respectively, containing the haplotype variant noted in the Haplotype column. The Total Case and Total Control columns list the total numbers of cases and controls for which genotype data was available for the haplotype in question. The RR column gives to the relative risk for each particular haplotype. The remainder of the columns lists the SeqIDs for the SNPs contributing to the haplotype and their relative location with respect to the central marker. The Central marker (0) column lists the SeqID for the central marker on which the haplotype is based. Flanking markers are identified by minus (−) or plus (+) signs to indicate the relative location of flanking SNPs.
Table 7.1. Genome wide association study results in the Quebec Founder Population (QFP). SNP markers found to be associated with schizoprenia from the analysis of genome wide scan (GWS) data: SPG3A-1_cp_not. Columns include: Region ID; Chromosome; Build 36 location in base pairs (bp); rs#, dbSNP data base (NCBI) reference number; Sequence ID, unique numerical identifier for this patent application; Sequence, 21 by of sequence covering 10 base pair of unique sequence flanking either side of central polymorphic SNP; −log 10 P values for GWS, −log 10 of the P value for statistical significance from the GWS for single SNP markers (both T test and Permutation test p-values are displayed; see Example section) and for the most highly associated multi-marker haplotypes centered at the reference marker and defined by the sliding windows of specified sizes.
Table 7.2. List of significantly associated haplotypes based on the schizophrenia Disease GWS results using the Quebec Founder Population (QFP). Individual haplotypes with associated relative risks are presented in each row of the table; these values were extracted from the associated marker haplotype window with the most significant p value for each SNP in Table 7.1. The first column lists the region ID as presented in Table 1. The Haplotype column lists the specific nucleotides for the individual SNP alleles contributing to the haplotype reported. The Case and Control columns correspond to the numbers of cases and controls, respectively, containing the haplotype variant noted in the Haplotype column. The Total Case and Total Control columns list the total numbers of cases and controls for which genotype data was available for the haplotype in question. The RR column gives to the relative risk for each particular haplotype. The remainder of the columns lists the SeqIDs for the SNPs contributing to the haplotype and their relative location with respect to the central marker. The Central marker (0) column lists the SeqID for the central marker on which the haplotype is based. Flanking markers are identified by minus (−) or plus (+) signs to indicate the relative location of flanking SNPs.
Table 8.1. Genome wide association study results in the Quebec Founder Population (QFP). SNP markers found to be associated with schizophrenia from the analysis of genome wide scan (GWS) data: SPG3A-1_cp_has. Columns include: Region ID; Chromosome; Build 36 location in base pairs (bp); rs#, dbSNP data base (NCBI) reference number; Sequence ID, unique numerical identifier for this patent application; Sequence, 21 by of sequence covering 10 base pair of unique sequence flanking either side of central polymorphic SNP; −log 10 P values for GWS, −log 10 of the P value for statistical significance from the GWS for single SNP markers (both T test and Permutation test p-values are displayed; see Example section) and for the most highly associated multi-marker haplotypes centered at the reference marker and defined by the sliding windows of specified sizes.
Table 8.2. List of significantly associated haplotypes based on the schizophrenia Disease GWS results using the Quebec Founder Population (QFP). Individual haplotypes with associated relative risks are presented in each row of the table; these values were extracted from the associated marker haplotype window with the most significant p value for each SNP in Table 8.1. The first column lists the region ID as presented in Table 1. The Haplotype column lists the specific nucleotides for the individual SNP alleles contributing to the haplotype reported. The Case and Control columns correspond to the numbers of cases and controls, respectively, containing the haplotype variant noted in the Haplotype column. The Total Case and Total Control columns list the total numbers of cases and controls for which genotype data was available for the haplotype in question. The RR column gives to the relative risk for each particular haplotype. The remainder of the columns lists the SeqIDs for the SNPs contributing to the haplotype and their relative location with respect to the central marker. The Central marker (0) column lists the SeqID for the central marker on which the haplotype is based. Flanking markers are identified by minus (−) or plus (+) signs to indicate the relative location of flanking SNPs.
Table 9.1. Genome wide association study results in the Quebec Founder Population (QFP). SNP markers found to be associated with schizophrenia from the analysis of genome wide scan (GWS) data: SPG3A-1-cr1_not (all results not to claim). Columns include: Region ID; Chromosome; Build 36 location in base pairs (bp); rs#, dbSNP data base (NCBI) reference number; Sequence ID, unique numerical identifier for this patent application; Sequence, 21 by of sequence covering 10 base pair of unique sequence flanking either side of central polymorphic SNP; −log 10 P values for GWS, −log 10 of the P value for statistical significance from the GWS for single SNP markers (both T test and Permutation test p-values are displayed; see Example section) and for the most highly associated multi-marker haplotypes centered at the reference marker and defined by the sliding windows of specified sizes.
Table 9.2. Genome wide association study results in the Quebec Founder Population (QFP). SNP markers found to be associated with schizophrenia from the analysis of genome wide scan (GWS) data: SPG3A-1-cr1_not (to claim). Columns include: Region ID; Chromosome; Build 36 location in base pairs (bp); rs#, dbSNP data base (NCBI) reference number; Sequence ID, unique numerical identifier for this patent application; Sequence, 21 by of sequence covering 10 base pair of unique sequence flanking either side of central polymorphic SNP; −log 10 P values for GWS, −log 10 of the P value for statistical significance from the GWS for single SNP markers (both T test and Permutation test p-values are displayed; see Example section) and for the most highly associated multi-marker haplotypes centered at the reference marker and defined by the sliding windows of specified sizes.
Table 9.3. List of significantly associated haplotypes based on the schizophrenia Disease GWS results using the Quebec Founder Population (QFP). Individual haplotypes with associated relative risks are presented in each row of the table; these values were extracted from the associated marker haplotype window with the most significant p value for each SNP in Table 9.1 (not to claim). The first column lists the region ID as presented in Table 1. The Haplotype column lists the specific nucleotides for the individual SNP alleles contributing to the haplotype reported. The Case and Control columns correspond to the numbers of cases and controls, respectively, containing the haplotype variant noted in the Haplotype column. The Total Case and Total Control columns list the total numbers of cases and controls for which genotype data was available for the haplotype in question. The RR column gives to the relative risk for each particular haplotype. The remainder of the columns lists the SeqIDs for the SNPs contributing to the haplotype and their relative location with respect to the central marker. The Central marker (0) column lists the SeqID for the central marker on which the haplotype is based. Flanking markers are identified by minus (−) or plus (+) signs to indicate the relative location of flanking SNPs.
Table 9.4. List of significantly associated haplotypes based on the schizophrenia Disease GWS results using the Quebec Founder Population (QFP). Individual haplotypes with associated relative risks are presented in each row of the table; these values were extracted from the associated marker haplotype window with the most significant p value for each SNP in Table 9.2 (to claim). The first column lists the region ID as presented in Table 1. The Haplotype column lists the specific nucleotides for the individual SNP alleles contributing to the haplotype reported. The Case and Control columns correspond to the numbers of cases and controls, respectively, containing the haplotype variant noted in the Haplotype column. The Total Case and Total Control columns list the total numbers of cases and controls for which genotype data was available for the haplotype in question. The RR column gives to the relative risk for each particular haplotype. The remainder of the columns lists the SeqIDs for the SNPs contributing to the haplotype and their relative location with respect to the central marker. The Central marker (0) column lists the SeqID for the central marker on which the haplotype is based. Flanking markers are identified by minus (−) or plus (+) signs to indicate the relative location of flanking SNPs.
Table 10.1. Genome wide association study results in the Quebec Founder Population (QFP). SNP markers found to be associated with schizophrenia from the analysis of genome wide scan (GWS) data: PAFAH1B1-1-cr_has. Columns include: Region ID; Chromosome; Build 36 location in base pairs (bp); rs#, dbSNP data base (NCBI) reference number; Sequence ID, unique numerical identifier for this patent application; Sequence, 21 by of sequence covering 10 base pair of unique sequence flanking either side of central polymorphic SNP; −log 10 P values for GWS, −log 10 of the P value for statistical significance from the GWS for single SNP markers.
Table 10.2. List of significantly associated haplotypes based on the schizophrenia Disease GWS results using the Quebec Founder Population (QFP). Individual haplotypes with associated relative risks are presented in each row of the table; these values were extracted from the associated marker haplotype window with the most significant p value for each SNP in Table 10.1. The first column lists the region ID as presented in Table 1. The Haplotype column lists the specific nucleotides for the individual SNP alleles contributing to the haplotype reported. The Case and Control columns correspond to the numbers of cases and controls, respectively, containing the haplotype variant noted in the Haplotype column. The Total Case and Total Control columns list the total numbers of cases and controls for which genotype data was available for the haplotype in question. The RR column gives to the relative risk for each particular haplotype. The remainder of the columns lists the SeqIDs for the SNPs contributing to the haplotype and their relative location with respect to the central marker. The Central marker (0) column lists the SeqID for the central marker on which the haplotype is based. Flanking markers are identified by minus (−) or plus (+) signs to indicate the relative location of flanking SNPs.
Table 11.1. Genome wide association study results in the Quebec Founder Population (QFP). SNP markers found to be associated with schizophrenia from the analysis of genome wide scan (GWS) data: PAFAH1B1-1-cr_not. Columns include: Region ID; Chromosome; Build 36 location in base pairs (bp); rs#, dbSNP data base (NCBI) reference number; Sequence ID, unique numerical identifier for this patent application; Sequence, 21 by of sequence covering 10 base pair of unique sequence flanking either side of central polymorphic SNP; −log 10 P values for GWS, −log 10 of the P value for statistical significance from the GWS for single SNP markers and for the most highly associated multi-marker haplotypes centered at the reference marker and defined by the sliding windows of specified sizes.
Table 11.2. List of significantly associated haplotypes based on the schizophrenia Disease GWS results using the Quebec Founder Population (QFP). Individual haplotypes with associated relative risks are presented in each row of the table; these values were extracted from the associated marker haplotype window with the most significant p value for each SNP in Table 11.1. The first column lists the region ID as presented in Table 1. The Haplotype column lists the specific nucleotides for the individual SNP alleles contributing to the haplotype reported. The Case and Control columns correspond to the numbers of cases and controls, respectively, containing the haplotype variant noted in the Haplotype column. The Total Case and Total Control columns list the total numbers of cases and controls for which genotype data was available for the haplotype in question. The RR column gives to the relative risk for each particular haplotype. The remainder of the columns lists the SeqIDs for the SNPs contributing to the haplotype and their relative location with respect to the central marker. The Central marker (0) column lists the SeqID for the central marker on which the haplotype is based. Flanking markers are identified by minus (−) or plus (+) signs to indicate the relative location of flanking SNPs.
Table 12.1. Genome wide association study results in the Quebec Founder Population (QFP). SNP markers found to be associated with schizophrenia from the analysis of genome wide scan (GWS) data: Full_sample. Columns include: Region ID; Chromosome; Build 36 location in base pairs (bp); rs#, dbSNP data base (NCBI) reference number; Sequence ID, unique numerical identifier for this patent application; Sequence, 21 by of sequence covering 10 base pair of unique sequence flanking either side of central polymorphic SNP; −log 10 P values for GWS, −log 10 of the P value for statistical significance from the GWS for single SNP markers (both T test and Permutation test p-values are displayed; see Example section) and for the most highly associated multi-marker haplotypes centered at the reference marker and defined by the sliding windows of specified sizes.
Table 12.2. List of significantly associated haplotypes based on the schizophrenia Disease GWS results using the Quebec Founder Population (QFP). Individual haplotypes with associated relative risks are presented in each row of the table; these values were extracted from the associated marker haplotype window with the most significant p value for each SNP in Table 12.1. The first column lists the region ID as presented in Table 1. The Haplotype column lists the specific nucleotides for the individual SNP alleles contributing to the haplotype reported. The Case and Control columns correspond to the numbers of cases and controls, respectively, containing the haplotype variant noted in the Haplotype column. The Total Case and Total Control columns list the total numbers of cases and controls for which genotype data was available for the haplotype in question. The RR column gives to the relative risk for each particular haplotype. The remainder of the columns lists the SeqIDs for the SNPs contributing to the haplotype and their relative location with respect to the central marker. The Central marker (0) column lists the SeqID for the central marker on which the haplotype is based. Flanking markers are identified by minus (−) or plus (+) signs to indicate the relative location of flanking SNPs.
Table 13.1. Genome wide association study results in the Quebec Founder Population (QFP). SNP markers found to be associated with schizophrenia from the analysis of genome wide scan (GWS) data: Paranoid. Columns include: Region ID; Chromosome; Build 36 location in base pairs (bp); rs#, dbSNP data base (NCBI) reference number; Sequence ID, unique numerical identifier for this patent application; Sequence, 21 by of sequence covering 10 base pair of unique sequence flanking either side of central polymorphic SNP; −log 10 P values for GWS, −log 10 of the P value for statistical significance from the GWS for single SNP markers (both T test and Permutation test p-values are displayed; see Example section) and for the most highly associated multi-marker haplotypes centered at the reference marker and defined by the sliding windows of specified sizes.
Table 13.2. List of significantly associated haplotypes based on the schizophrenia Disease GWS results using the Quebec Founder Population (QFP). Individual haplotypes with associated relative risks are presented in each row of the table; these values were extracted from the associated marker haplotype window with the most significant p value for each SNP in Table 13.1. The first column lists the region ID as presented in Table 1. The Haplotype column lists the specific nucleotides for the individual SNP alleles contributing to the haplotype reported. The Case and Control columns correspond to the numbers of cases and controls, respectively, containing the haplotype variant noted in the Haplotype column. The Total Case and Total Control columns list the total numbers of cases and controls for which genotype data was available for the haplotype in question. The RR column gives to the relative risk for each particular haplotype. The remainder of the columns lists the SeqIDs for the SNPs contributing to the haplotype and their relative location with respect to the central marker. The Central marker (0) column lists the SeqID for the central marker on which the haplotype is based. Flanking markers are identified by minus (−) or plus (+) signs to indicate the relative location of flanking SNPs.
Table 14.1. Genome wide association study results in the Quebec Founder Population (QFP). SNP markers found to be associated with schizophrenia from the analysis of genome wide scan (GWS) data: NRG1-1_cp1-has. Columns include: Region ID; Chromosome; Build 36 location in base pairs (bp); rs#, dbSNP data base (NCBI) reference number; Sequence ID, unique numerical identifier for this patent application; Sequence, 21 by of sequence covering 10 base pair of unique sequence flanking either side of central polymorphic SNP; −log 10 P values for GWS, −log 10 of the P value for statistical significance from the GWS for single SNP markers and for the most highly associated multi-marker haplotypes centered at the reference marker and defined by the sliding windows of specified sizes.
Table 14.2. List of significantly associated haplotypes based on the schizophrenia Disease GWS results using the Quebec Founder Population (QFP). Individual haplotypes with associated relative risks are presented in each row of the table; these values were extracted from the associated marker haplotype window with the most significant p value for each SNP in Table 14.1. The first column lists the region ID as presented in Table 1. The Haplotype column lists the specific nucleotides for the individual SNP alleles contributing to the haplotype reported. The Case and Control columns correspond to the numbers of cases and controls, respectively, containing the haplotype variant noted in the Haplotype column. The Total Case and Total Control columns list the total numbers of cases and controls for which genotype data was available for the haplotype in question. The RR column gives to the relative risk for each particular haplotype. The remainder of the columns lists the SeqIDs for the SNPs contributing to the haplotype and their relative location with respect to the central marker. The Central marker (0) column lists the SeqID for the central marker on which the haplotype is based. Flanking markers are identified by minus (−) or plus (+) signs to indicate the relative location of flanking SNPs.
Table 15.1. Genome wide association study results in the Quebec Founder Population (QFP). SNP markers found to be associated with schizophrenia from the analysis of genome wide scan (GWS) data: CIAS1-1_cr2_has. Columns include: Region ID; Chromosome; Build 36 location in base pairs (bp); rs#, dbSNP data base (NCBI) reference number; Sequence ID, unique numerical identifier for this patent application; Sequence, 21 by of sequence covering 10 base pair of unique sequence flanking either side of central polymorphic SNP; −log 10 P values for GWS, −log 10 of the P value for statistical significance from the GWS for single SNP markers and for the most highly associated multi-marker haplotypes centered at the reference marker and defined by the sliding windows of specified sizes.
Table 15.2. List of significantly associated haplotypes based on the schizophrenia Disease GWS results using the Quebec Founder Population (QFP). Individual haplotypes with associated relative risks are presented in each row of the table; these values were extracted from the associated marker haplotype window with the most significant p value for each SNP in Table 15.1. The first column lists the region ID as presented in Table 1. The Haplotype column lists the specific nucleotides for the individual SNP alleles contributing to the haplotype reported. The Case and Control columns correspond to the numbers of cases and controls, respectively, containing the haplotype variant noted in the Haplotype column. The Total Case and Total Control columns list the total numbers of cases and controls for which genotype data was available for the haplotype in question. The RR column gives to the relative risk for each particular haplotype. The remainder of the columns lists the SeqIDs for the SNPs contributing to the haplotype and their relative location with respect to the central marker. The Central marker (0) column lists the SeqID for the central marker on which the haplotype is based. Flanking markers are identified by minus (−) or plus (+) signs to indicate the relative location of flanking SNPs.
Table 16.1. Genome wide association study results in the Quebec Founder Population (QFP). SNP markers found to be associated with schizophrenia from the analysis of genome wide scan (GWS) data: NRG1-1_cp1-not (all results not to claim). Columns include: Region ID; Chromosome; Build 36 location in base pairs (bp); rs#, dbSNP data base (NCBI) reference number; Sequence ID, unique numerical identifier for this patent application; Sequence, 21 by of sequence covering 10 base pair of unique sequence flanking either side of central polymorphic SNP; −log 10 P values for GWS, −log 10 of the P value for statistical significance from the GWS for single SNP markers and for the most highly associated multi-marker haplotypes centered at the reference marker and defined by the sliding windows of specified sizes.
Table 16.2. Genome wide association study results in the Quebec Founder Population (QFP). SNP markers found to be associated with schizophrenia from the analysis of genome wide scan (GWS) data: NRG1-1_cp1-not (to claim). Columns include: Region ID; Chromosome; Build 36 location in base pairs (bp); rs#, dbSNP data base (NCBI) reference number; Sequence ID, unique numerical identifier for this patent application; Sequence, 21 by of sequence covering 10 base pair of unique sequence flanking either side of central polymorphic SNP; −log 10 P values for GWS, −log 10 of the P value for statistical significance from the GWS for single SNP markers and for the most highly associated multi-marker haplotypes centered at the reference marker and defined by the sliding windows of specified sizes.
Table 16.3. List of significantly associated haplotypes based on the schizophrenia Disease GWS results using the Quebec Founder Population (QFP). Individual haplotypes with associated relative risks are presented in each row of the table; these values were extracted from the associated marker haplotype window with the most significant p value for each SNP in Table 16.2. The first column lists the region ID as presented in Table 1. The Haplotype column lists the specific nucleotides for the individual SNP alleles contributing to the haplotype reported. The Case and Control columns correspond to the numbers of cases and controls, respectively, containing the haplotype variant noted in the Haplotype column. The Total Case and Total Control columns list the total numbers of cases and controls for which genotype data was available for the haplotype in question. The RR column gives to the relative risk for each particular haplotype. The remainder of the columns lists the SeqIDs for the SNPs contributing to the haplotype and their relative location with respect to the central marker. The Central marker (0) column lists the SeqID for the central marker on which the haplotype is based. Flanking markers are identified by minus (−) or plus (+) signs to indicate the relative location of flanking SNPs.
Table 17.1. Genome wide association study results in the Quebec Founder Population (QFP). SNP markers found to be associated with schizophrenia from the analysis of genome wide scan (GWS) data: NRG1-1_cp2-not (all results, not to claim). Columns include: Region ID; Chromosome; Build 36 location in base pairs (bp); rs#, dbSNP data base (NCBI) reference number; Sequence ID, unique numerical identifier for this patent application; Sequence, 21 by of sequence covering 10 base pair of unique sequence flanking either side of central polymorphic SNP; −log 10 P values for GWS, −log 10 of the P value for statistical significance from the GWS for single SNP markers and for the most highly associated multi-marker haplotypes centered at the reference marker and defined by the sliding windows of specified sizes.
Table 17.2. Genome wide association study results in the Quebec Founder Population (QFP). SNP markers found to be associated with schizophrenia from the analysis of genome wide scan (GWS) data: NRG1-1_cp2-not (to claim). Columns include: Region ID; Chromosome; Build 36 location in base pairs (bp); rs#, dbSNP data base (NCBI) reference number; Sequence ID, unique numerical identifier for this patent application; Sequence, 21 by of sequence covering 10 base pair of unique sequence flanking either side of central polymorphic SNP; −log 10 P values for GWS, −log 10 of the P value for statistical significance from the GWS for single SNP markers and for the most highly associated multi-marker haplotypes centered at the reference marker and defined by the sliding windows of specified sizes.
Table 17.3. List of significantly associated haplotypes based on the schizophrenia Disease GWS results using the Quebec Founder Population (QFP). Individual haplotypes with associated relative risks are presented in each row of the table; these values were extracted from the associated marker haplotype window with the most significant p value for each SNP in Table 17.2. The first column lists the region ID as presented in Table 1. The Haplotype column lists the specific nucleotides for the individual SNP alleles contributing to the haplotype reported. The Case and Control columns correspond to the numbers of cases and controls, respectively, containing the haplotype variant noted in the Haplotype column. The Total Case and Total Control columns list the total numbers of cases and controls for which genotype data was available for the haplotype in question. The RR column gives to the relative risk for each particular haplotype. The remainder of the columns lists the SeqIDs for the SNPs contributing to the haplotype and their relative location with respect to the central marker. The Central marker (0) column lists the SeqID for the central marker on which the haplotype is based. Flanking markers are identified by minus (−) or plus (+) signs to indicate the relative location of flanking SNPs.
Table 18.1. Genome wide association study results in the Quebec Founder Population (QFP). SNP markers found to be associated with schizophrenia from the analysis of genome wide scan (GWS) data: NRG1-1_cr1-has (all results, not to claim). Columns include: Region ID; Chromosome; Build 36 location in base pairs (bp); rs#, dbSNP data base (NCBI) reference number; Sequence ID, unique numerical identifier for this patent application; Sequence, 21 by of sequence covering 10 base pair of unique sequence flanking either side of central polymorphic SNP; −log 10 P values for GWS, −log 10 of the P value for statistical significance from the GWS for single SNP markers and for the most highly associated multi-marker haplotypes centered at the reference marker and defined by the sliding windows of specified sizes.
Table 18.2. Genome wide association study results in the Quebec Founder Population (QFP). SNP markers found to be associated with schizophrenia from the analysis of genome wide scan (GWS) data: NRG1-1_cr1-has (to claim). Columns include: Region ID; Chromosome; Build 36 location in base pairs (bp); rs#, dbSNP data base (NCBI) reference number; Sequence ID, unique numerical identifier for this patent application; Sequence, 21 by of sequence covering 10 base pair of unique sequence flanking either side of central polymorphic SNP; −log 10 P values for GWS, −log 10 of the P value for statistical significance from the GWS for single SNP markers and for the most highly associated multi-marker haplotypes centered at the reference marker and defined by the sliding windows of specified sizes.
Table 18.3. List of significantly associated haplotypes based on the schizophrenia Disease GWS results using the Quebec Founder Population (QFP). Individual haplotypes with associated relative risks are presented in each row of the table; these values were extracted from the associated marker haplotype window with the most significant p value for each SNP in Table 18.2. The first column lists the region ID as presented in Table 1. The Haplotype column lists the specific nucleotides for the individual SNP alleles contributing to the haplotype reported. The Case and Control columns correspond to the numbers of cases and controls, respectively, containing the haplotype variant noted in the Haplotype column. The Total Case and Total Control columns list the total numbers of cases and controls for which genotype data was available for the haplotype in question. The RR column gives to the relative risk for each particular haplotype. The remainder of the columns lists the SeqIDs for the SNPs contributing to the haplotype and their relative location with respect to the central marker. The Central marker (0) column lists the SeqID for the central marker on which the haplotype is based. Flanking markers are identified by minus (−) or plus (+) signs to indicate the relative location of flanking SNPs.
Table 19.1. Genome wide association study results in the Quebec Founder Population (QFP). SNP markers found to be associated with schizophrenia from the analysis of genome wide scan (GWS) data: NRG1-1_cr1-not (all results, not to claim. Columns include: Region ID; Chromosome; Build 36 location in base pairs (bp); rs#, dbSNP data base (NCBI) reference number; Sequence ID, unique numerical identifier for this patent application; Sequence, 21 by of sequence covering 10 base pair of unique sequence flanking either side of central polymorphic SNP; −log 10 P values for GWS, −log 10 of the P value for statistical significance from the GWS for single SNP markers and for the most highly associated multi-marker haplotypes centered at the reference marker and defined by the sliding windows of specified sizes.
Table 19.2. Genome wide association study results in the Quebec Founder Population (QFP). SNP markers found to be associated with schizophrenia from the analysis of genome wide scan (GWS) data: NRG1-1_cr1-not (to claim). Columns include: Region ID; Chromosome; Build 36 location in base pairs (bp); rs#, dbSNP data base (NCBI) reference number; Sequence ID, unique numerical identifier for this patent application; Sequence, 21 by of sequence covering 10 base pair of unique sequence flanking either side of central polymorphic SNP; −log 10 P values for GWS, −log 10 of the P value for statistical significance from the GWS for single SNP markers and for the most highly associated multi-marker haplotypes centered at the reference marker and defined by the sliding windows of specified sizes.
Table 19.3. List of significantly associated haplotypes based on the schizophrenia Disease GWS results using the Quebec Founder Population (QFP). Individual haplotypes with associated relative risks are presented in each row of the table; these values were extracted from the associated marker haplotype window with the most significant p value for each SNP in Table 19.2. The first column lists the region ID as presented in Table 1. The Haplotype column lists the specific nucleotides for the individual SNP alleles contributing to the haplotype reported. The Case and Control columns correspond to the numbers of cases and controls, respectively, containing the haplotype variant noted in the Haplotype column. The Total Case and Total Control columns list the total numbers of cases and controls for which genotype data was available for the haplotype in question. The RR column gives to the relative risk for each particular haplotype. The remainder of the columns lists the SeqIDs for the SNPs contributing to the haplotype and their relative location with respect to the central marker. The Central marker (0) column lists the SeqID for the central marker on which the haplotype is based. Flanking markers are identified by minus (−) or plus (+) signs to indicate the relative location of flanking SNPs.
Table 20.1. Genome wide association study results in the Quebec Founder Population (QFP). SNP markers found to be associated with schizophrenia from the analysis of genome wide scan (GWS) data: NRG1-1_cr2-has (all results, not to claim). Columns include: Region ID; Chromosome; Build 36 location in base pairs (bp); rs#, dbSNP data base (NCBI) reference number; Sequence ID, unique numerical identifier for this patent application; Sequence, 21 by of sequence covering 10 base pair of unique sequence flanking either side of central polymorphic SNP; −log 10 P values for GWS, −log 10 of the P value for statistical significance from the GWS for single SNP markers and for the most highly associated multi-marker haplotypes centered at the reference marker and defined by the sliding windows of specified sizes.
Table 20.2. Genome wide association study results in the Quebec Founder Population (QFP). SNP markers found to be associated with schizophrenia from the analysis of genome wide scan (GWS) data: NRG1-1_cr2-has (to claim). Columns include: Region ID; Chromosome; Build 36 location in base pairs (bp); rs#, dbSNP data base (NCBI) reference number; Sequence ID, unique numerical identifier for this patent application; Sequence, 21 by of sequence covering 10 base pair of unique sequence flanking either side of central polymorphic SNP; −log 10 P values for GWS, −log 10 of the P value for statistical significance from the GWS for single SNP markers and for the most highly associated multi-marker haplotypes centered at the reference marker and defined by the sliding windows of specified sizes.
Table 20.3. List of significantly associated haplotypes based on the schizophrenia Disease GWS results using the Quebec Founder Population (QFP). Individual haplotypes with associated relative risks are presented in each row of the table; these values were extracted from the associated marker haplotype window with the most significant p value for each SNP in Table 20.2. The first column lists the region ID as presented in Table 1. The Haplotype column lists the specific nucleotides for the individual SNP alleles contributing to the haplotype reported. The Case and Control columns correspond to the numbers of cases and controls, respectively, containing the haplotype variant noted in the Haplotype column. The Total Case and Total Control columns list the total numbers of cases and controls for which genotype data was available for the haplotype in question. The RR column gives to the relative risk for each particular haplotype. The remainder of the columns lists the SeqIDs for the SNPs contributing to the haplotype and their relative location with respect to the central marker. The Central marker (0) column lists the SeqID for the central marker on which the haplotype is based. Flanking markers are identified by minus (−) or plus (+) signs to indicate the relative location of flanking SNPs.
Table 21.1. Genome wide association study results in the Quebec Founder Population (QFP). SNP markers found to be associated with schizophrenia from the analysis of genome wide scan (GWS) data: NRG1-1_cr2-not. Columns include: Region ID; Chromosome; Build 36 location in base pairs (bp); rs#, dbSNP data base (NCBI) reference number; Sequence ID, unique numerical identifier for this patent application; Sequence, 21 by of sequence covering 10 base pair of unique sequence flanking either side of central polymorphic SNP; −log 10 P values for GWS, −log 10 of the P value for statistical significance from the GWS for single SNP markers and for the most highly associated multi-marker haplotypes centered at the reference marker and defined by the sliding windows of specified sizes.
Table 21.2. List of significantly associated haplotypes based on the schizophrenia Disease GWS results using the Quebec Founder Population (QFP). Individual haplotypes with associated relative risks are presented in each row of the table; these values were extracted from the associated marker haplotype window with the most significant p value for each SNP in Table 21.1. The first column lists the region ID as presented in Table 1. The Haplotype column lists the specific nucleotides for the individual SNP alleles contributing to the haplotype reported. The Case and Control columns correspond to the numbers of cases and controls, respectively, containing the haplotype variant noted in the Haplotype column. The Total Case and Total Control columns list the total numbers of cases and controls for which genotype data was available for the haplotype in question. The RR column gives to the relative risk for each particular haplotype. The remainder of the columns lists the SeqIDs for the SNPs contributing to the haplotype and their relative location with respect to the central marker. The Central marker (0) column lists the SeqID for the central marker on which the haplotype is based. Flanking markers are identified by minus (−) or plus (+) signs to indicate the relative location of flanking SNPs.
Table 22.1. Genome wide association study results in the Quebec Founder Population (QFP). SNP markers found to be associated with schizophrenia from the analysis of genome wide scan (GWS) data: Female Affected. Columns include: Region ID; Chromosome; Build 36 location in base pairs (bp); rs#, dbSNP data base (NCBI) reference number; Sequence ID, unique numerical identifier for this patent application; Sequence, 21 by of sequence covering 10 base pair of unique sequence flanking either side of central polymorphic SNP; −log 10 P values for GWS, −log 10 of the P value for statistical significance from the GWS for single SNP markers (both T test and Permutation test p-values are displayed; see Example section) and for the most highly associated multi-marker haplotypes centered at the reference marker and defined by the sliding windows of specified sizes.
Table 22.2 List of significantly associated haplotypes based on the schizophrenia Disease GWS results using the Quebec Founder Population (QFP). Individual haplotypes with associated relative risks are presented in each row of the table; these values were extracted from the associated marker haplotype window with the most significant p value for each SNP in Table 22.1. The first column lists the region ID as presented in Table 1. The Haplotype column lists the specific nucleotides for the individual SNP alleles contributing to the haplotype reported. The Case and Control columns correspond to the numbers of cases and controls, respectively, containing the haplotype variant noted in the Haplotype column. The Total Case and Total Control columns list the total numbers of cases and controls for which genotype data was available for the haplotype in question. The RR column gives to the relative risk for each particular haplotype. The remainder of the columns lists the SeqIDs for the SNPs contributing to the haplotype and their relative location with respect to the central marker. The Central marker (0) column lists the SeqID for the central marker on which the haplotype is based. Flanking markers are identified by minus (−) or plus (+) signs to indicate the relative location of flanking SNPs.
Table 23.1. Genome wide association study results in the Quebec Founder Population (QFP). SNP markers found to be associated with schizophrenia from the analysis of genome wide scan (GWS) data: Female_less_than_{—}25. Columns include: Region ID; Chromosome; Build 36 location in base pairs (bp); rs#, dbSNP data base (NCBI) reference number; Sequence ID, unique numerical identifier for this patent application; Sequence, 21 by of sequence covering 10 base pair of unique sequence flanking either side of central polymorphic SNP; −log 10 P values for GWS, −log 10 of the P value for statistical significance from the GWS for single SNP markers (both T test and Permutation test p-values are displayed; see Example section) and for the most highly associated multi-marker haplotypes centered at the reference marker and defined by the sliding windows of specified sizes.
Table 23.2. List of significantly associated haplotypes based on the schizophrenia Disease GWS results using the Quebec Founder Population (QFP). Individual haplotypes with associated relative risks are presented in each row of the table; these values were extracted from the associated marker haplotype window with the most significant p value for each SNP in Table 23.1. The first column lists the region ID as presented in Table 1. The Haplotype column lists the specific nucleotides for the individual SNP alleles contributing to the haplotype reported. The Case and Control columns correspond to the numbers of cases and controls, respectively, containing the haplotype variant noted in the Haplotype column. The Total Case and Total Control columns list the total numbers of cases and controls for which genotype data was available for the haplotype in question. The RR column gives to the relative risk for each particular haplotype. The remainder of the columns lists the SeqIDs for the SNPs contributing to the haplotype and their relative location with respect to the central marker. The Central marker (0) column lists the SeqID for the central marker on which the haplotype is based. Flanking markers are identified by minus (−) or plus (+) signs to indicate the relative location of flanking SNPs.
Table 24.1. Genome wide association study results in the Quebec Founder Population (QFP). SNP markers found to be associated with schizophrenia from the analysis of genome wide scan (GWS) data: Female_more_than_{—}25. Columns include: Region ID; Chromosome; Build 36 location in base pairs (bp); rs#, dbSNP data base (NCBI) reference number; Sequence ID, unique numerical identifier for this patent application; Sequence, 21 by of sequence covering 10 base pair of unique sequence flanking either side of central polymorphic SNP; −log 10 P values for GWS, −log 10 of the P value for statistical significance from the GWS for single SNP markers (both T test and Permutation test p-values are displayed; see Example section) and for the most highly associated multi-marker haplotypes centered at the reference marker and defined by the sliding windows of specified sizes.
Table 24.2. List of significantly associated haplotypes based on the schizophrenia Disease GWS results using the Quebec Founder Population (QFP). Individual haplotypes with associated relative risks are presented in each row of the table; these values were extracted from the associated marker haplotype window with the most significant p value for each SNP in Table 24.1. The first column lists the region ID as presented in Table 1. The Haplotype column lists the specific nucleotides for the individual SNP alleles contributing to the haplotype reported. The Case and Control columns correspond to the numbers of cases and controls, respectively, containing the haplotype variant noted in the Haplotype column. The Total Case and Total Control columns list the total numbers of cases and controls for which genotype data was available for the haplotype in question. The RR column gives to the relative risk for each particular haplotype. The remainder of the columns lists the SeqIDs for the SNPs contributing to the haplotype and their relative location with respect to the central marker. The Central marker (0) column lists the SeqID for the central marker on which the haplotype is based. Flanking markers are identified by minus (−) or plus (+) signs to indicate the relative location of flanking SNPs.
Table 25.1. Genome wide association study results in the Quebec Founder Population (QFP). SNP markers found to be associated with schizophrenia from the analysis of genome wide scan (GWS) data: Male Affected. Columns include: Region ID; Chromosome; Build 36 location in base pairs (bp); rs#, dbSNP data base (NCBI) reference number; Sequence ID, unique numerical identifier for this patent application; Sequence, 21 by of sequence covering 10 base pair of unique sequence flanking either side of central polymorphic SNP; −log 10 P values for GWS, −log 10 of the P value for statistical significance from the GWS for single SNP markers (both T test and Permutation test p-values are displayed; see Example section) and for the most highly associated multi-marker haplotypes centered at the reference marker and defined by the sliding windows of specified sizes.
Table 25.2. List of significantly associated haplotypes based on the schizophrenia Disease GWS results using the Quebec Founder Population (QFP). Individual haplotypes with associated relative risks are presented in each row of the table; these values were extracted from the associated marker haplotype window with the most significant p value for each SNP in Table 25.1. The first column lists the region ID as presented in Table 1. The Haplotype column lists the specific nucleotides for the individual SNP alleles contributing to the haplotype reported. The Case and Control columns correspond to the numbers of cases and controls, respectively, containing the haplotype variant noted in the Haplotype column. The Total Case and Total Control columns list the total numbers of cases and controls for which genotype data was available for the haplotype in question. The RR column gives to the relative risk for each particular haplotype. The remainder of the columns lists the SeqIDs for the SNPs contributing to the haplotype and their relative location with respect to the central marker. The Central marker (0) column lists the SeqID for the central marker on which the haplotype is based. Flanking markers are identified by minus (−) or plus (+) signs to indicate the relative location of flanking SNPs.
Table 26.1. Genome wide association study results in the Quebec Founder Population (QFP). SNP markers found to be associated with schizophrenia from the analysis of genome wide scan (GWS) data: WNT7A-1-cr1_has_w1. Columns include: Region ID; Chromosome; Build 36 location in base pairs (bp); rs#, dbSNP data base (NCBI) reference number; Sequence ID, unique numerical identifier for this patent application; Sequence, 21 by of sequence covering 10 base pair of unique sequence flanking either side of central polymorphic SNP; −log 10 P values for GWS, −log 10 of the P value for statistical significance from the GWS for single SNP markers.
Table 26.2. List of significantly associated haplotypes based on the schizophrenia Disease GWS results using the Quebec Founder Population (QFP). Individual haplotypes with associated relative risks are presented in each row of the table; these values were extracted from the associated marker haplotype window with the most significant p value for each SNP in Table 26.1. The first column lists the region ID as presented in Table 1. The Haplotype column lists the specific nucleotides for the individual SNP alleles contributing to the haplotype reported. The Case and Control columns correspond to the numbers of cases and controls, respectively, containing the haplotype variant noted in the Haplotype column. The Total Case and Total Control columns list the total numbers of cases and controls for which genotype data was available for the haplotype in question. The RR column gives to the relative risk for each particular haplotype. The remainder of the columns lists the SeqIDs for the SNPs contributing to the haplotype and their relative location with respect to the central marker. The Central marker (0) column lists the SeqID for the central marker on which the haplotype is based. Flanking markers are identified by minus (−) or plus (+) signs to indicate the relative location of flanking SNPs.
Table 27.1. Genome wide association study results in the Quebec Founder Population (QFP). SNP markers found to be associated with schizophrenia from the analysis of genome wide scan (GWS) data: Male less than 20. Columns include: Region ID; Chromosome; Build 36 location in base pairs (bp); rs#, dbSNP data base (NCBI) reference number; Sequence ID, unique numerical identifier for this patent application; Sequence, 21 by of sequence covering 10 base pair of unique sequence flanking either side of central polymorphic SNP; −log 10 P values for GWS, −log 10 of the P value for statistical significance from the GWS for single SNP markers (both T test and Permutation test p-values are displayed; see Example section) and for the most highly associated multi-marker haplotypes centered at the reference marker and defined by the sliding windows of specified sizes.
Table 27.2. List of significantly associated haplotypes based on the schizophrenia Disease GWS results using the Quebec Founder Population (QFP). Individual haplotypes with associated relative risks are presented in each row of the table; these values were extracted from the associated marker haplotype window with the most significant p value for each SNP in Table 27.1. The first column lists the region ID as presented in Table 1. The Haplotype column lists the specific nucleotides for the individual SNP alleles contributing to the haplotype reported. The Case and Control columns correspond to the numbers of cases and controls, respectively, containing the haplotype variant noted in the Haplotype column. The Total Case and Total Control columns list the total numbers of cases and controls for which genotype data was available for the haplotype in question. The RR column gives to the relative risk for each particular haplotype. The remainder of the columns lists the SeqIDs for the SNPs contributing to the haplotype and their relative location with respect to the central marker. The Central marker (0) column lists the SeqID for the central marker on which the haplotype is based. Flanking markers are identified by minus (−) or plus (+) signs to indicate the relative location of flanking SNPs.
Table 28.1 Male more than 20. Genome wide association study results in the Quebec Founder Population (QFP). SNP markers found to be associated with schizophrenia from the analysis of genome wide scan (GWS) data: Male more than 20. Columns include: Region ID; Chromosome; Build 36 location in base pairs (bp); rs#, dbSNP data base (NCBI) reference number; Sequence ID, unique numerical identifier for this patent application; Sequence, 21 by of sequence covering 10 base pair of unique sequence flanking either side of central polymorphic SNP; −log 10 P values for GWS, −log 10 of the P value for statistical significance from the GWS for single SNP markers (both T test and Permutation test p-values are displayed; see Example section) and for the most highly associated multi-marker haplotypes centered at the reference marker and defined by the sliding windows of specified sizes.
Table 28.2. List of significantly associated haplotypes based on the schizophrenia Disease GWS results using the Quebec Founder Population (QFP). Individual haplotypes with associated relative risks are presented in each row of the table; these values were extracted from the associated marker haplotype window with the most significant p value for each SNP in Table 28.1. The first column lists the region ID as presented in Table 1. The Haplotype column lists the specific nucleotides for the individual SNP alleles contributing to the haplotype reported. The Case and Control columns correspond to the numbers of cases and controls, respectively, containing the haplotype variant noted in the Haplotype column. The Total Case and Total Control columns list the total numbers of cases and controls for which genotype data was available for the haplotype in question. The RR column gives to the relative risk for each particular haplotype. The remainder of the columns lists the SeqIDs for the SNPs contributing to the haplotype and their relative location with respect to the central marker. The Central marker (0) column lists the SeqID for the central marker on which the haplotype is based. Flanking markers are identified by minus (−) or plus (+) signs to indicate the relative location of flanking SNPs.
Table 29.1. Genome wide association study results in the Quebec Founder Population (QFP). SNP markers found to be associated with schizophrenia from the analysis of genome wide scan (GWS) data: CIAS1-1-cr2_not. Columns include: Region ID; Chromosome; Build 36 location in base pairs (bp); rs#, dbSNP data base (NCBI) reference number; Sequence ID, unique numerical identifier for this patent application; Sequence, 21 by of sequence covering 10 base pair of unique sequence flanking either side of central polymorphic SNP; −log 10 P values for GWS, −log 10 of the P value for statistical significance from the GWS for single SNP markers.
Table 29.2. List of significantly associated haplotypes based on the schizophrenia Disease GWS results using the Quebec Founder Population (QFP). Individual haplotypes with associated relative risks are presented in each row of the table; these values were extracted from the associated marker haplotype window with the most significant p value for each SNP in Table 29.1. The first column lists the region ID as presented in Table 1. The Haplotype column lists the specific nucleotides for the individual SNP alleles contributing to the haplotype reported. The Case and Control columns correspond to the numbers of cases and controls, respectively, containing the haplotype variant noted in the Haplotype column. The Total Case and Total Control columns list the total numbers of cases and controls for which genotype data was available for the haplotype in question. The RR column gives to the relative risk for each particular haplotype. The remainder of the columns lists the SeqIDs for the SNPs contributing to the haplotype and their relative location with respect to the central marker. The Central marker (0) column lists the SeqID for the central marker on which the haplotype is based. Flanking markers are identified by minus (−) or plus (+) signs to indicate the relative location of flanking SNPs.
Table 30.1. Genome wide association study results in the Quebec Founder Population (QFP). SNP markers found to be associated with schizophrenia from the analysis of genome wide scan (GWS) data: WNT7A-1-cr1_not. Columns include: Region ID; Chromosome; Build 36 location in base pairs (bp); rs#, dbSNP data base (NCBI) reference number; Sequence ID, unique numerical identifier for this patent application; Sequence, 21 by of sequence covering 10 base pair of unique sequence flanking either side of central polymorphic SNP; −log 10 P values for GWS, −log 10 of the P value for statistical significance from the GWS for single SNP markers and for the most highly associated multi-marker haplotypes centered at the reference marker and defined by the sliding windows of specified sizes.
Table 30.2. List of significantly associated haplotypes based on the schizophrenia Disease GWS results using the Quebec Founder Population (QFP). Individual haplotypes with associated relative risks are presented in each row of the table; these values were extracted from the associated marker haplotype window with the most significant p value for each SNP in Table 30.1. The first column lists the region ID as presented in Table 1. The Haplotype column lists the specific nucleotides for the individual SNP alleles contributing to the haplotype reported. The Case and Control columns correspond to the numbers of cases and controls, respectively, containing the haplotype variant noted in the Haplotype column. The Total Case and Total Control columns list the total numbers of cases and controls for which genotype data was available for the haplotype in question. The RR column gives to the relative risk for each particular haplotype. The remainder of the columns lists the SeqIDs for the SNPs contributing to the haplotype and their relative location with respect to the central marker. The Central marker (0) column lists the SeqID for the central marker on which the haplotype is based. Flanking markers are identified by minus (−) or plus (+) signs to indicate the relative location of flanking SNPs.
Table 31.1. Genome wide association study results in the Quebec Founder Population (QFP). SNP markers found to be associated with schizophrenia from the analysis of genome wide scan (GWS) data: PTPRD-1_cp_not. Columns include: Region ID; Chromosome; Build 36 location in base pairs (bp); rs#, dbSNP data base (NCBI) reference number; Sequence ID, unique numerical identifier for this patent application; Sequence, 21 by of sequence covering 10 base pair of unique sequence flanking either side of central polymorphic SNP; −log 10 P values for GWS, −log 10 of the P value for statistical significance from the GWS for single SNP markers.
Table 31.2. List of significantly associated haplotypes based on the schizophrenia Disease GWS results using the Quebec Founder Population (QFP). Individual haplotypes with associated relative risks are presented in each row of the table; these values were extracted from the associated marker haplotype window with the most significant p value for each SNP in Table 31.1. The first column lists the region ID as presented in Table 1. The Haplotype column lists the specific nucleotides for the individual SNP alleles contributing to the haplotype reported. The Case and Control columns correspond to the numbers of cases and controls, respectively, containing the haplotype variant noted in the Haplotype column. The Total Case and Total Control columns list the total numbers of cases and controls for which genotype data was available for the haplotype in question. The RR column gives to the relative risk for each particular haplotype. The remainder of the columns lists the SeqIDs for the SNPs contributing to the haplotype and their relative location with respect to the central marker. The Central marker (0) column lists the SeqID for the central marker on which the haplotype is based. Flanking markers are identified by minus (−) or plus (+) signs to indicate the relative location of flanking SNPs.
Table 32.1. Genome wide association study results in the Quebec Founder Population (QFP). SNP markers found to be associated with schizophrenia from the analysis of genome wide scan (GWS) data: PTPRD-1_cp-has (all results, not to claim). Columns include: Region ID; Chromosome; Build 36 location in base pairs (bp); rs#, dbSNP data base (NCBI) reference number; Sequence ID, unique numerical identifier for this patent application; Sequence, 21 by of sequence covering 10 base pair of unique sequence flanking either side of central polymorphic SNP; −log 10 P values for GWS, −log 10 of the P value for statistical significance from the GWS for single SNP markers and for the most highly associated multi-marker haplotypes centered at the reference marker and defined by the sliding windows of specified sizes.
Table 32.2. Genome wide association study results in the Quebec Founder Population (QFP). SNP markers found to be associated with schizophrenia from the analysis of genome wide scan (GWS) data: PTPRD-1_cp-has (to claim). Columns include: Region ID; Chromosome; Build 36 location in base pairs (bp); rs#, dbSNP data base (NCBI) reference number; Sequence ID, unique numerical identifier for this patent application; Sequence, 21 by of sequence covering 10 base pair of unique sequence flanking either side of central polymorphic SNP; −log 10 P values for GWS, −log 10 of the P value for statistical significance from the GWS for single SNP markers and for the most highly associated multi-marker haplotypes centered at the reference marker and defined by the sliding windows of specified sizes.
Table 32.3. List of significantly associated haplotypes based on the schizophrenia Disease GWS results using the Quebec Founder Population (QFP). Individual haplotypes with associated relative risks are presented in each row of the table; these values were extracted from the associated marker haplotype window with the most significant p value for each SNP in Table 32.2. The first column lists the region ID as presented in Table 1. The Haplotype column lists the specific nucleotides for the individual SNP alleles contributing to the haplotype reported. The Case and Control columns correspond to the numbers of cases and controls, respectively, containing the haplotype variant noted in the Haplotype column. The Total Case and Total Control columns list the total numbers of cases and controls for which genotype data was available for the haplotype in question. The RR column gives to the relative risk for each particular haplotype. The remainder of the columns lists the SeqIDs for the SNPs contributing to the haplotype and their relative location with respect to the central marker. The Central marker (0) column lists the SeqID for the central marker on which the haplotype is based. Flanking markers are identified by minus (−) or plus (+) signs to indicate the relative location of flanking SNPs.
Table 33.1. Genome wide association study results in the Quebec Founder Population (QFP). SNP markers found to be associated with schizophrenia from the analysis of genome wide scan (GWS) data: PTPRD-1_cr1_not. Columns include: Region ID; Chromosome; Build 36 location in base pairs (bp); rs#, dbSNP data base (NCBI) reference number; Sequence ID, unique numerical identifier for this patent application; Sequence, 21 by of sequence covering 10 base pair of unique sequence flanking either side of central polymorphic SNP; −log 10 P values for GWS, −log 10 of the P value for statistical significance from the GWS for single SNP markers and for the most highly associated multi-marker haplotypes centered at the reference marker and defined by the sliding windows of specified sizes.
Table 33.2. List of significantly associated haplotypes based on the schizophrenia Disease GWS results using the Quebec Founder Population (QFP). Individual haplotypes with associated relative risks are presented in each row of the table; these values were extracted from the associated marker haplotype window with the most significant p value for each SNP in Table 33.1. The first column lists the region ID as presented in Table 1. The Haplotype column lists the specific nucleotides for the individual SNP alleles contributing to the haplotype reported. The Case and Control columns correspond to the numbers of cases and controls, respectively, containing the haplotype variant noted in the Haplotype column. The Total Case and Total Control columns list the total numbers of cases and controls for which genotype data was available for the haplotype in question. The RR column gives to the relative risk for each particular haplotype. The remainder of the columns lists the SeqIDs for the SNPs contributing to the haplotype and their relative location with respect to the central marker. The Central marker (0) column lists the SeqID for the central marker on which the haplotype is based. Flanking markers are identified by minus (−) or plus (+) signs to indicate the relative location of flanking SNPs.
Table 34.1. Genome wide association study results in the Quebec Founder Population (QFP). SNP markers found to be associated with schizophrenia from the analysis of genome wide scan (GWS) data: PTPRD-1_cr1-has_w1. Columns include: Region ID; Chromosome; Build 36 location in base pairs (bp); rs#, dbSNP data base (NCBI) reference number; Sequence ID, unique numerical identifier for this patent application; Sequence, 21 by of sequence covering 10 base pair of unique sequence flanking either side of central polymorphic SNP; −log 10 P values for GWS, −log 10 of the P value for statistical significance from the GWS for single SNP markers.
Table 34.2. List of significantly associated haplotypes based on the schizophrenia Disease GWS results using the Quebec Founder Population (QFP). Individual haplotypes with associated relative risks are presented in each row of the table; these values were extracted from the associated marker haplotype window with the most significant p value for each SNP in Table 34.1. The first column lists the region ID as presented in Table 1. The Haplotype column lists the specific nucleotides for the individual SNP alleles contributing to the haplotype reported. The Case and Control columns correspond to the numbers of cases and controls, respectively, containing the haplotype variant noted in the Haplotype column. The Total Case and Total Control columns list the total numbers of cases and controls for which genotype data was available for the haplotype in question. The RR column gives to the relative risk for each particular haplotype. The remainder of the columns lists the SeqIDs for the SNPs contributing to the haplotype and their relative location with respect to the central marker. The Central marker (0) column lists the SeqID for the central marker on which the haplotype is based. Flanking markers are identified by minus (−) or plus (+) signs to indicate the relative location of flanking SNPs.
Table 35.1. Genome wide association study results in the Quebec Founder Population (QFP). SNP markers found to be associated with schizophrenia from the analysis of genome wide scan (GWS) data: PTPRD-1_cr2-has_w1. Columns include: Region ID; Chromosome; Build 36 location in base pairs (bp); rs#, dbSNP data base (NCBI) reference number; Sequence ID, unique numerical identifier for this patent application; Sequence, 21 by of sequence covering 10 base pair of unique sequence flanking either side of central polymorphic SNP; −log 10 P values for GWS, −log 10 of the P value for statistical significance from the GWS for single SNP markers.
Table 35.2. List of significantly associated haplotypes based on the schizophrenia Disease GWS results using the Quebec Founder Population (QFP). Individual haplotypes with associated relative risks are presented in each row of the table; these values were extracted from the associated marker haplotype window with the most significant p value for each SNP in Table 35.1. The first column lists the region ID as presented in Table 1. The Haplotype column lists the specific nucleotides for the individual SNP alleles contributing to the haplotype reported. The Case and Control columns correspond to the numbers of cases and controls, respectively, containing the haplotype variant noted in the Haplotype column. The Total Case and Total Control columns list the total numbers of cases and controls for which genotype data was available for the haplotype in question. The RR column gives to the relative risk for each particular haplotype. The remainder of the columns lists the SeqIDs for the SNPs contributing to the haplotype and their relative location with respect to the central marker. The Central marker (0) column lists the SeqID for the central marker on which the haplotype is based. Flanking markers are identified by minus (−) or plus (+) signs to indicate the relative location of flanking SNPs.
Table 36. Probes used for the in situ hybridization (ISH) study (see Example section for details).
Table 37. Description of Primer sequences used for the semi-quantitative gene expression profiling by RT-PCR (see Example section for details).
Table 38. PCR product sequences.

### DEFINITIONS

[0019] Throughout the description of the present invention, several terms are used that are specific to the science of this field. For the sake of clarity and to avoid any misunderstanding, these definitions are provided to aid in the understanding of the specification and claims.

Allele: One of a pair, or series, of forms of a gene or non-genic region that occur at a given locus in a chromosome. Alleles are symbolized with the same basic symbol (e.g., B for dominant and b for recessive; B1, B2, Bn for n additive alleles at a locus). In a normal diploid cell there are two alleles of any one gene (one from each parent), which occupy the same relative position (locus) on homologous chromosomes. Within a population there may be more than two alleles of a gene. See multiple alleles. SNPs also have alleles, i.e., the two (or more) nucleotides that characterize the SNP.
Amplification of nucleic acids: refers to methods such as polymerase chain reaction (PCR), ligation amplification (or ligase chain reaction, LCR) and amplification methods based on the use of Q-beta replicase. These methods are well known in the art and are described, for example, in U.S. Pat. Nos. 4,683,195 and 4,683,202. Reagents and hardware for conducting PCR are commercially available. Primers useful for amplifying sequences from the disorder region are preferably complementary to, and preferably hybridize specifically to, sequences in the disorder region or in regions that flank a target region therein. Genes from Tables 2-4 generated by amplification may be sequenced directly. Alternatively, the amplified sequence(s) may be cloned prior to sequence analysis.
Antigenic component: is a moiety that binds to its specific antibody with sufficiently high affinity to form a detectable antigen-antibody complex.
Antibodies: refer to polyclonal and/or monoclonal antibodies and fragments thereof, and immunologic binding equivalents thereof, that can bind to proteins and fragments thereof or to nucleic acid sequences from the disorder region, particularly from the disorder gene products or a portion thereof. The term antibody is used both to refer to a homogeneous molecular entity, or a mixture such as a serum product made up of a plurality of different molecular entities. Proteins may be prepared synthetically in a protein synthesizer and coupled to a carrier molecule and injected over several months into rabbits. Rabbit sera are tested for immunoreactivity to the protein or fragment. Monoclonal antibodies may be made by injecting mice with the proteins, or fragments thereof. Monoclonal antibodies can be screened by ELISA and tested for specific immunoreactivity with protein or fragments thereof (Harlow et al. 1988, Antibodies: A Laboratory Manual, Cold Spring Harbor Laboratory, Cold Spring Harbor, N.Y.). These antibodies will be useful in developing assays as well as therapeutics.
Associated allele: refers to an allele at a polymorphic locus that is associated with a particular phenotype of interest, e.g., a predisposition to a disorder or a particular drug response.
cDNA: refers to complementary or copy DNA produced from an RNA template by the action of RNA-dependent DNA polymerase (reverse transcriptase). Thus, a cDNA clone means a duplex DNA sequence complementary to an RNA molecule of interest, included in a cloning vector or PCR amplified. This term includes genes from which the intervening sequences have been removed.
cDNA library: refers to a collection of recombinant DNA molecules containing cDNA inserts that together comprise essentially all of the expressed genes of an organism or tissue. A cDNA library can be prepared by methods known to one skilled in the art (see, e.g., Cowell and Austin, 1997, “DNA Library Protocols,” Methods in Molecular Biology). Generally, RNA is first isolated from the cells of the desired organism, and the RNA is used to prepare cDNA molecules.
Cloning: refers to the use of recombinant DNA techniques to insert a particular gene or other DNA sequence into a vector molecule. In order to successfully clone a desired gene, it is necessary to use methods for generating DNA fragments, for joining the fragments to vector molecules, for introducing the composite DNA molecule into a host cell in which it can replicate, and for selecting the clone having the target gene from amongst the recipient host cells.
Cloning vector: refers to a plasmid or phage DNA or other DNA molecule that is able to replicate in a host cell. The cloning vector is typically characterized by one or more endonuclease recognition sites at which such DNA sequences may be cleaved in a determinable fashion without loss of an essential biological function of the DNA, and which may contain a selectable marker suitable for use in the identification of cells containing the vector.
Coding sequence or a protein-coding sequence: is a polynucleotide sequence capable of being transcribed into mRNA and/or capable of being translated into a polypeptide or peptide. The boundaries of the coding sequence are typically determined by a translation start codon at the 5′-terminus and a translation stop codon at the 3′-terminus.
Complement of a nucleic acid sequence: refers to the antisense sequence that participates in Watson-Crick base-pairing with the original sequence.
Disorder region: refers to the portions of the human chromosomes displayed in Table 1 bounded by the markers from Tables 2-35.
Disorder-associated nucleic acid or polypeptide sequence: refers to a nucleic acid sequence that maps to region of Table 1 or the polypeptides encoded therein (Tables 2-4, nucleic acids, and polypeptides). For nucleic acids, this encompasses sequences that are identical or complementary to the gene sequences from Tables 2-4, as well as sequence-conservative, function-conservative, and non-conservative variants thereof. For polypeptides, this encompasses sequences that are identical to the polypeptide, as well as function-conservative and non-conservative variants thereof. Included are the alleles of naturally-occurring polymorphisms causative of SCHIZOPHRENIA disease such as, but not limited to, alleles that cause altered expression of genes of Tables 2-4 and alleles that cause altered protein levels or stability (e.g., decreased levels, increased levels, expression in an inappropriate tissue type, increased stability, and decreased stability).
Expression vector: refers to a vehicle or plasmid that is capable of expressing a gene that has been cloned into it, after transformation or integration in a host cell. The cloned gene is usually placed under the control of (i.e., operably linked to) a regulatory sequence.
Function-conservative variants: are those in which a change in one or more nucleotides in a given codon position results in a polypeptide sequence in which a given amino acid residue in the polypeptide has been replaced by a conservative amino acid substitution. Function-conservative variants also include analogs of a given polypeptide and any polypeptides that have the ability to elicit antibodies specific to a designated polypeptide.
Founder population: Also a population isolate, this is a large number of people who have mostly descended, in genetic isolation from other populations, from a much smaller number of people who lived many generations ago.
Gene: Refers to a DNA sequence that encodes through its template or messenger RNA a sequence of amino acids characteristic of a specific peptide, polypeptide, or protein. The term “gene” also refers to a DNA sequence that encodes an RNA product. The term gene as used herein with reference to genomic DNA includes intervening, non-coding regions, as well as regulatory regions, and can include 5′ and 3′ ends. A gene sequence is wild-type if such sequence is usually found in individuals unaffected by the disorder or condition of interest. However, environmental factors and other genes can also play an important role in the ultimate determination of the disorder. In the context of complex disorders involving multiple genes (oligogenic disorder), the wild type, or normal sequence can also be associated with a measurable risk or susceptibility, receiving its reference status based on its frequency in the general population.
GeneMaps: are defined as groups of gene(s) that are directly or indirectly involved in at least one phenotype of a disorder (some non-limiting example of GeneMaps comprises varius combinations of genes from Tables 2-4). As such, GeneMaps enable the development of synergistic diagnostic products, creating “theranostics”.
Genotype: Set of alleles at a specified locus or loci.
Haplotype: The allelic pattern of a group of (usually contiguous) DNA markers or other polymorphic loci along an individual chromosome or double helical DNA segment. Haplotypes identify individual chromosomes or chromosome segments. The presence of shared haplotype patterns among a group of individuals implies that the locus defined by the haplotype has been inherited, identical by descent (IBD), from a common ancestor. Detection of identical by descent haplotypes is the basis of linkage disequilibrium (LD) mapping. Haplotypes are broken down through the generations by recombination and mutation. In some instances, a specific allele or haplotype may be associated with susceptibility to a disorder or condition of interest, e.g., SCHIZOPHRENIA disease. In other instances, an allele or haplotype may be associated with a decrease in susceptibility to a disorder or condition of interest, i.e., a protective sequence.
Host: includes prokaryotes and eukaryotes. The term includes an organism or cell that is the recipient of an expression vector (e.g., autonomously replicating or integrating vector).
Hybridizable: nucleic acids are hybridizable to each other when at least one strand of the nucleic acid can anneal to another nucleic acid strand under defined stringency conditions. In some embodiments, hybridization requires that the two nucleic acids contain at least 10 substantially complementary nucleotides; depending on the stringency of hybridization, however, mismatches may be tolerated. The appropriate stringency for hybridizing nucleic acids depends on the length of the nucleic acids and the degree of complementarity, and can be determined in accordance with the methods described herein.
Identity by descent (IBD): Identity among DNA sequences for different individuals that is due to the fact that they have all been inherited from a common ancestor. LD mapping identifies IBD haplotypes as the likely location of disorder genes shared by a group of patients.
Identity: as known in the art, is a relationship between two or more polypeptide sequences or two or more polynucleotide sequences, as determined by comparing the sequences. In the art, identity also means the degree of sequence relatedness between polypeptide or polynucleotide sequences, as the case may be, as determined by the match between strings of such sequences. Identity and similarity can be readily calculated by known methods, including but not limited to those described in A. M. Lesk (ed), 1988, Computational Molecular Biology, Oxford University Press, NY; D. W. Smith (ed), 1993, Biocomputing. Informatics and Genome Projects, Academic Press, NY; A. M. Griffin and H. G. Griffin, H. G (eds), 1994, ComputerAnalysis of Sequence Data, Part 1, Humana Press, NJ; G. von Heinje, 1987, Sequence Analysis in Molecular Biology, Academic Press; and M. Gribskov and J. Devereux (eds), 1991, Sequence Analysis Primer, M Stockton Press, NY; H. Carillo and D. Lipman, 1988, SIAM J. Applied Math., 48:1073.
Immunogenic component: is a moiety that is capable of eliciting a humoral and/or cellular immune response in a host animal.
Isolated nucleic acids: are nucleic acids separated away from other components (e.g., DNA, RNA, and protein) with which they are associated (e.g., as obtained from cells, chemical synthesis systems, or phage or nucleic acid libraries). Isolated nucleic acids are at least 60% free, preferably 75% free, and most preferably 90% free from other associated components. In accordance with the present invention, isolated nucleic acids can be obtained by methods described herein, or other established methods, including isolation from natural sources (e.g., cells, tissues, or organs), chemical synthesis, recombinant methods, combinations of recombinant and chemical methods, and library screening methods.

[0020] Isolated polypeptides or peptides: are those that are separated from other components (e.g., DNA, RNA, and other polypeptides or peptides) with which they are associated (e.g., as obtained from cells, translation systems, or chemical synthesis systems). In a preferred embodiment, isolated polypeptides or peptides are at least 10% pure; more preferably, 80% or 90% pure. Isolated polypeptides and peptides include those obtained by methods described herein, or other established methods, including isolation from natural sources (e.g., cells, tissues, or organs), chemical synthesis, recombinant methods, or combinations of recombinant and chemical methods. Proteins or polypeptides referred to herein as recombinant are proteins or polypeptides produced by the expression of recombinant nucleic acids. A portion as used herein with regard to a protein or polypeptide, refers to fragments of that protein or polypeptide. The fragments can range in size from 5 amino acid residues to all but one residue of the entire protein sequence. Thus, a portion or fragment can be at least 5, 5-50, 50-100, 100-200, 200-400, 400-800, or more consecutive amino acid residues of a protein or polypeptide.

Linkage disequilibrium (LD): the situation in which the alleles for two or more loci do not occur together in individuals sampled from a population at frequencies predicted by the product of their individual allele frequencies. In other words, markers that are in LD do not follow Mendel's second law of independent random segregation. LD can be caused by any of several demographic or population artifacts as well as by the presence of genetic linkage between markers. However, when these artifacts are controlled and eliminated as sources of LD, then LD results directly from the fact that the loci involved are located close to each other on the same chromosome so that specific combinations of alleles for different markers (haplotypes) are inherited together. Markers that are in high LD can be assumed to be located near each other and a marker or haplotype that is in high LD with a genetic trait can be assumed to be located near the gene that affects that trait. The physical proximity of markers can be measured in family studies where it is called linkage or in population studies where it is called linkage disequilibrium.
LD mapping: population based gene mapping, which locates disorder genes by identifying regions of the genome where haplotypes or marker variation patterns are shared statistically more frequently among disorder patients compared to healthy controls. This method is based upon the assumption that many of the patients will have inherited an allele associated with the disorder from a common ancestor (IBD), and that this allele will be in LD with the disorder gene.
Locus: a specific position along a chromosome or DNA sequence. Depending upon context, a locus could be a gene, a marker, a chromosomal band or a specific sequence of one or more nucleotides.
Minor allele frequency (MAF): the population frequency of one of the alleles for a given polymorphism, which is equal or less than 50%. The sum of the MAF and the Major allele frequency equals one.
Markers: an identifiable DNA sequence that is variable (polymorphic) for different individuals within a population. These sequences facilitate the study of inheritance of a trait or a gene. Such markers are used in mapping the order of genes along chromosomes and in following the inheritance of particular genes; genes closely linked to the marker or in LD with the marker will generally be inherited with it. Two types of markers are commonly used in genetic analysis, microsatellites and SNPs.
Microsatellite: DNA of eukaryotic cells comprising a repetitive, short sequence of DNA that is present as tandem repeats and in highly variable copy number, flanked by sequences unique to that locus.
Mutant sequence: if it differs from one or more wild-type sequences. For example, a nucleic acid from a gene listed in Tables 2-4 containing a particular allele of a single nucleotide polymorphism may be a mutant sequence. In some cases, the individual carrying this allele has increased susceptibility toward the disorder or condition of interest. In other cases, the mutant sequence might also refer to an allele that decreases the susceptibility toward a disorder or condition of interest and thus acts in a protective manner. The term mutation may also be used to describe a specific allele of a polymorphic locus.
Non-conservative variants: are those in which a change in one or more nucleotides in a given codon position results in a polypeptide sequence in which a given amino acid residue in a polypeptide has been replaced by a non-conservative amino acid substitution. Non-conservative variants also include polypeptides comprising non-conservative amino acid substitutions.
Nucleic acid or polynucleotide: purine- and pyrimidine-containing polymers of any length, either polyribonucleotides or polydeoxyribonucleotide or mixed polyribo polydeoxyribonucleotides. This includes single- and double-stranded molecules, i.e., DNA-DNA, DNA-RNA and RNA-RNA hybrids, as well as protein nucleic acids (PNA) formed by conjugating bases to an amino acid backbone. This also includes nucleic acids containing modified bases.
Nucleotide: a nucleotide, the unit of a DNA molecule, is composed of a base, a 2′-deoxyribose and phosphate ester(s) attached at the 5′ carbon of the deoxyribose. For its incorporation in DNA, the nucleotide needs to possess three phosphate esters but it is converted into a monoester in the process.
Operably linked: means that the promoter controls the initiation of expression of the gene. A promoter is operably linked to a sequence of proximal DNA if upon introduction into a host cell the promoter determines the transcription of the proximal DNA sequence(s) into one or more species of RNA. A promoter is operably linked to a DNA sequence if the promoter is capable of initiating transcription of that DNA sequence.
Ortholog: denotes a gene or polypeptide obtained from one species that has homology to an analogous gene or polypeptide from a different species.
Paralog: denotes a gene or polypeptide obtained from a given species that has homology to a distinct gene or polypeptide from that same species.
Phenotype: any visible, detectable or otherwise measurable property of an organism such as symptoms of, or susceptibility to, a disorder.
Polymorphism: occurrence of two or more alternative genomic sequences or alleles between or among different genomes or individuals at a single locus. A polymorphic site thus refers specifically to the locus at which the variation occurs. In some cases, an individual carrying a particular allele of a polymorphism has an increased or decreased susceptibility toward a disorder or condition of interest.
Portion and fragment: are synonymous. A portion as used with regard to a nucleic acid or polynucleotide refers to fragments of that nucleic acid or polynucleotide. The fragments can range in size from 8 nucleotides to all but one nucleotide of the entire gene sequence. Preferably, the fragments are at least about 8 to about 10 nucleotides in length; at least about 12 nucleotides in length; at least about 15 to about 20 nucleotides in length; at least about 25 nucleotides in length; or at least about 35 to about 55 nucleotides in length.
Probe or primer: refers to a nucleic acid or oligonucleotide that forms a hybrid structure with a sequence in a target region of a nucleic acid due to complementarity of the probe or primer sequence to at least one portion of the target region sequence.
Protein and polypeptide: are synonymous. Peptides are defined as fragments or portions of polypeptides, preferably fragments or portions having at least one functional activity (e.g., proteolysis, adhesion, fusion, antigenic, or intracellular activity) as the complete polypeptide sequence.
Recombinant nucleic acids: nucleic acids which have been produced by recombinant DNA methodology, including those nucleic acids that are generated by procedures which rely upon a method of artificial replication, such as the polymerase chain reaction (PCR) and/or cloning into a vector using restriction enzymes. Portions of recombinant nucleic acids which code for polypeptides can be identified and isolated by, for example, the method of M. Jasin et al., U.S. Pat. No. 4,952,501.
Regulatory sequence: refers to a nucleic acid sequence that controls or regulates expression of structural genes when operably linked to those genes. These include, for example, the lac systems, the trp system, major operator and promoter regions of the phage lambda, the control region of fd coat protein and other sequences known to control the expression of genes in prokaryotic or eukaryotic cells. Regulatory sequences will vary depending on whether the vector is designed to express the operably linked gene in a prokaryotic or eukaryotic host, and may contain transcriptional elements such as enhancer elements, termination sequences, tissue-specificity elements and/or translational initiation and termination sites.
Sample: as used herein refers to a biological sample, such as, for example, tissue or fluid isolated from an individual or animal (including, without limitation, plasma, serum, cerebrospinal fluid, lymph, tears, nails, hair, saliva, milk, pus, and tissue exudates and secretions) or from in vitro cell culture-constituents, as well as samples obtained from, for example, a laboratory procedure.
Single nucleotide polymorphism (SNP): variation of a single nucleotide. This includes the replacement of one nucleotide by another and deletion or insertion of a single nucleotide. Typically, SNPs are biallelic markers although tri- and tetra-allelic markers also exist. For example, SNP ANC may comprise allele C or allele A (Tables 5-35). Thus, a nucleic acid molecule comprising SNP ANC may include a C or A at the polymorphic position. For clarity purposes, an ambiguity code is used in Tables 5-35 and the sequence listing, to represent the variations. For a combination of SNPs, the term “haplotype” is used, e.g. the genotype of the SNPs in a single DNA strand that are linked to one another. In certain embodiments, the term “haplotype” is used to describe a combination of SNP alleles, e.g., the alleles of the SNPs found together on a single DNA molecule. In specific embodiments, the SNPs in a haplotype are in linkage disequilibrium with one another.
Sequence-conservative: variants are those in which a change of one or more nucleotides in a given codon position results in no alteration in the amino acid encoded at that position (i.e., silent mutation).
Substantially homologous: a nucleic acid or fragment thereof is substantially homologous to another if, when optimally aligned (with appropriate nucleotide insertions and/or deletions) with the other nucleic acid (or its complementary strand), there is nucleotide sequence identity in at least 60% of the nucleotide bases, usually at least 70%, more usually at least 80%, preferably at least 90%, and more preferably at least 95-98% of the nucleotide bases. Alternatively, substantial homology exists when a nucleic acid or fragment thereof will hybridize, under selective hybridization conditions, to another nucleic acid (or a complementary strand thereof). Selectivity of hybridization exists when hybridization which is substantially more selective than total lack of specificity occurs. Typically, selective hybridization will occur when there is at least about 55% sequence identity over a stretch of at least about nine or more nucleotides, preferably at least about 65%, more preferably at least about 75° k, and most preferably at least about 90% (M. Kanehisa, 1984, Nucl. Acids Res. 11:203-213). The length of homology comparison, as described, may be over longer stretches, and in certain embodiments will often be over a stretch of at least 14 nucleotides, usually at least 20 nucleotides, more usually at least 24 nucleotides, typically at least 28 nucleotides, more typically at least 32 nucleotides, and preferably at least 36 or more nucleotides.
Wild-type gene from Tables 2-4: refers to the reference sequence. The wild-type gene sequences from Tables 2-4 used to identify the variants (polymorphisms, alleles, and haplotypes) described in detail herein.

[0021] Technical and scientific terms used herein have the meanings commonly understood by one of ordinary skill in the art to which the present invention pertains, unless otherwise defined. Reference is made herein to various methodologies known to those of skill in the art. Publications and other materials setting forth such known methodologies to which reference is made are incorporated herein by reference in their entireties as though set forth in full. Standard reference works setting forth the general principles of recombinant DNA technology include J. Sambrook et al., 1989, Molecular Cloning: A Laboratory Manual, 2d Ed., Cold Spring Harbor Laboratory Press, Cold Spring Harbor, N.Y.; P. B. Kaufman et al., (eds), 1995, Handbook of Molecular and Cellular Methods in Biology and Medicine, CRC Press, Boca Raton; M. J. McPherson (ed), 1991, Directed Mutagenesis: A Practical Approach, IRL Press, Oxford; J. Jones, 1992, Amino Acid and Peptide Synthesis, Oxford Science Publications, Oxford; B. M. Austen and O. M. R. Westwood, 1991, Protein Targeting and Secretion, IRL Press, Oxford; D. N Glover (ed), 1985, DNA Cloning, Volumes I and 11; M. J. Gait (ed), 1984, Oligonucleotide Synthesis; B. D. Hames and S. J. Higgins (eds), 1984, Nucleic Acid Hybridization; Quirke and Taylor (eds), 1991, PCR-A Practical Approach; Harries and Higgins (eds), 1984, Transcription and Translation; R. I. Freshney (ed), 1986, Animal Cell Culture; Immobilized Cells and Enzymes, 1986, IRL Press; Perbal, 1984, A Practical Guide to Molecular Cloning, J. H. Miller and M. P. Calos (eds), 1987, Gene Transfer Vectors for Mammalian Cells, Cold Spring Harbor Laboratory Press; M. J. Bishop (ed), 1998, Guide to Human Genome Computing, 2d Ed., Academic Press, San Diego, Calif.; L. F. Peruski and A. H. Peruski, 1997, The Internet and the New Biology. Tools for Genomic and Molecular Research, American Society for Microbiology, Washington, D.C. Standard reference works setting forth the general principles of immunology include S. Sell, 1996, Immunology, Immunopathology & Immunity, 5th Ed., Appleton & Lange, Publ., Stamford, Conn.; D. Male et al., 1996, Advanced Immunology, 3d Ed., Times Mirror Intl Publishers Ltd., Publ., London; D. P. Stites and A. L Terr, 1991, Basic and Clinical Immunology, 7th Ed., Appleton & Lange, Publ., Norwalk, Conn.; and A. K. Abbas et al., 1991, Cellular and Molecular Immunology, W. B. Saunders Co., Publ., Philadelphia, Pa. Any suitable materials and/or methods known to those of skill can be utilized in carrying out the present invention; however, preferred materials and/or methods are described. Materials, reagents, and the like to which reference is made in the following description and examples are generally obtainable from commercial sources, and specific vendors are cited herein.

### BRIEF DESCRIPTION OF THE DRAWINGS

[0022] FIG. 1. Mouse mRNA localization matrix applied to single and multiple mRNA localization assessment & comparative studies, cresyl violet staining. Slide 1 to 7: All-Stage, Whole-Body Sections throughout the embryonic (1 and 2), postnatal developmental stages (3 and 5) and adulthood (6 and 7). Slide 8: Adult Mouse Reproductive Organs: 1. Uterus, control; 2. Uterus, gestation day 5.5; 3. Uterus, gestation day 7.5; 4. Ovary; 5. Mammary gland; 6. Prostate; 7. Epididymis; 8. Testis; 9. Seminal vesicle; Slide 9: Adult Mouse Tissue Array, General: 10. Brain, sagittal sections; 11. Thyroid; 12. Pituitary gland; 13. Adrenal gland; 14. Trigeminal ganglion; 15. Ovary; 16. Uterus; 17. Kidney; 18. Testis; 19. Thymus; 20. Seminal vesicle; 21. Salivary gland; 22. Urinary Bladder; 23. Lung; 24. Prostate; 25. Liver; 26. Gallbladder; 27. Epididymis; 28. Adipose tissue; Slide 10: Adult Mouse Brain Arrays

[0023] FIG. 2. KMO expression in the embryonic (e10.5, e12.5 and e15.5) and postnatal (p1 and p10) mice. A to D) X-ray film autoradiography following hybridization with antisense riboprobe (Seq ID: 19612) after 4-day exposure, showing a pattern of Kmo mRNA distribution seen as bright labeling on dark field. E) Control (sense, Seq ID: 19611) hybridization of the section comparable to D. Abbreviations: K—kidney; Li—liver; Re—retina; Sp—spleen; (s)—sense. Magnification ×1.6.

[0024] FIG. 3. KMO expression in the adult mouse. A) Anatomical view of the adult mouse after staining with cresyl violet. B) X-ray film autoradiography after hybridization with antisense riboprobe (Seq ID: 19612) showing the presence of Kmo mRNA in the liver, spleen, lymph nodes and kidney. C) Control (sense, Seq ID: 19611) hybridization of an adjacent section comparable to B. Abbreviations: Cx—cortex, kidney; K—kidney; Li—liver; LN—lymph nodes; OMe—outer medulla, kidney; Th—thymus; (as)—antisense; (s)—sense. Magnification ×2.7

[0025] FIG. 4. KMO expression in the adult mouse tissue arrays. A) Two-day X-ray film autoradiography after hybridization with antisense riboprobe (Seq ID: 19612) showing Kmo mRNA detection in the reproductive organs (RO) seen as bright labeling on dark field. There is no evidence of mRNA labeling in these tissues. B) Kmo mRNA shown in the general tissue array (TA). Kmo expression is detectable in the spleen, kidney and liver. C) Kmo mRNA in the brain tissue arrays. Medium to high level mRNA concentration with exception of the striatum. D) Control (sense, Seq ID: 19611) hybridization of the section comparable to B. Abbreviations: BA—brain arrays; Cx—kidney cortex; K—kidney; Li—liver; Me—kidney medulla; RO—reproductive organs; TA—tissue arrays; (s)—sense. Magnification ×1.6.

[0026] FIG. 5. KMO expression in the adult mouse whole body section of the liver and lymphatic node. A) Emulsion autoradiography after hybridization with antisense riboprobe (Seq ID: 19612) showing Kmo mRNA labelling in the liver and lymph node seen as bright on darkfield illumination. B) The same fragment as in (A) seen under lightfield illumination, cresyl violet staining. C) Control (sense, Seq ID: 19611) hybridization of an adjacent section comparable to A under darkfield illumination. D) The same fragment as in (C) seen under lightfield illumination, cresyl violet staining. E) Liver at higher magnification. Large arrow indicates labelled hepatocytes. F) Control (sense, Seq ID: 19611) hybridization in the liver cells at high magnification. Abbreviations: In intestine tissue; Li—liver; LN—lymph node; (s)—sense. Magnifications: (A to D) ×54; (E and F) ×540.

[0027] FIG. 6. KMO expression in the adult mouse spleen. A) Emulsion autoradiography after hybridization with antisense riboprobe (Seq ID: 19612) showing ubiquitous Kmo mRNA labelling in the spleen seen as bright on darkfield illumination. B) The same fragment as in (A) seen under lightfield illumination, cresyl violet staining. C) Control (sense, Seq ID: 19611) hybridization of an adjacent section comparable to A under darkfield illumination. D) The same fragment as in (C) seen under lightfield illumination, cresyl violet staining. E) Spleen at higher magnification. Kmo mRNA labeling seems to follow cell density. F) Control (sense) hybridization in the spleen at high magnification. Abbreviations: RP—red pulp; WP—white pulp; (s)—sense. Magnifications: (A to D) ×54; (E and F) ×540.

[0028] FIG. 7. KMO expression in the adult mouse kidney cortex. A) Emulsion autoradiography after hybridization with antisense riboprobe (Seq ID: 19612) showing Kmo mRNA labelling in the cortex seen as bright on darkfield illumination. Note the tubules labeled but glomeruli free of labelling. B) The same fragment as in (A) seen under lightfield illumination, cresyl violet staining. C) Control (sense, Seq ID: 19611) hybridization of an adjacent section comparable to A under darkfield illumination. D) The same fragment as in (C) seen under lightfield illumination, cresyl violet staining. Abbreviations: Cx—kidney cortex; GI—glomerulus; (s)—sense. Magnifications: (A to D) ×54.

[0029] FIG. 8. KMO expression in the adult mouse kidney cortex. A) Emulsion autoradiography after hybridization with antisense riboprobe (Seq ID: 19612) showing Kmo mRNA labelling in the tubules of the kidney cortex seen as silver grain labeling under lightfield illumination, cresyl violet staining. Labelled tubules are seen in the proximity of the glomerulus, the later free of labeling. B) Deep cortex/outer medulla fragment seen under lightfield illumination, cresyl violet staining; the lobules are labelled. C) Control (sense, Seq ID: 19611) hybridization of an adjacent section comparable to A. D) Control (sense, Seq ID: 19611) hybridization of an adjacent section comparable to B. Abbreviations: Cp capillary; GI—glomerulus; Tu—renal tubule; (as)—antisense; (s)—sense. Magnifications: (A to D) ×540.

[0030] FIG. 9. CADM3 expression in the embryonic (e10.5, e12.5 and e15.5) and postnatal (p1 and p10) mice. A to D) X-ray film autoradiography following hybridization with antisense riboprobe (Seq ID: 19614) after 3-day exposure, showing a pattern of Cadm3 mRNA distribution seen as bright labeling on dark field. Labelling seems to be concentrated in the CNS brain and spinal and PNS trigeminal gangion and dorsal root ganglia. E) Control (sense, Seq ID: 19613) hybridization of the section comparable to D. Abbreviations: Br—brain; DRG—dorsal root ganglion; Re—retina; SC—spinal cord; Tg—trigeminal ganglion; (s)—sense. Magnification ×1.6.

[0031] FIG. 10. CADM3 expression in the adult mouse. A) Anatomical view of the adult mouse after staining with cresyl violet. B) X-ray film autoradiography after hybridization with antisense riboprobe (Seq ID: 19614) showing the presence of Cadm3 mRNA in the brain, spinal cord and dorsal root ganglia. C) Control (sense, Seq ID: 19613) hybridization of an adjacent section comparable to B. Abbreviations: Br—brain; Cb—cerebellum; Cx—cortex, DRG—dorsal root ganglion; H—heart; Li—liver; LI—large intestine; SI—small intestine; Tg—trigeminal ganglion; Th—thymus; (as)—antisense; (s)—sense. Magnification ×2.7

[0032] FIG. 11. CADM3 expression in the adult mouse tissue arrays. A) Two-day X-ray film autoradiography after hybridization with antisense riboprobe (Seq ID: 19614) showing Cadm3 mRNA detection in the reproductive organs (RO) seen as bright labeling on dark field. There is evidence of light mRNA labelling in the pregnant mice uteri on day 5.5 and 7.5. B) Cadm3 mRNA shown in the general tissue array (TA). Cadm3 expression is detectable in the brain and trigeminal ganglion. Weak labeling is noted in the uterus. C) Cadm3 mRNA in the brain tissue arrays (BA). Generally high-level mRNA concentration in the brain gray matter regions. D) Control (sense, Seq ID: 19613) hybridization of the section comparable to B. Abbreviations: Br—brain; Cb—cerebellum; Hip—hippocampus; OL—olfactory lobe; TG—trigeminal ganglion; Ut—uterus; (s)—sense. Magnification ×1.6.

[0033] FIG. 12. CADM3 expression in the adult mouse brain cortex and hippocampus. A) Emulsion autoradiography after hybridization with antisense riboprobe (Seq ID: 19614) showing Cadm3 mRNA labelling in the cortex and hippocampus seen as bright on darkfield illumination. B) The same fragment as in (A) seen under lightfield illumination, cresyl violet staining. C) Control (sense, Seq ID: 19613) hybridization of an adjacent section comparable to A under darkfield illumination. D) The same fragment as in (C) seen under lightfield illumination, cresyl violet staining. E) Superficial layers of the cortex (layers I and II) at higher magnification. Large arrow indicates labelled neurons, small arrows indicate the unlabelled glial cells. F) Fragment of the area 3 of the hippocampus with labeled pyramidal neurons (large arrow) and unlabelled glial cells. Abbreviations: CA1 to CA3 hippocampus cornu ammonis area 1 to 3; α-corpus calosum; Cx I and Cx II—cortical layer I and II; (s)—sense. Magnifications: (A to D) ×19; (E and F) ×440.

[0034] FIG. 13. CADM3 expression in the cerebellum. A) Emulsion autoradiography after hybridization with antisense riboprobe (Seq ID: 19614) revealing a widespread Cadm3 mRNA labelling distribution in the cerebellum seen as bright on darkfield illumination. B) The same fragment as in (A) seen under lightfield illumination, cresyl violet staining. C) Control (sense, Seq ID: 19613) hybridization of an adjacent section comparable to A under darkfield illumination. D) The same fragment as in (C) seen under lightfield illumination, cresyl violet staining. Abbreviations: Cb—cerebellum; DCN—deep cerebellar nuclei; IC—inferior colliculus; (s)—sense. Magnifications: ×24.

[0035] FIG. 14. CADM3 expression in the adult mouse trigeminal ganglion. A) Emulsion autoradiography after hybridization with antisense riboprobe (Seq ID: 19614) showing Cadm3 mRNA labelling in the trigeminal ganglion seen as bright on darkfield illumination. Note the group of labeled neurons (arrows). B) The same fragment as in (A) seen under lightfield illumination, cresyl violet staining. C) Control (sense, Seq ID: 19613) hybridization of an adjacent section comparable to A under darkfield illumination. D) Group of labeled neurons (large arrows) seen at higher magnification. Small arrows indicated unlabelled satellite glial cells. Magnifications: (A to C) ×54, (D) ×540.

[0036] FIG. 15. CADM3 expression in the postnatal mouse plexus Auerbach. A) Emulsion autoradiography after hybridization with antisense riboprobe (Seq ID: 19614) showing Cadm3 mRNA labelling in the intestinal plexus (arrow) seen as bright under darkfield illumination. B) The same fragment as in (A) seen under lightfield illumination, cresyl violet staining. C) Control (sense, Seq ID: 19613) hybridization of an adjacent section comparable to A. D) Fragment of the intestinal wall with labelled neuron (arrow) at high magnification. Abbreviations: In—intestine; SMC—smooth muscle cells; (s)—sense. Magnifications: (A to C) ×24; (D) ×540.

[0037] FIG. 16. PTPRD expression in the embryonic (e10.5, e12.5 and e15.5) and postnatal (p1 and p10) mice. A to D) X-ray film autoradiography following hybridization with antisense riboprobe (Seq ID: 19616) after 2-day exposure, showing a pattern of Ptprd mRNA distribution seen as bright labeling on dark field. Labelling seems to be mostly concentrated in the CNS brain and spinal and PNS dorsal root ganglia. Also labeled are the kidney and retina. E) Control (sense, Seq ID: 19615) hybridization of the section comparable to D. Abbreviations: BM—bone marrow; Br—brain; CNS central nervous system; DRG—dorsal root ganglion; K—kidney; Li—liver; Ov—ovary; Re—retina; SC—spinal cord; (s)—sense. Magnification ×1.6.

[0038] FIG. 17. PTPRD expression in the adult mouse. A) Anatomical view of the adult mouse after staining with cresyl violet. B) X-ray film autoradiography after hybridization with antisense riboprobe (Seq ID: 19616) showing the presence of Ptprd mRNA in the brain, spinal cord, dorsal root ganglia, liver, kidney, small and large intestine and bone marrow. C) Control (sense, Seq ID: 19615) hybridization of an adjacent section comparable to B. Abbreviations: BM—bone marrow; Br—brain; Cb—cerebellum; DRG—dorsal root ganglion; H—heart; Li—liver; LI—large intestine; SI—small intestine; (as)—antisense; (s)—sense. Magnification ×2.7

[0039] FIG. 18. PTPRD expression in the adult mouse tissue arrays. A) Two-day X-ray film autoradiography after hybridization with antisense riboprobe (Seq ID: 19616) showing Ptprd mRNA detection in the reproductive organs (RO) seen as bright labeling on dark field. There is evidence of mRNA labelling in the ovary. B) Ptprd mRNA shown in the general tissue array (TA). Ptprd expression is detectable in the brain, trigeminal ganglion, adrenal gland, pituitary, kidney, ovary and liver. Weak labeling is noted in the testis. C) Ptprd mRNA in the brain tissue arrays (BA). Heterogeneous distribution mRNA in the brain gray matter regions. D) Control (sense, Seq ID: 19615) hybridization of the section comparable to B. Abbreviations: Adr—adrenal gland; Br—brain; Cx cerebral cortex; Hip—hippocampus; K—kidney; Li—liver; Ov—ovary; Pit—pituitary gland; Rt—reticular thalamic nucleus; T—testis; TG—trigeminal ganglion; (s)—sense. Magnification ×1.6.

[0040] FIG. 19. PTPRD expression in the adult mouse brain cortex and hippocampus. A) Emulsion autoradiography after hybridization with antisense riboprobe (Seq ID: 19616) showing Ptprd mRNA labelling in the cortex and hippocampus seen as bright on darkfield illumination. Pronounced labeling can be seen in the hippocampal area CA2. B) The same fragment as in (A) seen under lightfield illumination, cresyl violet staining. C) Control (sense, Seq ID: 19615) hybridization of an adjacent section comparable to A under darkfield illumination. D) Fragment of the area 2 and 3 of the hippocampus with labelled pyramidal neurons. Abbreviations: III—3^{rd} ventricle; CA1 and CA2—hippocampus cornu ammonis area 1 and 2; cc—corpus callosum; Cx—cortex; DG—dentate gyrus; Hip—hippocampus; (s)—sense. Magnifications: (A to D) ×20; (E and F) ×460.

[0041] FIG. 20. PTPRD expression in the reticular thalamic nucleus. A) Emulsion autoradiography after hybridization with antisense riboprobe (Seq ID: 19616) revealing a Ptprd mRNA labelling in the reticular thalamic nucleus, hippocampus area CA2 and subiculum seen as bright on darkfield illumination. B) The same fragment as in (A) seen under lightfield illumination, cresyl violet staining. C) Control (sense, Seq ID: 19615) hybridization of an adjacent section comparable to A under darkfield illumination. D) Fragment of the thalamic reticular nucleus with multiple labelled neurons. Abbreviations: CA2—cornu Ammonis area 2 of the hippocampus; Cx—cortex; Hb—habenula; Hip—hippocampus; Rt—reticular thalamic nucleus; Sc—subiculum; Th—thalamus; (s)—sense. Magnifications: (A to C) ×25; (D) ×380.

[0042] FIG. 21. PTPRD expression in the olfactory lobe, cortex, cerebellum and corpos callosum. A) Emulsion autoradiography after hybridization with antisense riboprobe (Seq ID: 19616) showing Ptprd mRNA labelling in the olfactory lobe. Heavy arrow points into a mitral cells layer. B) Cerebral cortex displaying numerous population of neurons with medium-level labeling (medium arrow). C) Cerebellum with Purkinje cells layer, unlabelled (long thin arrow). D) Corpus callosum white matter with oligodendrocytes recognizable by their characteristic topography (small arrows). Magnifications: (A to C) ×25, (D) ×380.

[0043] FIG. 22. PTPRD expression in the adult mouse adrenal gland. A) Emulsion autoradiography after hybridization with antisense riboprobe (Seq ID: 19616) showing Ptprd mRNA labelling in the adrenal gland cortex seen on darkfield illumination. Arrow points into cortical region containing aldosteron synthesizing cells. B) The same fragment as in (A) seen under lightfield illumination, cresyl violet staining. C) Control (sense, Seq ID: 19615) hybridization of an adjacent section comparable to A under darkfield illumination. D) Fragment of the cortex with labeled cells in the aldosteron synthesis region (large arrows). Abbreviations: Cx—adrenal cortex; Me—medulla; (s)—sense. Magnifications: (A to C) ×54, (D) ×380.

[0044] FIG. 23. PTPRD expression in the adult mouse ovary. A) Emulsion autoradiography after hybridization with antisense riboprobe (Seq ID: 19616) showing Ptprd mRNA labelling in the ovary growing follicles (arrows). B) The same fragment as in (A) seen under lightfield illumination, cresyl violet staining. C) Control (sense, Seq ID: 19615) hybridization of an adjacent section comparable to A under darkfield illumination. D) Fragment of the ovary with follicular cells labelled. Abbreviations: F—follicle; FC—follicular cells; Ov—ovary; (s)—sense. Magnifications: (A to C) ×25; (D) ×380.

[0045] FIG. 24. PTPRD expression in the postnatal mouse intestine. A) Emulsion autoradiography after hybridization with antisense riboprobe (Seq ID: 19616) showing Ptprd mRNA labelling in the intestine seen on darkfield illumination. Arrow points labeled intestinal villi. B) The same fragment as in (A) seen under lightfield illumination, cresyl violet staining. C) Control (sense, Seq ID: 19615) hybridization of an adjacent section comparable to A under darkfield illumination. D) Fragment of the villus with labeled epithelial cells (arrow). Abbreviations: Ep—epithelium; SI—small intestine; (s)—sense. Magnifications: (A to C) ×25, (D) ×380.

[0046] FIG. 25. TMEFF2 expression in the embryonic (e10.5, e12.5 and e15.5) and postnatal (p1 and p10) mice. A to D) X-ray film autoradiography following hybridization with antisense riboprobe (Seq ID: 19618) after 4-day exposure, showing a pattern of Tmeff2 mRNA distribution seen as bright labeling on dark field. Labelling seems to be mostly concentrated in the CNS brain and spinal and PNS trigeminal gangion, stellar ganglion and dorsal root ganglia. Also labeled are the membranous structures and the plexus Auerbach in the intestinal wall. E) Control (sense, Seq ID: 19617) hybridization of the section comparable to D. Abbreviations: Au—Auerbach plexus; Br—brain; Cb—cerebellum; Cx—cerebral cortex; DRG—dorsal root ganglion; Mb—membranes; SC—spinal cord; SG—stellar ganglion; TG—trigeminal ganglion; (s)—sense. Magnification ×1.6.

[0047] FIG. 26. TMEFF2 expression in the adult mouse. A) Anatomical view of the adult mouse after staining with cresyl violet. B) X-ray film autoradiography after hybridization with antisense riboprobe (Seq ID: 19618) showing the presence of Tmeff2 mRNA in the brain, spinal cord and dorsal root ganglia. C) Control (sense, Seq ID: 19617) hybridization of an adjacent section comparable to B. Note non-specific labeling in the blood vessels (asterisk). Abbreviations: Br—brain; Cb—cerebellum; Cx—cortex, DRG—dorsal root ganglion; H—heart; Li—liver; Tg—trigeminal ganglion; Th—thymus; (as)—antisense; (s)—sense. Magnification ×2.7

[0048] FIG. 27. TMEFF2 expression in the adult mouse tissue arrays. A) Two-day X-ray film autoradiography after hybridization with antisense riboprobe (Seq ID: 19618) showing Tmeff2 mRNA detection in the reproductive organs (RO) seen as bright labeling on dark field. There is evidence of light mRNA labelling in the ovary. B) Tmeff2 mRNA shown in the general tissue array (TA). Tmeff2 expression is detectable in the brain, trigeminal ganglion and adrenal gland. Weak labeling is noted in the uterus. C) Tmeff2 mRNA in the brain tissue arrays (BA). Generally high-level mRNA concentration in the brain gray matter regions. D) Control (sense, Seq ID: 19617) hybridization of the section comparable to B. Abbreviations: Br—brain; Cb—cerebellum; Hb—habenula; Hip—hippocampus; Ov—ovary; TG—trigeminal ganglion; Ut—uterus; (s)—sense. Magnification ×1.6.

[0049] FIG. 28. TMEFF2 expression in the adult mouse brain cortex and hippocampus. A) Emulsion autoradiography after hybridization with antisense riboprobe (Seq ID: 19618) showing Tmeff2 mRNA labelling in the cortex and hippocampus seen as bright on darkfield illumination. B) The same fragment as in (A) seen under lightfield illumination, cresyl violet staining. C) Control (sense, Seq ID: 19617) hybridization of an adjacent section comparable to A under darkfield illumination. D) The same fragment as in (C) seen under lightfield illumination, cresyl violet staining. E) Layer IV of the cortex at higher magnification. Large arrow indicates labelled neuron, small arrows point into unlabelled neurons, asterisks indicate glial cells free of labelling. F) Fragment of the area 3 of the hippocampus with labelled pyramidal neurons (large arrow). Some unlabelled glial cells are seen (asterisk). Abbreviations: CA1 to CA3 hippocampus cornu ammonis area 1 to 3; Cx—cortex; DG dentate gyrus; Hip—hippocampus; (s)—sense. Magnifications: (A to D) ×20; (E and F) ×460.

[0050] FIG. 29. TMEFF2 expression in the cerebellum. A) Emulsion autoradiography after hybridization with antisense riboprobe (Seq ID: 19618) revealing a widespread Tmeff2 mRNA labelling distribution in the cerebellum seen as bright on darkfield illumination. Arrow indicates Purkinje cells. B) The same fragment as in (A) seen under lightfield illumination, cresyl violet staining. C) Control (sense, Seq ID: 19617) hybridization of an adjacent section comparable to A under darkfield illumination. D) Fragment of cerebellar folia showing Purkinje cells labeled (arrows). Abbreviations: Cb—cerebellum; DCN—deep cerebellar nuclei; IC—inferior colliculus; (s)—sense. Magnifications: (A to C) ×23; (D) ×540.

[0051] FIG. 30. TMEFF2 expression in the adult mouse trigeminal ganglion. A) Emulsion autoradiography after hybridization with antisense riboprobe (Seq ID: 19618) showing Tmeff2 mRNA labelling in the trigeminal ganglion seen as bright on darkfield illumination. Arrow points into a group of labeled neurons. B) The same fragment as in (A) seen under lightfield illumination, cresyl violet staining. C) Control (sense, Seq ID: 19617) hybridization of an adjacent section comparable to A under darkfield illumination. D) Group of labeled neurons (large arrows) seen at higher magnification mixed with unlabelled neurons (small arrows). Asterisks indicate unlabelled satellite glial cells. Magnifications: (A to C) ×54, (D) ×540.

[0052] FIG. 31. TMEFF2 expression in the adult mouse adrenal gland. A) Emulsion autoradiography after hybridization with antisense riboprobe (Seq ID: 19618) showing Tmeff2 mRNA labelling in the adrenal gland medulla seen as bright on darkfield illumination. Arrow points into medulla containing adrenal-peptide synthesizing cells, cortical region containing corticoid aldosteron synthesizing cells unlabelled. B) The same fragment as in (A) seen under lightfield illumination, cresyl violet staining. C) Control (sense, Seq ID: 19617) hybridization of an adjacent section comparable to A under darkfield illumination. D) Fragment of the medulla with labeled cells (large arrows) and cortical region free of labeling. Abbreviations: Adr GI—adrenal gland; Cx—adrenal cortex; Me—medulla; (s)—sense. Magnifications: (A to C) ×54, (D) ×540.

[0053] FIG. 32. TMEFF2 expression in the postnatal mouse plexus Auerbach. A) Emulsion autoradiography after hybridization with antisense riboprobe (Seq ID: 19618) showing Tmeff2 mRNA labelling in the myenteric plexus (arrow) seen as bright under darkfield illumination. The labelling reveals a collection of ganglia (arrows) forming Auerbach's plexus, which is a main nerve supply to the gastrointestinal tract. B) The same fragment as in (A) seen under lightfield illumination, cresyl violet staining. C) Control (sense, Seq ID: 19617) hybridization of an adjacent section comparable to A under darkfield illumination. D) Control (sense, Seq ID: 19617) hybridization of an adjacent section comparable to B. E) Fragment of the intestinal wall with labelled ganglion neuron (arrow) at high magnification. F) Control (sense) hybridization of an adjacent section comparable to E under lightfield illumination. Abbreviations: In intestine; SMC smooth muscle cells; (s)—sense. Magnifications: (A to C) ×22; (D) ×500.

[0054] FIG. 33. Schizophrenia Gene Map, including analysis for Full cohort, Conditionals, Subphenotypes, and Gender Specific.

### DETAILED DESCRIPTION OF THE INVENTION

### Genome Wide Association Study to Construct a GeneMap for Schizophrenia

[0055] The present invention is based on the discovery of genes associated with SCHIZOPHRENIA disease. In the preferred embodiment, disease-associated loci (candidate regions; Table 1) are identified by the statistically significant differences in allele or haplotype frequencies between the cases and the controls.

[0056] The invention also provides a method for the discovery of genes associated with SCHIZOPHRENIA disease and the construction of a GeneMap for SCHIZOPHRENIA disease in a human population, comprising the following steps (see also Example section herein):

### Step 1: Recruit Patients (Cases) and Controls

[0057] In the preferred embodiment, 500 patients diagnosed for SCHIZOPHRENIA disease along with 500 independent controls samples are recruited from the Quebec Founder Population (QFP).

[0058] In another embodiment, more or less than 500 patients and controls are recruited.

[0059] In another embodiment, 500 patients diagnosed for SCHIZOPHRENIA disease along with two family members are recruited from the Quebec Founder Population (QFP). The preferred trios recruited are parent-parent-child (PPC) trios. Trios can also be recruited as parent-child-child (PCC) trios. In another preferred embodiment, more or less than 500 trios are recruited

[0060] In yet another embodiment, the present invention is performed as a whole or partially with DNA samples from individuals of another founder population than the Quebec population or from the general population.

### Step 2: DNA Extraction and Quantitation

[0061] Any sample comprising cells or nucleic acids from patients or controls may be used. Preferred samples are those easily obtained from the patient or control. Such samples include, but are not limited to blood, peripheral lymphocytes, buccal swabs, epithelial cell swabs, nails, hair, bronchoalveolar lavage fluid, sputum, or other body fluid or tissue obtained from an individual.

[0062] In one embodiment, DNA is extracted from such samples in the quantity and quality necessary to perform the invention using conventional DNA extraction and quantitation techniques. The present invention is not linked to any DNA extraction or quantitation platform in particular.

### Step 3: Genotype the Recruited Individuals

[0063] In one embodiment, assay-specific and/or locus-specific and/or allele-specific oligonucleotides for every SNP marker of the present invention (Tables 5-35) are organized onto one or more arrays. The genotype at each SNP locus is revealed by hybridizing short PCR fragments comprising each SNP locus onto these arrays. The arrays permit a high-throughput genome wide association study using DNA samples from individuals of the Quebec founder population. Such assay-specific and/or locus-specific and/or allele-specific oligonucleotides necessary for scoring each SNP of the present invention are preferably organized onto a solid support. Such supports can be arrayed on wafers, glass slides, beads or any other type of solid support.

[0064] In another embodiment, the assay-specific and/or locus-specific and/or allele-specific oligonucleotides are not organized onto a solid support but are still used as a whole, in panels or one by one. The present invention is therefore not linked to any genotyping platform in particular.

[0065] In another embodiment, one or more portions of the SNP maps (publicly available maps and our own proprietary QLDM map) are used to screen the whole genome, a subset of chromosomes, a chromosome, a subset of genomic regions or a single genomic region.

[0066] In the preferred embodiment, the individuals composing the cases and controls or the trios are preferably individually genotyped with at least 100,000 markers, generating at least a few million genotypes; more preferably, at least a hundred million. In another embodiment, individuals are pooled in cases and control pools for genotyping and genetic analysis.

Step 4: Exclude the Markers that Did not Pass the Quality Control of the Assay.

[0067] Preferably, the quality controls comprises, but are not limited to, the following criteria: eliminate SNPs that had a high rate of Mendelian errors (cut-off at 1% Mendelian error rate), that deviate from the Hardy-Weinberg equilibrium, that are non-polymorphic in the Quebec founder population or have too many missing data (cut-off at 1% missing values or higher), or simply because they are non-polymorphic in the Quebec founder population (cut-off at 1%≦10% minor allele frequency (MAF)).

### Step 5: Perform the Genetic Analysis on the Results Obtained Using Haplotype Information as Well as Single-Marker Association.

[0068] In the preferred embodiment, genetic analysis is performed on all the genotypes from Step 3.

[0069] In another embodiment, genetic analysis is performed on a subset of markers from Step 3 or from markers that passed the quality controls from Step 4.

[0070] In one embodiment, the genetic analysis consists of, but is not limited to features corresponding to Phase information and haplotype structures. Phase information and haplotype structures are preferably deduced from trio genotypes using Phasefinder. Since chromosomal assignment (phase) cannot be estimated when all trio members are heterozygous, an Expectation-Maximization (EM) algorithm may be used to resolve chromosomal assignment ambiguities after Phasefinder.

[0071] In yet another embodiment, the PL-EM algorithm (Partition-Ligation EM; Niu et al., Am. J. Hum. Genet. 70:157 (2002)) can be used to estimate haplotypes from the “genotype” data as a measured estimate of the reference allele frequency of a SNP in 15-marker windows that advance in increments of one marker across the data set. The results from such algorithms are converted into 15-marker haplotype files. Subsequently, the individual 15-marker block files are assembled into one continuous block of haplotypes for the entire chromosome. These extended haplotypes can then be used for further analysis. Such haplotype assembly algorithms take the consensus estimate of the allele call at each marker over all separate estimations (most markers are estimated 15 different times as the 15 marker blocks pass over their position).

[0072] In another embodiment, the haplotype frequencies among patients are compared to those among the controls using LDSTATS, a program that assesses the association of haplotypes with the disease. Such program defines haplotypes using multi-marker windows that advance across the marker map in one-marker increments. Such windows can be 1, 3, 5, 7 or 9 markers wide, and all these window sizes are tested concurrently. Larger multi-marker haplotype windows can also be used. At each position the frequency of haplotypes in cases is compared to the frequency of haplotypes in controls. Such allele frequency differences for single marker windows can be tested using Pearson's Chi-square with any degree of freedom. Multi-allelic haplotype association can be tested using Smith's normalization of the square root of Pearson's Chi-square. Such significance of association can be reported in two ways:

[0073] The significance of association within any one haplotype window is plotted against the marker that is central to that window.

[0074] P-values of association for each specific marker are calculated as a pooled P-value across all haplotype windows in which they occur. The pooled P-value is calculated using an expected value and variance calculated using a permutation test that considers covariance between individual windows. Such pooled P-values can yield narrower regions of gene location than the window data (see Example 3 herein for details on various analysis methods, such as LDSTATS v2.0 and v4.0).

[0075] In another embodiment, conditional haplotype and subtype analyses can be performed on subsets of the original set of cases and controls using the program LDSTATS. For conditional analyses, the selection of a subset of cases and their matched controls can be based on the carrier status of cases at a gene or locus of interest (see conditional analysis section in Example 3 herein). Various conditional haplotypes can be derived, such as protective haplotypes and risk haplotypes.

### Step 6: SNP and DNA Polymorphism Discovery

[0076] In the preferred embodiment, all the candidate genes and regions identified in step 5 are sequenced for polymorphism identification.

[0077] In another embodiment, the entire region, including all introns, is sequenced to identify all polymorphisms.

[0078] In yet another embodiment, the candidate genes are prioritized for sequencing, and only functional gene elements (promoters, conserved noncoding sequences, exons and splice sites) are sequenced.

[0079] In yet another embodiment, previously identified polymorphisms in the candidate regions can also be used. For example, SNPs from dbSNP, or others can also be used rather than resequencing the candidate regions to identify polymorphisms. The discovery of SNPs and DNA polymorphisms generally comprises a step consisting of determining the major haplotypes in the region to be sequenced. The preferred samples are selected according to which haplotypes contribute to the association signal observed in the region to be sequenced. The purpose is to select a set of samples that covers all the major haplotypes in the given region. Each major haplotype is preferably analyzed in at least a few individuals.

[0080] Any analytical procedure may be used to detect the presence or absence of variant nucleotides at one or more polymorphic positions of the invention. In general, the detection of allelic variation requires a mutation discrimination technique, optionally an amplification reaction and optionally a signal generation system. Any means of mutation detection or discrimination may be used. For instance, DNA sequencing, scanning methods, hybridization, extension based methods, incorporation based methods, restriction enzyme-based methods and ligation-based methods may be used in the methods of the invention.

[0081] Sequencing methods include, but are not limited to, direct sequencing, and sequencing by hybridization. Scanning methods include, but are not limited to, protein truncation test (PTT), single-strand conformation polymorphism analysis (SSCP), denaturing gradient gel electrophoresis (DGGE), temperature gradient gel electrophoresis (TGGE), cleavage, heteroduplex analysis, chemical mismatch cleavage (CMC), and enzymatic mismatch cleavage. Hybridization-based methods of detection include, but are not limited to, solid phase hybridization such as dot blots, multiple allele specific diagnostic assay (MASDA), reverse dot blots, and oligonucleotide arrays (DNA Chips). Solution phase hybridization amplification methods may also be used, such as Taqman. Extension based methods include, but are not limited to, amplification refraction mutation systems (ARMS), amplification refractory mutation systems (ALEX), and competitive oligonucleotide priming systems (COPS). Incorporation based methods include, but are not limited to, mini-sequencing and arrayed primer extension (APEX). Restriction enzyme-based detection systems include, but are not limited to, restriction site generating PCR. Lastly, ligation based detection methods include, but are not limited to, oligonucleotide ligation assays (OLA). Signal generation or detection systems that may be used in the methods of the invention include, but are not limited to, fluorescence methods such as fluorescence resonance energy transfer (FRET), fluorescence quenching, fluorescence polarization as well as other chemiluminescence, electrochemiluminescence, Raman, radioactivity, colometric methods, hybridization protection assays and mass spectrometry methods. Further amplification methods include, but are not limited to self sustained replication (SSR), nucleic acid sequence based amplification (NASBA), ligase chain reaction (LCR), strand displacement amplification (SDA) and branched DNA (B-DNA).

[0082] Sequencing can also be performed using a proprietary sequencing technology (Cantaloupe; PCT/EP2005/002870).

### Step 7: Ultrafine Mapping

[0083] This step further maps the candidate regions and genes confirmed in the previous step to identify and validate the responsible polymorphisms associated with SCHIZOPHRENIA disease in the human population.

[0084] In a preferred embodiment, the discovered SNPs and polymorphisms of step 6 are ultrafine mapped at a higher density of markers than the GWS described herein using the same technology described in step 3.

### Step 8: GeneMap Construction

[0085] The confirmed variations in DNA (including both genic and non-genic regions) are used to build a GeneMap for SCHIZOPHRENIA disease. The gene content of this GeneMap is described in more detail below. Such GeneMap can be used for other methods of the invention comprising the diagnostic methods described herein, the susceptibility to SCHIZOPHRENIA disease, the response to a particular drug, the efficacy of a particular drug, the screening methods described herein and the treatment methods described herein.

[0086] As is evident to one of ordinary skill in the art, all of the above steps or the steps do not need to be performed, or performed in a given order to practice or use the SNPs, genomic regions, genes, proteins, etc. in the methods of the invention.

[0087] Genes from the GeneMap

[0088] In one embodiment the GeneMap consists of genes and targets, in a variety of combinations, identified from the candidate regions listed in Table 1. In another embodiment, all genes from Tables 2-4 are present in the GeneMap. In another preferred embodiment, the GeneMap consists of a selection of genes from Tables 2-4. For clarity purposes, the GeneMap from the Example section herein is a not limiting example of a GeneMap. Other GeneMaps with various combinations of genes from the invention, and genes interacting with genes from the invention, can be established from the data herein.

[0089] The genes of the invention (Tables 2-4) are arranged by candidate regions and by their chromosomal location. Such order is for the purpose of clarity and does not reflect any other criteria of selection in the association of the genes with SCHIZOPHRENIA disease.

[0090] In one embodiment, genes identified in the WGAS and subsequent studies are evaluated using the Ingenuity Pathway Analysis application (IPA, Ingenuity systems) in order to identify direct biological interactions between these genes, and also to identify molecular regulators acting on those genes (indirect interactions) that could be also involved in SCHIZOPHRENIA. The purpose of this effort is to decipher the molecules involved in contributing to SCHIZOPHRENIA. These gene interaction networks are very valuable tools in the sense that they facilitate extension of the map of gene products that could represent potential drug targets for SCHIZOPHRENIA.

[0091] In another embodiment, other means (such as functional biochemical assays and genetic assays) are used to identify the biological interactions between genes to create a GeneMap (see Example section herein for description of the various GeneMaps).

### Nucleic Acid Sequences

[0092] The nucleic acid sequences of the present invention may be derived from a variety of sources including DNA, cDNA, synthetic DNA, synthetic RNA, derivatives, mimetics or combinations thereof. Such sequences may comprise genomic DNA, which may or may not include naturally occurring introns, genic regions, nongenic regions, and regulatory regions. Moreover, such genomic DNA may be obtained in association with promoter regions or poly (A) sequences. The sequences, genomic DNA, or cDNA may be obtained in any of several ways. Genomic DNA can be extracted and purified from suitable cells by means well known in the art. Alternatively, mRNA can be isolated from a cell and used to produce cDNA by reverse transcription or other means. The nucleic acids described herein are used in certain embodiments of the methods of the present invention for production of RNA, proteins or polypeptides, through incorporation into cells, tissues, or organisms. In one embodiment, DNA containing all or part of the coding sequence for the genes described in Tables 2-4, or the SNP markers described in Tables 5-35, is incorporated into a vector for expression of the encoded polypeptide in suitable host cells. The invention also comprises the use of the nucleotide sequence of the nucleic acids of this invention to identify DNA probes for the genes described in Tables 2-4 or the SNP markers described in Tables 5-35, PCR primers to amplify the genes described in Tables 2-4 or the SNP markers described in Tables 5-35, nucleotide polymorphisms in the genes described in Tables 2-4, and regulatory elements of the genes described in Tables 2-4. The nucleic acids of the present invention find use as primers and templates for the recombinant production of SCHIZOPHRENIA disease-associated peptides or polypeptides, for chromosome and gene mapping, to provide antisense sequences, for tissue distribution studies, to locate and obtain full length genes, to identify and obtain homologous sequences (wild-type and mutants), and in diagnostic applications.

### Antisense Oligonucleotides

[0093] In a particular embodiment of the invention, an antisense nucleic acid or oligonucleotide is wholly or partially complementary to, and can hybridize with, a target nucleic acid (either DNA or RNA) having the sequence of SEQ ID NO:1, NO:3 or any SEQ ID from any Tables of the invention. For example, an antisense nucleic acid or oligonucleotide comprising 16 nucleotides can be sufficient to inhibit expression of at least one gene from Tables 2-4. Alternatively, an antisense nucleic acid or oligonucleotide can be complementary to 5′ or 3′ untranslated regions, or can overlap the translation initiation codon (5′ untranslated and translated regions) of at least one gene from Tables 2-4, or its functional equivalent. In another embodiment, the antisense nucleic acid is wholly or partially complementary to, and can hybridize with, a target nucleic acid that encodes a polypeptide from a gene described in Tables 2-4.

[0094] In addition, oligonucleotides can be constructed which will bind to duplex nucleic acid (i.e., DNA:DNA or DNA:RNA), to form a stable triple helix containing or triplex nucleic acid. Such triplex oligonucleotides can inhibit transcription and/or expression of a gene from Tables 2-4, or its functional equivalent (M. D. Frank-Kamenetskii et al., 1995). Triplex oligonucleotides are constructed using the basepairing rules of triple helix formation and the nucleotide sequence of the genes described in Tables 2-4.

[0095] The present invention encompasses methods of using oligonucleotides in antisense inhibition of the function of the genes from Tables 2-4. In the context of this invention, the term “oligonucleotide” refers to naturally-occurring species or synthetic species formed from naturally-occurring subunits or their close homologs. The term may also refer to moieties that function similarly to oligonucleotides, but have non-naturally-occurring portions. Thus, oligonucleotides may have altered sugar moieties or inter-sugar linkages. Exemplary among these are phosphorothioate and other sulfur containing species which are known in the art. In preferred embodiments, at least one of the phosphodiester bonds of the oligonucleotide has been substituted with a structure that functions to enhance the ability of the compositions to penetrate into the region of cells where the RNA whose activity is to be modulated is located. It is preferred that such substitutions comprise phosphorothioate bonds, methyl phosphonate bonds, or short chain alkyl or cycloalkyl structures. In accordance with other preferred embodiments, the phosphodiester bonds are substituted with structures which are, at once, substantially non-ionic and non-chiral, or with structures which are chiral and enantiomerically specific. Persons of ordinary skill in the art will be able to select other linkages for use in the practice of the invention. Oligonucleotides may also include species that include at least some modified base forms. Thus, purines and pyrimidines other than those normally found in nature may be so employed. Similarly, modifications on the furanosyl portions of the nucleotide subunits may also be effected, as long as the essential tenets of this invention are adhered to. Examples of such modifications are 2′-O-alkyl- and 2′-halogen-substituted nucleotides. Some non-limiting examples of modifications at the 2′ position of sugar moieties which are useful in the present invention include OH, SH, SCH3, F, OCH3, OCN, O(CH2), NH2 and O(CH2)n CH3, where n is from 1 to about 10. Such oligonucleotides are functionally interchangeable with natural oligonucleotides or synthesized oligonucleotides, which have one or more differences from the natural structure. All such analogs are comprehended by this invention so long as they function effectively to hybridize with at least one gene from Tables 2-4 DNA or RNA to inhibit the function thereof.

[0096] The oligonucleotides in accordance with this invention preferably comprise from about 3 to about 50 subunits. It is more preferred that such oligonucleotides and analogs comprise from about 8 to about 25 subunits and still more preferred to have from about 12 to about 20 subunits. As defined herein, a “subunit” is a base and sugar combination suitably bound to adjacent subunits through phosphodiester or other bonds.

[0097] Antisense nucleic acids or oligonulcleotides can be produced by standard techniques (see, e.g., Shewmaker et al., U.S. Pat. No. 6,107,065). The oligonucleotides used in accordance with this invention may be conveniently and routinely made through the well-known technique of solid phase synthesis. Any other means for such synthesis may also be employed; however, the actual synthesis of the oligonucleotides is well within the abilities of the practitioner. It is also well known to prepare other oligonucleotides such as phosphorothioates and alkylated derivatives.

[0098] The oligonucleotides of this invention are designed to be hybridizable with RNA (e.g., mRNA) or DNA from genes described in Tables 2-4. For example, an oligonucleotide (e.g., DNA oligonucleotide) that hybridizes to mRNA from a gene described in Tables 2-4 can be used to target the mRNA for RnaseH digestion. Alternatively an oligonucleotide that can hybridize to the translation initiation site of the mRNA of a gene described in Tables 2-4 can be used to prevent translation of the mRNA. In another approach, oligonucleotides that bind to the double-stranded DNA of a gene from Tables 2-4 can be administered. Such oligonucleotides can form a triplex construct and inhibit the transcription of the DNA encoding polypeptides of the genes described in Tables 2-4. Triple helix pairing prevents the double helix from opening sufficiently to allow the binding of polymerases, transcription factors, or regulatory molecules. Recent therapeutic advances using triplex DNA have been described (see, e.g., J. E. Gee et al., 1994, Molecular and Immunologic Approaches, Futura Publishing Co., Mt. Kisco, N.Y.).

[0099] As non-limiting examples, antisense oligonucleotides may be targeted to hybridize to the following regions: mRNA cap region; translation initiation site; translational termination site; transcription initiation site; transcription termination site; polyadenylation signal; 3′ untranslated region; 5′ untranslated region; 5′ coding region; mid coding region; 3′ coding region; DNA replication initiation and elondation sites. Preferably, the complementary oligonucleotide is designed to hybridize to the most unique 5′ sequence of a gene described in Tables 2-4, including any of about 15-35 nucleotides spanning the 5′ coding sequence. In accordance with the present invention, the antisense oligonucleotide can be synthesized, formulated as a pharmaceutical composition, and administered to a subject. The synthesis and utilization of antisense and triplex oligonucleotides have been previously described (e.g., Simon et al., 1999; Barre et al., 2000; Elez et al., 2000; Sauter et al., 2000).

[0100] Alternatively, expression vectors derived from retroviruses, adenovirus, herpes or vaccinia viruses or from various bacterial plasmids may be used for delivery of nucleotide sequences to the targeted organ, tissue or cell population. Methods which are well known to those skilled in the art can be used to construct recombinant vectors which will express nucleic acid sequence that is complementary to the nucleic acid sequence encoding a polypeptide from the genes described in Tables 2-4. These techniques are described both in Sambrook et al., 1989 and in Ausubel et al., 1992. For example, expression of at least one gene from Tables 2-4 can be inhibited by transforming a cell or tissue with an expression vector that expresses high levels of untranslatable sense or antisense sequences. Even in the absence of integration into the DNA, such vectors may continue to transcribe RNA molecules until they are disabled by endogenous nucleases. Transient expression may last for a month or more with a nonreplicating vector, and even longer if appropriate replication elements are included in the vector system. Various assays may be used to test the ability of gene-specific antisense oligonucleotides to inhibit the expression of at least one gene from Tables 2-4. For example, mRNA levels of the genes described in Tables 2-4 can be assessed by Northern blot analysis (Sambrook et al., 1989; Ausubel et al., 1992; J. C. Alwine et al. 1977; I. M. Bird, 1998), quantitative or semi-quantitative RT-PCR analysis (see, e.g., W. M. Freeman at al., 1999; Ren et al., 1998; J. M. Cale et al., 1998), or in situ hybridization (reviewed by A. K. Raap, 1998). Alternatively, antisense oligonucleotides may be assessed by measuring levels of the polypeptide from the genes described in Tables 2-4, e.g., by western blot analysis, indirect immunofluorescence and immunoprecipitation techniques (see, e.g., J. M. Walker, 1998, Protein Protocols on cD-ROM, Humana Press, Totowa, N.J.). Any other means for such detection may also be employed, and is well within the abilities of the practitioner.

### Mapping Technologies

[0101] The present invention includes various methods which employ mapping technologies to map SNPs and polymorphisms. For purpose of clarity, this section comprises, but is not limited to, the description of mapping technologies that can be utilized to achieve the embodiments described herein. Mapping technologies may be based on amplification methods, restriction enzyme cleavage methods, hybridization methods, sequencing methods, and cleavage methods using agents.

[0102] Amplification methods include: self sustained sequence replication (Guatelli et al., 1990), transcriptional amplification system (Kwoh et al., 1989), Q-Beta Replicase (Lizardi et al., 1988), isothermal amplification (e.g. Dean et al., 2002; and Hafner et al., 2001), or any other nucleic acid amplification method, followed by the detection of the amplified molecules using techniques well known to those of ordinary skill in the art. These detection schemes are especially useful for the detection of nucleic acid molecules if such molecules are present in very low number.

[0103] Restriction enzyme cleavage methods include: isolating sample and control DNA, amplification (optional), digestion with one or more restriction endonucleases, determination of fragment length sizes by gel electrophoresis and comparing samples and controls. Differences in fragment length sizes between sample and control DNA indicates mutations in the sample DNA. Moreover, sequence specific ribozymes (see, e.g., U.S. Pat. No. 5,498,531 or DNAzyme e.g. U.S. Pat. No. 5,807,718) can be used to score for the presence of specific mutations by development or loss of a ribozyme or DNAzyme cleavage site.

[0104] Hybridization methods include any measurement of the hybridization or gene expression levels, of sample nucleic acids to probes corresponding to about 2, 3, 4, 5, 6, 7, 8, 9, 10, 15, 20, 25, 30, 50, 75, 100, 200, 500, 1000 or more genes, or ranges of these numbers, such as about 5-20, about 10-20, about 20-50, about 50-100, or about 100-200 genes of Tables 2-4.

[0105] SNPs and SNP maps of the invention can be identified or generated by hybridizing sample nucleic acids, e.g., DNA or RNA, to high density arrays or bead arrays containing oligonucleotide probes corresponding to the polymorphisms of Tables 5-35 (see the Affymetrix arrays and Illumine bead sets at www.affymetrix.com and www.illumina.com and see Cronin at al., 1996; or Kozel et al., 1996).

[0106] Methods of forming high density arrays of oligonucleotides with a minimal number of synthetic steps are known. The oligonucleotide analogue array can be synthesized on a single or on multiple solid substrates by a variety of methods, including, but not limited to, light-directed chemical coupling, and mechanically directed coupling (see Pirrung, U.S. Pat. No. 5,143,854).

[0107] In brief, the light-directed combinatorial synthesis of oligonucleotide arrays on a glass surface precedes using automated phosphoramidite chemistry and chip masking techniques. In one specific implementation, a glass surface is derivatized with a silane reagent containing a functional group, e.g., a hydroxyl or amine group blocked by a photolabile protecting group. Photolysis through a photolithogaphic mask is used selectively to expose functional groups which are then ready to react with incoming 5′ photoprotected nucleoside phosphoramidites. The phosphoramidites react only with those sites which are illuminated (and thus exposed by removal of the photolabile blocking group). Thus, the phosphoramidites only add to those areas selectively exposed from the preceding step. These steps are repeated until the desired array of sequences have been synthesized on the solid surface. Combinatorial synthesis of different oligonucleotide analogues at different locations on the array is determined by the pattern of illumination during synthesis and the order of addition of coupling reagents.

[0108] In addition to the foregoing, additional methods which can be used to generate an array of oligonucleotides on a single substrate are described in PCT Publication Nos. WO 93/09668 and WO 01/23614. High density nucleic acid arrays can also be fabricated by depositing pre-made or natural nucleic acids in predetermined positions. Synthesized or natural nucleic acids are deposited on specific locations of a substrate by light directed targeting and oligonucleotide directed targeting. Another embodiment uses a dispenser that moves from region to region to deposit nucleic acids in specific spots.

[0109] Nucleic acid hybridization simply involves contacting a probe and target nucleic acid under conditions where the probe and its complementary target can form stable hybrid duplexes through complementary base pairing. See WO 99/32660. The nucleic acids that do not form hybrid duplexes are then washed away leaving the hybridized nucleic acids to be detected, typically through detection of an attached detectable label. It is generally recognized that nucleic acids are denatured by increasing the temperature or decreasing the salt concentration of the buffer containing the nucleic acids. Under low stringency conditions (e.g., low temperature and/or high salt) hybrid duplexes (e.g., DNA:DNA, RNA:RNA, or RNA:DNA) will form even where the annealed sequences are not perfectly complementary. Thus, specificity of hybridization is reduced at lower stringency. Conversely, at higher stringency (e.g., higher temperature or lower salt) successful hybridization tolerates fewer mismatches. One of skill in the art will appreciate that hybridization conditions may be selected to provide any degree of stringency.

[0110] In a preferred embodiment, hybridization is performed at low stringency to ensure hybridization and then subsequent washes are performed at higher stringency to eliminate mismatched hybrid duplexes. Successive washes may be performed at increasingly higher stringency until a desired level of hybridization specificity is obtained. Stringency can also be increased by addition of agents such as formamide. Hybridization specificity may be evaluated by comparison of hybridization to the test probes with hybridization to the various controls that can be present (e.g., expression level control, normalization control, mismatch controls, etc.).

[0111] In general, there is a tradeoff between hybridization specificity (stringency) and signal intensity. Thus, in a preferred embodiment, the wash is performed at the highest stringency that produces consistent results and that provides a signal intensity greater than approximately 10% of the background intensity. Thus, in a preferred embodiment, the hybridized array may be washed at successively higher stringency solutions and read between each wash. Analysis of the data sets thus produced will reveal a wash stringency above which the hybridization pattern is not appreciably altered and which provides adequate signal for the particular oligonucleotide probes of interest.

[0112] Probes based on the sequences of the genes described above may be prepared by any commonly available method. Oligonucleotide probes for screening or assaying a tissue or cell sample are preferably of sufficient length to specifically hybridize only to appropriate, complementary genes or transcripts. Typically the oligonucleotide probes will be at least about 10, 12, 14, 16, 18, 20 or 25 nucleotides in length. In some cases, longer probes of at least 30, 40, or 50 nucleotides will be desirable.

[0113] As used herein, oligonucleotide sequences that are complementary to one or more of the genes or gene fragments described in Tables 2-4 refer to oligonucleotides that are capable of hybridizing under stringent conditions to at least part of the nucleotide sequences of said genes. Such hybridizable oligonucleotides will typically exhibit at least about 75% sequence identity at the nucleotide level to said genes, preferably about 80% or 85% sequence identity or more preferably about 90% or 95% or more sequence identity to said genes (see GeneChip® Expression Analysis Manual, Affymetrix, Rev. 3, which is herein incorporated by reference in its entirety).

[0114] The phrase “hybridizing specifically to” or “specifically hybridizes” refers to the binding, duplexing, or hybridizing of a molecule substantially to or only to a particular nucleotide sequence or sequences under stringent conditions when that sequence is present in a complex mixture (e.g., total cellular) DNA or RNA.

[0115] As used herein a “probe” is defined as a nucleic acid, capable of binding to a target nucleic acid of complementary sequence through one or more types of chemical bonds, usually through complementary base pairing, usually through hydrogen bond formation. As used herein, a probe may include natural (i.e., A, G, U, C, or T) or modified bases (7-deazaguanosine, inosine, etc.). In addition, the bases in probes may be joined by a linkage other than a phosphodiester bond, so long as it does not interfere with hybridization. Thus, probes may be peptide nucleic acids in which the constituent bases are joined by peptide bonds rather than phosphodiester linkages.

[0116] A variety of sequencing reactions known in the art can be used to directly sequence nucleic acids for the presence or the absence of one or more polymorphisms of Tables 5-35. Examples of sequencing reactions include those based on techniques developed by Maxam and Gilbert (1977) or Sanger (1977). It is also contemplated that any of a variety of automated sequencing procedures can be utilized, including sequencing by mass spectrometry (see, e.g. PCT International Publication No. WO 94/16101; Cohen et al., 1996; and Griffin et al., 1993), real-time pyrophosphate sequencing method (Ronaghi et al., 1998; and Permutt et al., 2001) and sequencing by hybridization (see e.g. Drmanac et al., 2002).

[0117] Other methods of detecting polymorphisms include methods in which protection from cleavage agents is used to detect mismatched bases in RNA/RNA, DNA/DNA or RNA/DNA heteroduplexes (Myers et al., 1985). In general, the technique of “mismatch cleavage” starts by providing heteroduplexes formed by hybridizing (labeled) RNA or DNA containing a wild-type sequence with potentially mutant RNA or DNA obtained from a sample. The double-stranded duplexes are treated with an agent who cleaves single-stranded regions of the duplex such as which will exist due to basepair mismatches between the control and sample strands. For instance, RNA/DNA duplexes can be treated with RNase and DNA/DNA hybrids treated with S1 nuclease to enzymatically digest the mismatched regions. In other embodiments, either DNA/DNA or RNA/DNA duplexes can be treated with hydroxylamine or osmium tetroxide and with piperidine in order to digest mismatched regions. After digestion of the mismatched regions, the resulting material is then separated by size on denaturing polyacrylamide gels to determine the site of a mutation or SNP (see, for example, Cotton et al., 1988; and Saleeba et al., 1992). In a preferred embodiment, the control DNA or RNA can be labeled for detection.

[0118] In still another embodiment, the mismatch cleavage reaction employs one or more proteins that recognize mismatched base pairs in double-stranded DNA (so called “DNA mismatch repair” enzymes) in defined systems for detecting and mapping polymorphisms. For example, the mutY enzyme of E. coli cleaves A at G/A mismatches (Hsu et al., 1994). Other examples include, but are not limited to, the MutHLS enzyme complex of E. coli (Smith and Modrich Proc. 1996) and Cel 1 from the celery (Kulinski et al., 2000) both cleave the DNA at various mismatches. According to an exemplary embodiment, a probe based on a polymorphic site corresponding to a polymorphism of Tables 5-35 is hybridized to a cDNA or other DNA product from a test cell or cells. The duplex is treated with a DNA mismatch repair enzyme, and the cleavage products, if any, can be detected from electrophoresis protocols or the like. See, for example, U.S. Pat. No. 5,459,039. Alternatively, the screen can be performed in vivo following the insertion of the heteroduplexes in an appropriate vector. The whole procedure is known to those ordinary skilled in the art and is referred to as mismatch repair detection (see e.g. Fakhrai-Rad of al., 2004).

[0119] In other embodiments, alterations in electrophoretic mobility can be used to identify polymorphisms in a sample. For example, single strand conformation polymorphism (SSCP) analysis can be used to detect differences in electrophoretic mobility between mutant and wild type nucleic acids (Orita et al., 1989; Cotton et al., 1993; and Hayashi 1992). Single-stranded DNA fragments of case and control nucleic acids will be denatured and allowed to renature. The secondary structure of single-stranded nucleic acids varies according to sequence. The resulting alteration in electrophoretic mobility enables the detection of even a single base change. The DNA fragments may be labeled or detected with labeled probes. The sensitivity of the assay may be enhanced by using RNA (rather than DNA), in which the secondary structure is more sensitive to a change in sequence. In a preferred embodiment, the method utilizes heteroduplex analysis to separate double stranded heteroduplex molecules on the basis of changes in electrophoretic mobility (Kee et al., 1991).

[0120] In yet another embodiment, the movement of mutant or wild-type fragments in a polyacrylamide gel containing a gradient of denaturant is assayed using denaturing gradient gel electrophoresis (DGGE) (Myers et al., 1985). When DGGE is used as the method of analysis, DNA will be modified to insure that it does not completely denature, for example by adding a GC clamp of approximately 40 by of high-melting GC-rich DNA by PCR. In a further embodiment, a temperature gradient is used in place of a denaturing gradient to identify differences in the mobility of control and sample DNA (Rosenbaum et al., 1987). In another embodiment, the mutant fragment is detected using denaturing HPLC (see e.g. Hoogendoorn et al., 2000).

[0121] Examples of other techniques for detecting polymorphisms include, but are not limited to, selective oligonucleotide hybridization, selective amplification, selective primer extension, selective ligation, single-base extension, selective termination of extension or invasive cleavage assay. For example, oligonucleotide primers may be prepared in which the polymorphism is placed centrally and then hybridized to target DNA under conditions which permit hybridization only if a perfect match is found (Saiki et al., 1986; Saiki et al., 1989). Such oligonucleotides are hybridized to PCR amplified target DNA or a number of different mutations when the oligonucleotides are attached to the hybridizing membrane and hybridized with labeled target DNA. Alternatively, the amplification, the allele-specific hybridization and the detection can be done in a single assay following the principle of the 5′ nuclease assay (e.g. see Livak et al., 1995). For example, the associated allele, a particular allele of a polymorphic locus, or the like is amplified by PCR in the presence of both allele-specific oligonucleotides, each specific for one or the other allele. Each probe has a different fluorescent dye at the 5′ end and a quencher at the 3′ end. During PCR, if one or the other or both allele-specific oligonucleotides are hybridized to the template, the Taq polymerase via its 5′ exonuclease activity will release the corresponding dyes. The latter will thus reveal the genotype of the amplified product.

[0122] Hybridization assays may also be carried out with a temperature gradient following the principle of dynamic allele-specific hybridization or like e.g. Jobs et al., (2003); and Bourgeois and Labuda, (2004). For example, the hybridization is done using one of the two allele-specific oligonucleotides labeled with a fluorescent dye, and an intercalating quencher under a gradually increasing temperature. At low temperature, the probe is hybridized to both the mismatched and full-matched template. The probe melts at a lower temperature when hybridized to the template with a mismatch. The release of the probe is captured by an emission of the fluorescent dye, away from the quencher. The probe melts at a higher temperature when hybridized to the template with no mismatch. The temperature-dependent fluorescence signals therefore indicate the absence or presence of an associated allele, a particular allele of a polymorphic locus, or the like (e.g. Jobs et al., 2003). Alternatively, the hybridization is done under a gradually decreasing temperature. In this case, both allele-specific oligonucleotides are hybridized to the template competitively. At high temperature none of the two probes are hybridized. Once the optimal temperature of the full-matched probe is reached, it hybridizes and leaves no target for the mismatched probe (e.g. Bourgeois and Labuda, 2004). In the latter case, if the allele-specific probes are differently labeled, then they are hybridized to a single PCR-amplified target. If the probes are labeled with the same dye, then the probe cocktail is hybridized twice to identical templates with only one labeled probe, different in the two cocktails, in the presence of the unlabeled competitive probe.

[0123] Alternatively, allele specific amplification technology that depends on selective PCR amplification may be used in conjunction with the present invention. Oligonucleotides used as primers for specific amplification may carry the associated allele, a particular allele of a polymorphic locus, or the like, also referred to as “mutation” of interest in the center of the molecule, so that amplification depends on differential hybridization (Gibbs et al., 1989) or at the extreme 3′ end of one primer where, under appropriate conditions, mismatch can prevent, or reduce polymerase extension (Prossner, 1993). In addition it may be desirable to introduce a novel restriction site in the region of the mutation to create cleavage-based detection (Gasparini et al., 1992). It is anticipated that in certain embodiments, amplification may also be performed using Taq ligase for amplification (Barany, 1991). In such cases, ligation will occur only if there is a perfect match at the 3′ end of the 5′ sequence making it possible to detect the presence of a known associated allele, a particular allele of a polymorphic locus, or the like at a specific site by looking for the presence or absence of amplification. The products of such an oligonucleotide ligation assay can also be detected by means of gel electrophoresis. Furthermore, the oligonucleotides may contain universal tags used in PCR amplification and zip code tags that are different for each allele. The zip code tags are used to isolate a specific, labeled oligonucleotide that may contain a mobility modifier (e.g. Grossman et al., 1994).

[0124] In yet another alternative, allele-specific elongation followed by ligation will form a template for PCR amplification. In such cases, elongation will occur only if there is a perfect match at the 3′ end of the allele-specific oligonucleotide using a DNA polymerase. This reaction is performed directly on the genomic DNA and the extension/ligation products are amplified by PCR. To this end, the oligonucleotides contain universal tags allowing amplification at a high multiplex level and a zip code for SNP identification. The PCR tags are designed in such a way that the two alleles of a SNP are amplified by different forward primers, each having a different dye. The zip code tags are the same for both alleles of a given SNPs and they are used for hybridization of the PCR-amplified products to oligonucleotides bound to a solid support, chip, bead array or like. For an example of the procedure, see Fan et al. (Cold Spring Harbor Symposia on Quantitative Biology, Vol. LXVIII, pp. 69-78 2003).

[0125] Another alternative includes the single-base extension/ligation assay using a molecular inversion probe, consisting of a single, long oligonucleotide (see e.g. Hardenbol et al., 2003). In such an embodiment, the oligonucleotide hybridizes on both side of the SNP locus directly on the genomic DNA, leaving a one-base gap at the SNP locus. The gap-filling, one-base extension/ligation is performed in four tubes, each having a different dNTP. Following this reaction, the oligonucleotide is circularized whereas unreactive, linear oligonucleotides are degraded using an exonuclease such as exonuclease I of E. coli. The circular oligonucleotides are then linearized and the products are amplified and labeled using universal tags on the oligonucleotides. The original oligonucleotide also contains a SNP-specific zip code allowing hybridization to oligonucleotides bound to a solid support, chip, and bead array or like. This reaction can be performed at a high multiplexed level.

[0126] In another alternative, the associated allele, a particular allele of a polymorphic locus, or the like is scored by single-base extension (see e.g. U.S. Pat. No. 5,888,819). The template is first amplified by PCR. The extension oligonucleotide is then hybridized next to the SNP locus and the extension reaction is performed using a thermostable polymerase such as ThermoSequenase (GE Healthcare) in the presence of labeled ddNTPs. This reaction can therefore be cycled several times. The identity of the labeled ddNTP incorporated will reveal the genotype at the SNP locus. The labeled products can be detected by means of gel electrophoresis, fluorescence polarization (e.g. Chen et al., 1999) or by hybridization to oligonucleotides bound to a solid support, chip, and bead array or like. In the latter case, the extension oligonucleotide will contain a SNP-specific zip code tag.

[0127] In yet another alternative, a SNP is scored by selective termination of extension. The template is first amplified by PCR and the extension oligonucleotide hybridizes in the vicinity of the SNP locus, close to but not necessarily adjacent to it. The extension reaction is carried out using a thermostable polymerase such as ThermoSequenase (GE Healthcare) in the presence of a mix of dNTPs and at least one ddNTP. The latter has to terminate the extension at one of the allele of the interrogated SNP, but not both such that the two alleles will generate extension products of different sizes. The extension product can then be detected by means of gel electrophoresis, in which case the extension products need to be labeled, or by mass spectrometry (see e.g. Storm et al., 2003).

[0128] In another alternative, SNPs are detected using an invasive cleavage assay (see U.S. Pat. No. 6,090,543). There are five oligonucleotides per SNP to interrogate but these are used in a two step-reaction. During the primary reaction, three of the designed oligonucleotides are first hybridized directly to the genomic DNA. One of them is locus-specific and hybridizes up to the SNP locus (the pairing of the 3′ base at the SNP locus is not necessary). There are two allele-specific oligonucleotides that hybridize in tandem to the locus-specific probe but also contain a 5′ flap that is specific for each allele of the SNP. Depending upon hybridization of the allele-specific oligonucleotides at the base of the SNP locus, this creates a structure that is recognized by a cleavase enzyme (U.S. Pat. No. 6,090,606) and the allele-specific flap is released. During the secondary reaction, the flap fragments hybridize to a specific cassette to recreate the same structure as above except that the cleavage will release a small DNA fragment labeled with a fluorescent dye that can be detected using regular fluorescence detector. In the cassette, the emission of the dye is inhibited by a quencher.

Methods to Identify Agents that Modulate the Expression of a Nucleic Acid Encoding a Gene Involved in Schizophrenia

[0129] The present invention provides methods for identifying agents that modulate the expression of a nucleic acid encoding a gene from Tables 2-4: Such methods may utilize any available means of monitoring for changes in the expression level of the nucleic acids of the invention. As used herein, an agent is said to modulate the expression of a nucleic acid of the invention if it is capable of up- or down-regulating expression of the nucleic acid in a cell. Such cells can be obtained from any parts of the body such as the hair, mouth, rectum, scalp, blood, dermis, epidermis, skin cells, cutaneous surfaces, intertrigious areas, genitalia and fluids, vessels and endothelium. Some non-limiting examples of cells that can be used are: brain cells, cells from the reproductive system, muscle cells, nervous cells, blood and vessels cells, T cell, mast cell, lymphocyte, monocyte, macrophage, and epithelial cells.

[0130] In one assay format, the expression of a nucleic acid encoding a gene of the invention (see Tables 2-4) in a cell or tissue sample is monitored directly by hybridization to the nucleic acids of the invention. Cell lines or tissues are exposed to the agent to be tested under appropriate conditions and time and total RNA or mRNA is isolated by standard procedures such as those disclosed in Sambrook et al., (1989) Molecular Cloning: A Laboratory Manual, Cold Spring Harbor Laboratory Press).

[0131] Probes to detect differences in RNA expression levels between cells exposed to the agent and control cells may be prepared as described above. Hybridization conditions are modified using known methods, such as those described by Sambrook et al., and Ausubel et al., as required for each probe. Hybridization of total cellular RNA or RNA enriched for polyA RNA can be accomplished in any available format. For instance, total cellular RNA or RNA enriched for polyA RNA can be affixed to a solid support and the solid support exposed to at least one probe comprising at least one, or part of one of the sequences of the invention under conditions in which the probe will specifically hybridize. Alternatively, nucleic acid fragments comprising at least one, or part of one of the sequences of the invention can be affixed to a solid support, such as a silicon chip or a porous glass wafer. The chip or wafer can then be exposed to total cellular RNA or polyA RNA from a sample under conditions in which the affixed sequences will specifically hybridize to the RNA. By examining for the ability of a given probe to specifically hybridize to an RNA sample from an untreated cell population and from a cell population exposed to the agent, agents which up or down regulate expression are identified.

Methods to Identify Agents that Modulate the Activity of a Protein Encoded by a Gene Involved in Schizophrenia Disease

[0132] The present invention provides methods for identifying agents that modulate at least one activity of the proteins described in Tables 2-4. Such methods may utilize any means of monitoring or detecting the desired activity. As used herein, an agent is said to modulate the expression of a protein of the invention if it is capable of up- or down-regulating expression of the protein in a cell. Such cells can be obtained from any parts of the body such as the hair, mouth, rectum, scalp, blood, dermis, epidermis, skin cells, cutaneous surfaces, intertrigious areas, genitalia and fluids, vessels and endothelium. Some non-limiting examples of cells that can be used are: brain cells, cells from the reproductive system, muscle cells, nervous cells, blood and vessels cells, T cell, mast cell, lymphocyte, monocyte, macrophage, and epithelial cells.

[0133] In one format, the specific activity of a protein of the invention, normalized to a standard unit, may be assayed in a cell population that has been exposed to the agent to be tested and compared to an unexposed control cell population. Cell lines or populations are exposed to the agent to be tested under appropriate conditions and times. Cellular lysates may be prepared from the exposed cell line or population and a control, unexposed cell line or population. The cellular lysates are then analyzed with a probe, such as an antibody probe.

[0134] Antibody probes can be prepared by immunizing suitable mammalian hosts utilizing appropriate immunization protocols using the proteins of the invention or antigen-containing fragments thereof. To enhance immunogenicity, these proteins or fragments can be conjugated to suitable carriers. Methods for preparing immunogenic conjugates with carriers such as BSA, KLH or other carrier proteins are well known in the art. In some circumstances, direct conjugation using, for example, carbodiimide reagents may be effective; in other instances linking reagents such as those supplied by Pierce Chemical Co. (Rockford, Ill.) may be desirable to provide accessibility to the hapten. The hapten peptides can be extended at either the amino or carboxy terminus with a cysteine residue or interspersed with cysteine residues, for example, to facilitate linking to a carrier. Administration of the immunogens is conducted generally by injection over a suitable time period and with use of suitable adjuvants, as is generally understood in the art. During the immunization schedule, titers of antibodies are taken to determine adequacy of antibody formation. While the polyclonal antisera produced in this way may be satisfactory for some applications, for pharmaceutical compositions, use of monoclonal preparations is preferred. Immortalized cell lines which secrete the desired monoclonal antibodies may be prepared using standard methods, see e.g., Kohler & Milstein (1992) or modifications which affect immortalization of lymphocytes or spleen cells, as is generally known. The immortalized cell lines secreting the desired antibodies can be screened by immunoassay in which the antigen is the peptide hapten, polypeptide or protein. When the appropriate immortalized cell culture secreting the desired antibody is identified, the cells can be cultured either in vitro or by production in ascites fluid. The desired monoclonal antibodies may be recovered from the culture supernatant or from the ascites supernatant. Fragments of the monoclonal antibodies or the polyclonal antisera which contain the immunologically significant portion(s) can be used as antagonists, as well as the intact antibodies. Use of immunologically reactive fragments, such as Fab or Fab' fragments, is often preferable, especially in a therapeutic context, as these fragments are generally less immunogenic than the whole immunoglobulin. The antibodies or fragments may also be produced, using current technology, by recombinant means. Antibody regions that bind specifically to the desired regions of the protein can also be produced in the context of chimeras derived from multiple species. Antibody regions that bind specifically to the desired regions of the protein can also be produced in the context of chimeras from multiple species, for instance, humanized antibodies. The antibody can therefore be a humanized antibody or a human antibody, as described in U.S. Pat. No. 5,585,089 or Riechmann et al. (1988).

[0135] Agents that are assayed in the above method can be randomly selected or rationally selected or designed. As used herein, an agent is said to be randomly selected when the agent is chosen randomly without considering the specific sequences involved in the association of the protein of the invention alone or with its associated substrates, binding partners, etc. An example of randomly selected agents is the use of a chemical library or a peptide combinatorial library, or a growth broth of an organism. As used herein, an agent is said to be rationally selected or designed when the agent is chosen on a non-random basis which takes into account the sequence of the target site or its conformation in connection with the agent's action. Agents can be rationally selected or rationally designed by utilizing the peptide sequences that make up these sites. For example, a rationally selected peptide agent can be a peptide whose amino acid sequence is identical to or a derivative of any functional consensus site. The agents of the present invention can be, as examples, oligonucleotides, antisense polynucleotides, interfering RNA, peptides, peptide mimetics, antibodies, antibody fragments, small molecules, vitamin derivatives, as well as carbohydrates. Peptide agents of the invention can be prepared using standard solid phase (or solution phase) peptide synthesis methods, as is known in the art. In addition, the DNA encoding these peptides may be synthesized using commercially available oligonucleotide synthesis instrumentation and produced recombinantly using standard recombinant production systems. The production using solid phase peptide synthesis is necessitated if non-gene-encoded amino acids are to be included.

[0136] Another class of agents of the present invention includes antibodies or fragments thereof that bind to a protein encoded by a gene in Tables 2-4. Antibody agents can be obtained by immunization of suitable mammalian subjects with peptides, containing as antigenic regions, those portions of the protein intended to be targeted by the antibodies (see section above of antibodies as probes for standard antibody preparation methodologies).

[0137] In yet another class of agents, the present invention includes peptide mimetics that mimic the three-dimensional structure of the protein encoded by a gene from Tables 2-4. Such peptide mimetics may have significant advantages over naturally occurring peptides, including, for example: more economical production, greater chemical stability, enhanced pharmacological properties (half-life, absorption, potency, efficacy, etc.), altered specificity (e.g., a broad-spectrum of biological activities), reduced antigenicity and others. In one form, mimetics are peptide-containing molecules that mimic elements of protein secondary structure. The underlying rationale behind the use of peptide mimetics is that the peptide backbone of proteins exists chiefly to orient amino acid side chains in such a way as to facilitate molecular interactions, such as those of antibody and antigen. A peptide mimetic is expected to permit molecular interactions similar to the natural molecule. In another form, peptide analogs are commonly used in the pharmaceutical industry as non-peptide drugs with properties analogous to those of the template peptide. These types of non-peptide compounds are also referred to as peptide mimetics or peptidomimetics (Fauchere, 1986; Veber & Freidinger, 1985; Evans et al., 1987) which are usually developed with the aid of computerized molecular modeling. Peptide mimetics that are structurally similar to therapeutically useful peptides may be used to produce an equivalent therapeutic or prophylactic effect. Generally, peptide mimetics are structurally similar to a paradigm polypeptide (i.e., a polypeptide that has a biochemical property or pharmacological activity), but have one or more peptide linkages optionally replaced by a linkage using methods known in the art. Labeling of peptide mimetics usually involves covalent attachment of one or more labels, directly or through a spacer (e.g., an amide group), to non-interfering position(s) on the peptide mimetic that are predicted by quantitative structure-activity data and molecular modeling. Such non-interfering positions generally are positions that do not form direct contacts with the macromolecule(s) to which the peptide mimetic binds to produce the therapeutic effect. Derivitization (e.g., labeling) of peptide mimetics should not substantially interfere with the desired biological or pharmacological activity of the peptide mimetic. The use of peptide mimetics can be enhanced through the use of combinatorial chemistry to create drug libraries. The design of peptide mimetics can be aided by identifying amino acid mutations that increase or decrease binding of the protein to its binding partners. Approaches that can be used include the yeast two hybrid method (see Chien et al., 1991) and the phage display method. The two hybrid method detects protein-protein interactions in yeast (Fields et al., 1989). The phage display method detects the interaction between an immobilized protein and a protein that is expressed on the surface of phages such as lambda and M13 (Amberg et al., 1993; Hogrefe et al., 1993). These methods allow positive and negative selection for protein-protein interactions and the identification of the sequences that determine these interactions.

### Method to Diagnose Schizophrenia

[0138] The present invention also relates to methods for diagnosing SCHIZOPHRENIA or a related disease, preferably a subtype of SCHIZOPHRENIA, a predisposition to such a disease and/or disease progression. In some methods, the steps comprise contacting a target sample with (a) nucleic acid molecule(s) or fragments thereof and comparing the concentration of individual mRNA(s) with the concentration of the corresponding mRNA(s) from at least one healthy donor. An aberrant (increased or decreased) mRNA level of at least one gene from Tables 2-4, at least 5 or 10 genes from Tables 2-4, at least 50 genes from Tables 2-4, at least 100 genes from Tables 2-4 or at least 200 genes from Tables 2-4 determined in the sample in comparison to the control sample is an indication of SCHIZOPHRENIA disease or a related subtype or a disposition to such kinds of diseases. For diagnosis, samples are, preferably, obtained from any parts of the body such as the hair, mouth, rectum, scalp, blood, dermis, epidermis, skin cells, cutaneous surfaces, intertrigious areas, genitalia and fluids, vessels and endothelium. Some non-limiting examples of cells that can be used are: brain cells, cells from the reproductive system, muscle cells, nervous cells, blood and vessels cells, T cell, mast cell, lymphocyte, monocyte, macrophage, and epithelial cells.

[0139] For analysis of gene expression, total RNA is obtained from cells according to standard procedures and, preferably, reverse-transcribed. Preferably, a DNAse treatment (in order to get rid of contaminating genomic DNA) is performed.

[0140] The nucleic acid molecule or fragment is typically a nucleic acid probe for hybridization or a primer for PCR. The person skilled in the art is in a position to design suitable nucleic acids probes based on the information provided in the Tables of the present invention. The target cellular component, i.e. mRNA, e.g., in brain tissue, may be detected directly in situ, e.g. by in situ hybridization or it may be isolated from other cell components by common methods known to those skilled in the art before contacting with a probe. Detection methods include Northern blot analysis, RNase protection, in situ methods, e.g. in situ hybridization, in vitro amplification methods (PCR, LCR, QRNA replicase or RNA-transcription/amplification (TAS, 3SR), reverse dot blot disclosed in EP-B10237362) and other detection assays that are known to those skilled in the art. Products obtained by in vitro amplification can be detected according to established methods, e.g. by separating the products on agarose or polyacrylamide gels and by subsequent staining with ethidium bromide or any other dye or reagent. Alternatively, the amplified products can be detected by using labeled primers for amplification or labeled dNTPs. Preferably, detection is based on a microarray.

[0141] The probes (or primers) (or, alternatively, the reverse-transcribed sample mRNAs) can be detectably labeled, for example, with a radioisotope, a bioluminescent compound, a chemiluminescent compound, a fluorescent compound, a metal chelate, or an enzyme.

[0142] The present invention also relates to the use of the nucleic acid molecules or fragments described above for the preparation of a diagnostic composition for the diagnosis of SCHIZOPHRENIA or a subtype or predisposition to such a disease.

[0143] The present invention also relates to the use of the nucleic acid molecules of the present invention for the isolation or development of a compound which is useful for therapy of SCHIZOPHRENIA. For example, the nucleic acid molecules of the invention and the data obtained using said nucleic acid molecules for diagnosis of SCHIZOPHRENIA might allow for the identification of further genes which are specifically dysregulated, and thus may be considered as potential targets for therapeutic interventions. Furthermore, such diagnostic might also be used for selection of patients that might respond positively or negatively to a potential target for therapeutic interventions (as for the pharmacogenomics and personalized medicine concept well know in the art; see prognostic assays text below).

[0144] The invention further provides prognostic assays that can be used to identify subjects having or at risk of developing SCHIZOPHRENIA. In such method, a test sample is obtained from a subject and the amount and/or concentration of the nucleic acid described in Tables 2-4 is determined; wherein the presence of an associated allele, a particular allele of a polymorphic locus, or the likes in the nucleic acids sequences of this invention (see SEQ ID from Tables 5-35) can be diagnostic for a subject having or at risk of developing SCHIZOPHRENIA. As used herein, a “test sample” refers to a biological sample obtained from a subject of interest. For example, a test sample can be a biological fluid, a cell sample, or tissue. A biological fluid can be, but is not limited to saliva, serum, mucus, urine, stools, spermatozoids, vaginal secretions, lymph, amiotic liquid, pleural liquid and tears. Cells can be, but are not limited to: brain cells, cells from the reproductive system, hair cells, muscle cells, nervous cells, blood and vessels cells, dermis, epidermis and other skin cells.

[0145] Furthermore, the prognostic assays described herein can be used to determine whether a subject can be administered an agent (e.g., an agonist, antagonist, peptidomimetic, polypeptide, nucleic acid such as antisense DNA or interfering RNA (RNAi), small molecule or other drug candidate) to treat SCHIZOPHRENIA. Specifically, these assays can be used to predict whether an individual will have an efficacious response or will experience adverse events in response to such an agent. For example, such methods can be used to determine whether a subject can be effectively treated with an agent that modulates the expression and/or activity of a gene from Tables 2-4 or the nucleic acids described herein. In another example, an association study may be performed to identify polymorphisms from Tables 5-35 that are associated with a given response to the agent, e.g., an efficacious response or the likelihood of one or more adverse events. Thus, one embodiment of the present invention provides methods for determining whether a subject can be effectively treated with an agent for a disease associated with aberrant expression or activity of a gene from Tables 2-4 in which a test sample is obtained and nucleic acids or polypeptides from Tables 2-4 are detected (e.g., wherein the presence of a particular level of expression of a gene from Tables 2-4 or a particular allelic variant of such gene, such as polymorphisms from Tables 5-35 is diagnostic for a subject that can be administered an agent to treat a disorder such as SCHIZOPHRENIA). In one embodiment, the method includes obtaining a sample from a subject suspected of having SCHIZOPHRENIA or an affected individual and exposing such sample to an agent. The expression and/or activity of the nucleic acids and/or genes of the invention are monitored before and after treatment with such agent to assess the effect of such agent. After analysis of the expression values, one skilled in the art can determine whether such agent can effectively treat such subject. In another embodiment, the method includes obtaining a sample from a subject having or susceptible to developing SCHIZOPHRENIA and determining the allelic constitution of polymorphisms from Tables 5-35 that are associated with a particular response to an agent. After analysis of the allelic constitution of the individual at the associated polymorphisms, one skilled in the art can determine whether such agent can effectively treat such subject.

[0146] The methods of the invention can also be used to detect genetic alterations in a gene from Tables 2-4, thereby determining if a subject with the lesioned gene is at risk for a disease associated with SCHIZOPHRENIA. In preferred embodiments, the methods include detecting, in a sample of cells from the subject, the presence or absence of a genetic alteration characterized by at least one alteration linked to or affecting the integrity of a gene from Tables 2-4 encoding a polypeptide or the misexpression of such gene. For example, such genetic alterations can be detected by ascertaining the existence of at least one of: (1) a deletion of one or more nucleotides from a gene from Tables 2-4; (2) an addition of one or more nucleotides to a gene from Tables 2-4; (3) a substitution of one or more nucleotides of a gene from Tables 2-4; (4) a chromosomal rearrangement of a gene from Tables 2-4; (5) an alteration in the level of a messenger RNA transcript of a gene from Tables 2-4; (6) aberrant modification of a gene from Tables 2-4, such as of the methylation pattern of the genomic DNA, (7) the presence of a non-wild type splicing pattern of a messenger RNA transcript of a gene from Tables 2-4; (8) inappropriate post-translational modification of a polypeptide encoded by a gene from Tables 2-4; and (9) alternative promoter use. As described herein, there are a large number of assay techniques known in the art which can be used for detecting alterations in a gene from Tables 2-4. A preferred biological sample is a peripheral blood sample obtained by conventional means from a subject. Another preferred biological sample is a buccal swab. Other biological samples can be, but are not limited to, urine, stools, vaginal secretions, lymph, amiotic liquid, pleural liquid and tears.

[0147] In certain embodiments, detection of the alteration involves the use of a probe/primer in a polymerase chain reaction (PCR) (see, e.g., U.S. Pat. Nos. 4,683,195 and 4,683,202), such as anchor PCR or RACE PCR, or alternatively, in a ligation chain reaction (LCR) (see, e.g., Landegran of al., 1988; and Nakazawa et al., 1994), the latter of which can be particularly useful for detecting point mutations in a gene from Tables 2-4 (see Abavaya et al., 1995). This method can include the steps of collecting a sample of cells from a patient, isolating nucleic acid (e.g., genomic DNA, mRNA, or both) from the cells of the sample, contacting the nucleic acid sample with one or more primers which specifically hybridize to a gene from Tables 2-4 under conditions such that hybridization and amplification of the nucleic acid from Tables 2-4 (if present) occurs, and detecting the presence or absence of an amplification product, or detecting the size of the amplification product and comparing the length to a control sample. PCR and/or LCR may be desirable to use as a preliminary amplification step in conjunction with some of the techniques used for detecting a mutation, an associated allele, a particular allele of a polymorphic locus, or the like described in the above sections. Other mutation detection and mapping methods are described in previous sections of the detailed description of the present invention.

[0148] The present invention also relates to further methods for diagnosing SCHIZOPHRENIA or a related disorder or subtype, a predisposition to such a disorder and/or disorder progression. In some methods, the steps comprise contacting a target sample with (a) nucleic molecule(s) or fragments thereof and determining the presence or absence of a particular allele of a polymorphism that confers a disorder-related phenotype (e.g., predisposition to such a disorder and/or disorder progression). The presence of at least one allele from Tables 5-35 that is associated with SCHIZOPHRENIA (“associated allele”), at least 5 or 10 associated alleles from Tables 5-35, at least 50 associated alleles from Tables 5-35 at least 100 associated alleles from Tables 5-35, or at least 200 associated alleles from Tables 5-35 determined in the sample is an indication of SCHIZOPHRENIA disease or a related disorder, a disposition or predisposition to such kinds of disorders, or a prognosis for such disorder progression. Such samples and cells can be obtained from any parts of the body such as the hair, mouth, rectum, scalp, blood, dermis, epidermis, skin cells, cutaneous surfaces, intertrigious areas, genitalia and fluids, vessels and endothelium. Some non-limiting examples of cells that can be used are: brain cells, cells from the reproductive system, muscle cells, nervous cells, blood and vessels cells, T cell, mast cell, lymphocyte, monocyte, macrophage, and epithelial cells.

[0149] In other embodiments, alterations in a gene from Tables 2-4 can be identified by hybridizing sample and control nucleic acids, e.g., DNA or RNA, to high density arrays or bead arrays containing tens to thousands of oligonucleotide probes (Cronin et al., 1996; Kozal et al., 1996). For example, alterations in a gene from Tables 2-4 can be identified in two dimensional arrays containing light-generated DNA probes as described in Cronin et al., (1996). Briefly, a first hybridization array of probes can be used to scan through long stretches of DNA in a sample and control to identify base changes between the sequences by making linear arrays of sequential overlapping probes. This step allows the identification of point mutations, associated alleles, particular alleles of a polymorphic locus, or the like. This step is followed by a second hybridization array that allows the characterization of specific mutations by using smaller, specialized probe arrays complementary to all variants, mutations, alleles detected. Each mutation array is composed of parallel probe sets, one complementary to the wild-type gene and the other complementary to the mutant gene.

[0150] In yet another embodiment, any of a variety of sequencing reactions known in the art can be used to directly sequence a gene from Tables 2-4 and detect an associated allele, a particular allele of a polymorphic locus, or the like by comparing the sequence of the sample gene from Tables 2-4 with the corresponding wild-type (control) sequence (see text described in previous sections for various sequencing techniques and other methods of detecting an associated allele, a particular allele of a polymorphic locus, or the likes in a gene from Tables 2-4. Such methods include methods in which protection from cleavage agents is used to detect mismatched bases in RNA/RNA, DNA/DNA or RNA/DNA heteroduplexes (Myers et al., 1985) and alterations in electrophoretic mobility. Examples of other techniques for detecting point mutations, an associated allele, a particular allele of a polymorphic locus, or the like include, but are not limited to, selective oligonucleotide hybridization, selective amplification, selective primer extension, selective ligation, single-base extension, selective termination of extension or invasive cleavage assay.

[0151] Other types of markers can also be used for diagnostic purposes. For example, microsatellites can also be useful to detect the genetic predisposition of an individual to a given disorder. Microsatellites consist of short sequence motifs of one or a few nucleotides repeated in tandem. The most common motifs are polynucleotide runs, dinucleotide repeats (particularly the CA repeats) and trinucleotide repeats. However, other types of repeats can also be used. The microsatellites are very useful for genetic mapping because they are highly polymorphic in their length. Microsatellite markers can be typed by various means, including but not limited to DNA fragment sizing, oligonucleotide ligation assay and mass spectrometry. For example, the locus of the microsatellite is amplified by PCR and the size of the PCR fragment will be directly correlated to the length of the microsatellite repeat. The size of the PCR fragment can be detected by regular means of gel electrophoresis. The fragment can be labeled internally during PCR or by using end-labeled oligonucleotides in the PCR reaction (e.g. Mansfield et al., 1996). Alternatively, the size of the PCR fragment is determined by mass spectrometry. In another alternative, an oligonucleotide ligation assay can be performed. The microsatellite locus is first amplified by PCR. Then, different oligonucleotides can be submitted to ligation at the center of the repeat with a set of oligonucleotides covering all the possible lengths of the marker at a given locus (Zirvi et al., 1999). Another example of design of an oligonucleotide assay comprises the ligation of three oligonucleotides; a 5′ oligonucleotide hybridizing to the 5′ flanking sequence, a repeat oligonucleotide of the length of the shortest allele of the marker hybridizing to the repeated region and a set of 3′ oligonucleotides covering all the existing alleles hybridizing to the 3′ flanking sequence and a portion of the repeated region for all the alleles longer than the shortest one. For the shortest allele, the 3′ oligonucleotide exclusively hybridizes to the 3′ flanking sequence (U.S. Pat. No. 6,479,244).

[0152] The methods described herein may be performed, for example, by utilizing pre-packaged diagnostic kits comprising at least one probe nucleic acid selected from the SEQ ID of Tables 5-35, or antibody reagent described herein, which may be conveniently used, for example, in a clinical setting to diagnose patient exhibiting symptoms or a family history of a disorder or disorder involving abnormal activity of genes from Tables 2-4.

### Method to Treat an Animal Suspected of Having Schizophrenia

[0153] The present invention provides methods of treating a disease associated with SCHIZOPHRENIA disease by expressing in vivo the nucleic acids of at least one gene from Tables 2-4. These nucleic acids can be inserted into any of a number of well-known vectors for the transfection of target cells and organisms as described below. The nucleic acids are transfected into cells, ex vivo or in vivo, through the interaction of the vector and the target cell. The nucleic acids encoding a gene from Tables 2-4, under the control of a promoter, then express the encoded protein, thereby mitigating the effects of absent, partial inactivation, or abnormal expression of a gene from Tables 2-4.

[0154] Such gene therapy procedures have been used to correct acquired and inherited genetic defects, cancer, and viral infection in a number of contexts. The ability to express artificial genes in humans facilitates the prevention and/or cure of many important human disorders, including many disorders which are not amenable to treatment by other therapies (for a review of gene therapy procedures, see Anderson, 1992; Nabel & Feigner, 1993; Mitani & Caskey, 1993; Mulligan, 1993; Dillon, 1993; Miller, 1992; Van Brunt, 1998; Vigne, 1995; Kremer & Perricaudet 1995; Doerfler & Bohm 1995; and Yu et al., 1994).

[0155] Delivery of the gene or genetic material into the cell is the first critical step in gene therapy treatment of a disorder. A large number of delivery methods are well known to those of skill in the art. Preferably, the nucleic acids are administered for in vivo or ex vivo gene therapy uses. Non-viral vector delivery systems include DNA plasmids, naked nucleic acid, and nucleic acid complexed with a delivery vehicle such as a liposome. Viral vector delivery systems include DNA and RNA viruses, which have either episomal or integrated genomes after delivery to the cell. For a review of gene therapy procedures, see the references included in the above section.

[0156] The use of RNA or DNA based viral systems for the delivery of nucleic acids take advantage of highly evolved processes for targeting a virus to specific cells in the body and trafficking the viral payload to the nucleus. Viral vectors can be administered directly to patients (in vivo) or they can be used to treat cells in vitro and the modified cells are administered to patients (ex vivo). Conventional viral based systems for the delivery of nucleic acids could include retroviral, lentivirus, adenoviral, adeno-associated and herpes simplex virus vectors for gene transfer. Viral vectors are currently the most efficient and versatile method of gene transfer in target cells and tissues. Integration in the host genome is possible with the retrovirus, lentivirus, and adeno-associated virus gene transfer methods, often resulting in long term expression of the inserted transgene. Additionally, high transduction efficiencies have been observed in many different cell types and target tissues.

[0157] The tropism of a retrovirus can be altered by incorporating foreign envelope proteins, expanding the potential target population of target cells. Lentiviral vectors are retroviral vectors that are able to transduce or infect non-dividing cells and typically produce high viral titers. Selection of a retroviral gene transfer system would therefore depend on the target tissue. Retroviral vectors are comprised of cis-acting long terminal repeats with packaging capacity for up to 6-10 kb of foreign sequence. The minimum cis-acting LTRs are sufficient for replication and packaging of the vectors, which are then used to integrate the therapeutic gene into the target cell to provide permanent transgene expression. Widely used retroviral vectors include those based upon murine leukemia virus (MuLV), gibbon ape leukemia virus (GaLV), Simian Immuno deficiency virus (SIV), human immuno deficiency virus (HIV), and combinations thereof (see, e.g., Buchscher et al., 1992; Johann et al., 1992; Sommerfelt et al., 1990; Wilson et al., 1989; Miller et al., 1999; and PCT/US94/05700).

[0158] In applications where transient expression of the nucleic acid is preferred, adenoviral based systems are typically used. Adenoviral based vectors are capable of very high transduction efficiency in many cell types and do not require cell division. With such vectors, high titer and levels of expression have been obtained. This vector can be produced in large quantities in a relatively simple system. Adeno-associated virus (“AAV”) vectors are also used to transduce cells with target nucleic acids, e.g., in the in vitro production of nucleic acids and peptides, and for in vivo and ex vivo gene therapy procedures (see, e.g., West et al., 1987; U.S. Pat. No. 4,797,368; WO 93/24641; Kotin, 1994; Muzyczka, 1994). Construction of recombinant AAV vectors is described in a number of publications, including U.S. Pat. No. 5,173,414; Tratschin et al., 1985; Tratschin, et al., 1984; Hermonat & Muzyczka, 1984; and Samulski et al., 1989.

[0159] In particular, numerous viral vector approaches are currently available for gene transfer in clinical trials, with retroviral vectors by far the most frequently used system. All of these viral vectors utilize approaches that involve complementation of defective vectors by genes inserted into helper cell lines to generate the transducing agent. pLASN and MFG-S are examples are retroviral vectors that have been used in clinical trials (Dunbar et al., 1995; Kohn et al., 1995; Malech et al., 1997). PA317/pLASN was the first therapeutic vector used in a gene therapy trial (Blaese et al., 1995). Transduction efficiencies of 50% or greater have been observed for MFG-S packaged vectors (Ellem et al., 1997; and Dranoff et al., 1997).

[0160] Recombinant adeno-associated virus vectors (rAAV) are a promising alternative gene delivery systems based on the defective and nonpathogenic parvovirus adeno-associated type 2 virus. All vectors are derived from a plasmid that retains only the AAV 145 by inverted terminal repeats flanking the transgene expression cassette. Efficient gene transfer and stable transgene delivery due to integration into the genomes of the transduced cell are key features for this vector system (Wagner et al., 1998, Kearns et al., 1996).

[0161] Replication-deficient recombinant adenoviral vectors (Ad) are predominantly used in transient expression gene therapy; because they can be produced at high titer and they readily infect a number of different cell types. Most adenovirus vectors are engineered such that a transgene replaces the Ad E1a, E1b, and E3 genes; subsequently the replication defector vector is propagated in human 293 cells that supply the deleted gene function in trans. Ad vectors can transduce multiple types of tissues in vivo, including nondividing, differentiated cells such as those found in the liver, kidney and muscle tissues. Conventional Ad vectors have a large carrying capacity. An example of the use of an Ad vector in a clinical trial involved polynucleotide therapy for antitumor immunization with intramuscular injection (Sterman et al., 1998). Additional examples of the use of adenovirus vectors for gene transfer in clinical trials include Rosenecker et al., 1996; Sterman et al., 1998; Welsh et al., 1995; Alvarez et al., 1997; Topf et al., 1998.

[0162] Packaging cells are used to form virus particles that are capable of infecting a host cell. Such cells include 293 cells, which package adenovirus, and w2 cells or PA317 cells, which package retrovirus. Viral vectors used in gene therapy are usually generated by a producer cell line that packages a nucleic acid vector into a viral particle. The vectors typically contain the minimal viral sequences required for packaging and subsequent integration into a host, other viral sequences being replaced by an expression cassette for the protein to be expressed. The missing viral functions are supplied in trans by the packaging cell line. For example, AAV vectors used in gene therapy typically only possess ITR sequences from the AAV genome which are required for packaging and integration into the host genome. Viral DNA is packaged in a cell line, which contains a helper plasmid encoding the other AAV genes, namely rep and cap, but lacking ITR sequences. The cell line is also infected with adenovirus as a helper. The helper virus promotes replication of the AAV vector and expression of AAV genes from the helper plasmid. The helper plasmid is not packaged in significant amounts due to a lack of ITR sequences. Contamination with adenovirus can be reduced by, e.g., heat treatment to which adenovirus is more sensitive than AAV.

[0163] In many gene therapy applications, it is desirable that the gene therapy vector be delivered with a high degree of specificity to a particular tissue type. A viral vector is typically modified to have specificity for a given cell type by expressing a ligand as a fusion protein with a viral coat protein on the viruses outer surface. The ligand is chosen to have affinity for a receptor known to be present on the cell type of interest. For example, Han et al., 1995, reported that Moloney murine leukemia virus can be modified to express human heregulin fused to gp70, and the recombinant virus infects certain human breast cancer cells expressing human epidermal growth factor receptor. This principle can be extended to other pairs of viruses expressing a ligand fusion protein and target cells expressing a receptor. For example, filamentous phage can be engineered to display antibody fragments (e.g., Fab or Fv) having specific binding affinity for virtually any chosen cellular receptor. Although the above description applies primarily to viral vectors, the same principles can be applied to nonviral vectors. Such vectors can be engineered to contain specific uptake sequences thought to favor uptake by specific target cells.

[0164] Gene therapy vectors can be delivered in vivo by administration to an individual patient, typically by systemic administration (e.g., intravenous, intraperitoneal, intramuscular, subdermal, or intracranial infusion) or topical application. Alternatively, vectors can be delivered to cells ex vivo, such as cells explanted from an individual patient (e.g., lymphocytes, bone marrow aspirates, and tissue biopsy) or universal donor hematopoietic stem cells, followed by reimplantation of the cells into a patient, usually after selection for cells which have incorporated the vector.

[0165] Ex vivo cell transfection for diagnostics, research, or for gene therapy (e.g., via re-infusion of the transfected cells into the host organism) is well known to those of skill in the art. In a preferred embodiment, cells are isolated from the subject organism, transfected with a nucleic acid (gene or cDNA), and re-infused back into the subject organism (e.g., patient). Various cell types suitable for ex vivo transfection are well known to those of skill in the art (see, e.g., Freshney et al., 1994; and the references cited therein for a discussion of how to isolate and culture cells from patients).

[0166] In one embodiment, stem cells are used in ex vivo procedures for cell transfection and gene therapy. The advantage to using stem cells is that they can be differentiated into other cell types in vitro, or can be introduced into a mammal (such as the donor of the cells) where they will engraft in the bone marrow. Methods for differentiating CD34+ cells in vitro into clinically important immune cell types using cytokines such a GM-CSF, IFN-γ and TNF-α are known (see Inaba et al., 1992).

[0167] Stem cells are isolated for transduction and differentiation using known methods. For example, stem cells are isolated from bone marrow cells by panning the bone marrow cells with antibodies which bind unwanted cells, such as CD4+ and CD8+ (T cells), CD45+ (panB cells), GR-1 (granulocytes), and lad (differentiated antigen presenting cells).

[0168] Vectors (e.g., retroviruses, adenoviruses, liposomes, etc.) containing therapeutic nucleic acids can be also administered directly to the organism for transduction of cells in vivo. Alternatively, naked DNA can be administered.

[0169] Administration is by any of the routes normally used for introducing a molecule into ultimate contact with blood or tissue cells, as described above. The nucleic acids from Tables 2-4 are administered in any suitable manner, preferably with the pharmaceutically acceptable carriers described above. Suitable methods of administering such nucleic acids are available and well known to those of skill in the art, and, although more than one route can be used to administer a particular composition, a particular route can often provide a more immediate and more effective reaction than another route (see Samulski et al., 1989). The present invention is not limited to any method of administering such nucleic acids, but preferentially uses the methods described herein.

[0170] The present invention further provides other methods of treating SCHIZOPHRENIA disease such as administering to an individual having SCHIZOPHRENIA disease an effective amount of an agent that regulates the expression, activity or physical state of at least one gene from Tables 2-4. An “effective amount” of an agent is an amount that modulates a level of expression or activity of a gene from Tables 2-4, in a cell in the individual at least about 10%, at least about 20%, at least about 30%, at least about 40%, at least about 50%, at least about 60%, at least about 70%, at least about 80% or more, compared to a level of the respective gene from Tables 2-4 in a cell in the individual in the absence of the compound. The preventive or therapeutic agents of the present invention may be administered, either orally or parenterally, systemically or locally. For example, intravenous injection such as drip infusion, intramuscular injection, intraperitoneal injection, subcutaneous injection, suppositories, intestinal lavage, oral enteric coated tablets, and the like can be selected, and the method of administration may be chosen, as appropriate, depending on the age and the conditions of the patient. The effective dosage is chosen from the range of 0.01 mg to 100 mg per kg of body weight per administration. Alternatively, the dosage in the range of 1 to 1000 mg, preferably 5 to 50 mg per patient may be chosen. The therapeutic efficacy of the treatment may be monitored by observing various parts of the reproductive system and other body parts, or any other monitoring methods known in the art. Other ways of monitoring efficacy can be, but are not limited to monitoring paranoia, depression, hallucinations, or any other SCHIZOPHRENIA related symptom.

[0171] The present invention further provides a method of treating an individual clinically diagnosed with SCHIZOPHRENIAs' disease. The methods generally comprises analyzing a biological sample that includes a cell, in some cases, a cell, from an individual clinically diagnosed with SCHIZOPHRENIA disease for the presence of modified levels of expression of at least 1 gene, at least 10 genes, at least 50 genes, at least 100 genes, or at least 200 genes from Tables 2-4. A treatment plan that is most effective for individuals clinically diagnosed as having a condition associated with SCHIZOPHRENIA disease is then selected on the basis of the detected expression of such genes in a cell. Treatment may include administering a composition that includes an agent that modulates the expression or activity of a protein from Tables 2-4 in the cell. Information obtained as described in the methods above can also be used to predict the response of the individual to a particular agent. Thus, the invention further provides a method for predicting a patient's likelihood to respond to a drug treatment for a condition associated with SCHIZOPHRENIA disease, comprising determining whether modified levels of a gene from Tables 2-4 is present in a cell, wherein the presence of protein is predictive of the patient's likelihood to respond to a drug treatment for the condition. Examples of the prevention or improvement of symptoms accompanied by SCHIZOPHRENIA disease that can monitored for effectiveness include prevention or improvement of paranoia, depression, hallucinations, or any other SCHIZOPHRENIA related symptom.

[0172] The invention also provides a method of predicting a response to therapy in a subject having SCHIZOPHRENIA disease by determining the presence or absence in the subject of one or more markers associated with SCHIZOPHRENIA disease described in Tables 5-35, diagnosing the subject in which the one or more markers are present as having SCHIZOPHRENIA disease, and predicting a response to a therapy based on the diagnosis e.g., response to therapy may include an efficacious response and/or one or more adverse events. The invention also provides a method of optimizing therapy in a subject having SCHIZOPHRENIA disease by determining the presence or absence in the subject of one or more markers associated with a clinical subtype of SCHIZOPHRENIA disease, diagnosing the subject in which the one or more markers are present as having a particular clinical subtype of SCHIZOPHRENIA disease, and treating the subject having a particular clinical subtype of SCHIZOPHRENIA disease based on the diagnosis. As an example, treatment for the paranoia, depression, hallucinations or any other symptoms from any subtypes of SCHIZOPHRENIA.

[0173] Thus, while there are a number of available treatments to relieve the symptoms of SCHIZOPHRENIA, they all are accompanied by various side effects, high costs, and long complicated treatment protocols, which are often not available and effective in a large number of individuals. Symptoms also often come back shortly after treatments are stopped. Accordingly, there remains a need in the art for more effective and otherwise improved methods for diagnosing, treating and preventing SCHIZOPHRENIA. Thus, there is a continuing need in the medical arts for genetic markers of SCHIZOPHRENIA disease and guidance for the use of such markers. The present invention fulfills this need and provides further related advantages.

### EXAMPLES

### Example 1

### Identification of Cases and Controls

[0174] All individuals were sampled from the Quebec founder population (QFP). Membership in the founder population was defined as having four grandparents of the affected child having French Canadian family names and being born in the Province of Quebec, Canada or in adjacent areas of the Provinces of New Brunswick and Ontario or in New England or New York State. The Quebec founder population is expected to have two distinct advantages over general populations for LD mapping: 1) increased LD resulting from a limited number of generations since the founding of the population and 2) increased genetic alleic homogeneity because of the restricted number of founders (estited 2600 effective founders, Charbonneau et al., 1987). Reduced allelic heterogeneity will act to increase relative risk imparted by the remaining alleles and so increase the power of case/control studies to detect genes and gene alleles involved in complex disorders within the Quebec population. The specific combination of age in generations, optimal number of founders and large present population size makes the QFP optimal for LD-based gene mapping.

[0175] All enrolled QFP subjects (patients and controls) provided a 20 ml blood sample (2 barcoded tubes of 10 ml). Following centrifugation, the buffy coat containing the white blood cells was isolated from each tube. Genomic DNA was extracted from the buffy coat from one of the tubes, and stored at 4° C. until required for genotyping. DNA extraction was performed with a commercial kit using a guanidine hydrochloride based method (FlexiGene, Qiagen) according to the manufacturer's instructions. The extraction method yielded high molecular weight DNA, and the quality of every DNA sample was verified by agarose gel electrophoresis. Genomic DNA appeared on the gel as a large band of very high molecular weight. The remaining two buffy coats were stored at −80° C. as backups.

[0176] The QFP samples were collected as cases and controls consisting of Schizophrenia disease subjects and controls. 516 cases and 516 controls were used for the analysis reported here. The cases had a clinicians based diagnosis.

### Example 2

### Genome Wide Association

[0177] Genotyping was performed using the QLDM-Max SNP map using Illumina's Infinium-II technology Single Sample Beadchips. The QLDM-Max map contains 374,187 SNPs. The SNPs are contained in the Illumina HumanHap-300 arrays plus two custom SNP sets of approximately 30,000 markers each. The HumanHap-300 chip includes 317,503 tag SNPs derived from the Phase I HapMap data. The additional (approx.) 60,000 SNPs were selected by to optimize the density of the marker map across the genome matching the LD pattern in the Quebec Founder Population, as established from previous studies at Genizon, and to fill gaps in the Illumina HumanHap-300 map. The SNPs were genotyped on the 516 cases and 516 controls for a total of ˜386,160,484 genotypes.

[0178] The genotyping information was entered into a Unified Genotype Database (a proprietary database under development) from which it was accessed using custom-built programs for export to the genetic analysis pipeline. Analyses of these genotypes were performed with the statistical tools described in Example 3. The GWS and the different analyses permitted the identification of candidate chromosomal regions linked to Schizophrenia disease (Table 1).

### Example 3

### Genetic Analysis

[0179] 1. Dataset Quality Assessment

[0180] Prior to performing any analysis, the sample was examined to ascertain that no subjects were related more closely than 5 meiotic steps.

[0181] The data were then subjected to a cleaning step. The program, DataStats was used to calculate the following statistics per marker or per <individual>:
[0182] Minor allele frequency (MAF) for each marker
[0183] Number of markers with MAF <5%, <4%, <3%, <2%, <1%
[0184] Number of missing values for each marker and individual
[0185] Monomorphic markers
[0186] Departure from Hardy-Weinberg equilibrium within control individuals for each marker
[0187] The following acceptance criteria were required for further analysis:
   [0188] Missing values per marker or individual <1%
   [0189] Minor allele frequency per marker ≧4%,
   [0190] Allele frequencies for controls in Hardy-Weinberg equilibrium
[0191] Markers and individuals not meeting criteria were removed from the dataset using DataPullPC. If a case or a control was removed by the cleaning process, its region and gender matched case or control were also removed from the analysis.

[0192] 2. Phase Determination

[0193] Haplotypes will were estimated from the case/control genotype data using ggplem a modified version of the PL-EM algorithm. The programs geno2patctr and tagger determined case and control genotypes and prepared the data in the input format for PL-EM. An EM algorithm module consisting of several applications was used to resolve phase ambiguities. PLEMPre first recoded the genotypes for input into the PL-EM algorithm, which used an 11-marker sliding block for haplotype estimation and deposited the constructed haplotypes into a file, happatctr which was the input file for haplotype association analysis performed by the program, LDSTATS.

[0194] The program GeneWriter was used to create a case-control genotype file, genopatctr, which was the input for the program, SINGLETYPE, which was used to perform single marker case-control association analysis.

[0195] 3. Haplotype Association Analysis

[0196] Haplotype association analysis was performed using the program LDSTATS. LDSTATS tests for association of haplotypes with the disease phenotype. The algorithms LDSTATS (v2.0) and LDSTATS (v4.0) define haplotypes using multi-marker windows that advance across the marker map in one-marker increments. Windows of size 1, 3, 5, 7, and 9 were analyzed. At each position the frequency of haplotypes in cases and controls was determined and a chi-square statistic was calculated from case control frequency tables. For LDSTATS v2.0, the significance of the chi-square for single marker and 3-marker windows was calculated as Pearson's chi-square with degrees of freedom. Larger windows of multi-allelic haplotype association were tested using Smith's normalization of the square root of Pearson's Chi-square.

[0197] LDSTATS v4.0 calculates significance of chi-square values using a permutation test in which case-control status is randomly permuted until 350 permuted chi-square values are observed that are greater than or equal to chi-square value of the actual data. The P value is then calculated as 350/the number of permutations required.

[0198] Tables 5-35 lists the results for association analysis using LDSTATs (v2.0 and v4.0) for the candidate regions described in Table 1 based on the genome wide scan genotype data for the full cohort QFP cases and controls. For each one of these regions, we report in Tables 5-35 the allele frequencies and the relative risk (RR) for the haplotypes contributing to the best signal at each SNP in the region.

[0199] 4. Singletype Analysis The program SINGLETYPE was used to calculate both allelic and genotype association for each single marker, one at a time using the genotype data in the file, genopatctr as input. Allelic association was tested using a 2×2 contingency table comparing allele 1 in cases and controls and allele 2 in cases and controls and genotype association was tested using a 2×3 contingency table comparing genotype 11 in cases and controls, genotype 12 in cases and controls and genotype 22 in cases and controls. SINGLETYPE was also used to test dominant and recessive models (11 and 12 genotypes combined vs. 22; or 22 and 12 genotypes combined vs. 11).

[0200] 5. Conditional Analyses

[0201] Conditional analyses were performed on subsets of the original set of 486 cases using the program LDSTATS (v2.0). The selection of a subset of cases and their matched controls was based on the carrier status of cases at a gene or locus of interest. We selected genes CIAS1 on chromosome 1, PTPRD on chromosome 9 and SPG3A on chromosome 14 based on our haplotype-based association findings using LDSTAT (v2.0). We selected genes WNT7A on chromosome 3 and PAFAH1B1 on chromosome 17, based on our single SNP-based association findings using LDSTAT (v2.0).

[0202] The most significant association in CIAS1, using build 36, was obtained with a haplotype window of size 7 containing SNPs corresponding to SEQ IDs 11974, 11975, 11976, 11977, 11978, 11979, 11980 (see Table below for conversion to the specific DNA alleles used). A reduced haplotype diversity was observed and we selected two sets of risk haplo-genotypes for conditional analyses. The first and more narrowly-defined risk set consisted of haplo-genotypes 1 2 1 1 2 2 2/1 2 1 1 2 2 2, 1 2 1 1 2 2 2/1 2 1 1 2 2 2, 2 2 1 1 2 2 2/1 1 1 1 1 1 1, 2 2 1 1 2 2 2/2 1 1 1 1 1 1, 2 2 1 1 2 2 2/2 2 2 2 1 1 1, 2 2 1 1 2 2 2/2 1 1 1 1 1 2, 2 1 1 1 1 1 1/2 2 2 2 1 1 1. The second set consisted of haplo-genotypes found in the first set augmented with 2 2 2 2 1 1 1/2 2 2 2 1 1 1, 1 1 1 1 1 1 1/2 1 1 1 1 1 1, 1 2 1 1 2 2 2/1 2 1 2 2 1 1, 2 1 1 1 1 1 1/2 1 1 1 1 1 2, 1 2 1 1 1 1 1/2 2 2 2 1 1 1, 1 2 1 2 2 1 1/2 2 1 1 2 2 2, 1 2 1 1 1 1 1/2 2 1 1 2 2 2, 1 1 2 2 1 1 1/2 2 2 2 1 1 1. Using the first risk set, we partitioned the cases into two groups; the first group consisting of those cases that were carrier of a risk haplo-genotype and the second group consisting of the remaining cases, the non-carriers. The resulting sample sizes were respectively 80 and 406. LDSTAT (v2.0) was run in each group and regions showing association with schizophrenia using single SNPs are reported in Table 5.1. Regions associated with schizophrenia in the group of non-carriers (CIAS1-1_cd_not) indicate the existence of risk factors acting independently of CIAS1 (Table 5.2). Using the larger risk set, we partitioned the cases into two groups; the first group consisting of those cases that were carrier of a risk haplo-genotype and the second group consisting of the remaining cases, the non-carriers. The resulting sample sizes were respectively 144 and 342. LDSTAT (v2.0) was run in each group and regions showing association with schizophrenia using haplotypes or using single SNP are reported in Tables 15.1 and 29.1. Regions associated with schizophrenia in the group of carriers (CIAS1-1_cr2_has) indicate the presence of an epistatic interaction between risk factors in those regions and risk factors in CIAS1 (Table 15.2). Regions associated with schizophrenia in the group of non-carriers (CIAS1-1_cr2_not) indicate the existence of risk factors acting independently of CIAS1 (Table 29.2)

[0203] A second conditional analysis was performed using gene PTPRD on chromosome 9. The most significant association in PTPRD, using build 36, was obtained with a haplotype window of size 5 containing SNPs corresponding to SEQ IDs 15579, 15580, 15581, 15582, 15583 (see Table below for conversion to the specific DNA alleles used). A reduced haplotype diversity was observed and we selected two sets of risk haplo-genotypes and a set of protective haplotypes for conditional analyses. The first risk set consisted of haplo-genotype 2 1 1 2 1/2 1 1 2 1 while the second set consisted of haplotype 2 1 1 2 1, excluding heterozygote haplo-genotypes 2 1 1 2 1/2 2 1 1 1, 2 1 1 2 1/2 1 2 2 2 and 2 1 1 2 1/2 1 1 1 1 due to dominance considerations. The protective set consisted of haplo-genotypes 2 1 1 2 1/2 1 2 2 2, 2 2 1 1 1/2 2 1 1 1, 2 2 1 1 1/2 1 2 2 2, 2 2 1 1 1/2 1 1 1 1, 2 2 1 1 1/2 1 1 2 2, 2 2 1 1 1/1 1 1 1 1 and 2 1 2 2 2/2 1 2 2 2. Using the first risk set, we partitioned the cases into two groups; the first group consisting of those cases that were carrier of a risk haplo-genotype and the second group consisting of the remaining cases, the non-carriers. The resulting sample sizes were respectively 155 and 331. LDSTAT (v2.0) was run in each group and regions showing association with schizoprenia using single SNPs are reported in Table 34.1 for the group of carriers and in Table 33.1 for the group of non-carriers using all haplotypes. Regions associated with schizophrenia in the group of carriers (PTPRD-1_cd_has) indicate the presence of an epistatic interaction between risk factors in those regions and risk factors in PTPRD (Table 34.2). Regions associated with schizophrenia in the group of non-carriers (PTPRD-1_cr1_not) indicate the existence of risk factors acting independently of PTPRD (Table 33.2). Using the second risk set, we partitioned the cases into two groups; the first group consisting of those cases that were carrier of a risk haplo-genotype and the second group consisting of the remaining cases, the non-carriers. The resulting sample sizes were respectively 250 and 236. LDSTAT (v2.0) was run in each group and regions showing association with schizoprenia using single SNPs are reported in Table 35.1 for the group of carriers and in Table 6.1 for the group of non-carriers using all haplotypes. Regions associated with schizophrenia in the group of carriers (PTPRD-1_cr2_has) indicate the presence of an epistatic interaction between risk factors in those regions and risk factors in PTPRD (Table 35.2). Regions associated with schizophrenia in the group of non-carriers (PTPRD-1_cr2_not) indicate the existence of risk factors acting independently of PTPRD (Table6.2). Using the protective set, we partitioned the cases into two groups; the first group consisting of those cases that were carrier of a risk haplo-genotype and the second group consisting of the remaining cases, the non-carriers. The resulting sample sizes were respectively 96 and 390. LDSTAT (v2.0) was run in each group and regions showing association with schizoprenia using single SNPs and all haplotypes are reported in Table 32.2 for the group of carriers and in Table 31.1 for the group of non-carriers using single SNPs. Regions associated with schizophrenia in the group of carriers (PTPRD-1_cp_has) indicate the existence of risk factors acting independently of PTPRD (Table 32.3). Regions associated with schizophrenia in the group of non-carriers (PTPRD-1_cp_not) indicate the presence of an epistatic interaction between risk factors in those regions and risk factors in PTPRD (Table 31.2).

[0204] A third conditional analysis was performed using gene SPG3A on chromosome 14. The most significant association in SPG3A, using build 36, was obtained with a haplotype window of size 9 containing SNPs corresponding to SEQ IDs 17338, 17339, 17340, 17341, 17342, 17343, 17344, 17345, 17346 (see Table below for conversion to the specific DNA alleles used). A reduced haplotype diversity was observed and we selected a set of risk haplo-genotypes and a set of protective haplotypes for conditional analyses. The risk set consisted of haplotypes 2 1 2 1 1 2 2 1 1, 1 2 2 2 1 2 1 2 1, 2 1 1 2 1 1 1 1 2, 2 1 1 2 1 1 1 2 1, 2 1 2 1 2 2 1 1 2, 2 1 1 2 1 1 2 1 1 and 2 1 2 1 1 2 1 1 1, excluding, due to dominance considerations, haplo-genotypes containing allele 2 1 1 2 1 1 1 2 1 with alleles 2 1 2 1 1 1 1 2 1, 2 1 2 1 1 2 1 1 2, 2 1 1 1 1 1 1 2 1, 1 2 2 2 1 2 2 1 1 or 2 1 1 1 1 1 1 1 2, and haplo-genotypes containing allele 2 1 2 1 2 2 1 1 2 with alleles 2 1 2 1 1 1 1 2 1, 2 1 2 1 1 2 1 1 2 or 1 2 2 2 1 2 2 1 1. The protective set consisted of haplo-genotypes 2 1 2 1 1 1 1 2 1/2 1 2 1 1 1 1 2 1, 2 1 2 1 1 1 1 2 1/2 1 2 1 2 2 1 1 2, 2 1 2 1 1 1 1 2 1/2 1 1 1 1 1 1 2 1, 2 1 2 1 1 1 1 2 1/2 1 1 1 1 1 1 1 2, 2 1 2 1 1 2 1 1 2/2 1 1 2 1 1 1 2 1, 2 1 1 2 1 1 1 2 1/2 1 1 1 1 1 1 2 1 and 2 1 1 2 1 1 1 2 1/1 2 2 2 1 2 2 1 1. Using the risk set, we partitioned the cases into two groups; the first group consisting of those cases that were carrier of a risk haplo-genotype and the second group consisting of the remaining cases, the non-carriers. The resulting sample sizes were respectively 134 and 352. LDSTAT (v2.0) was run in each group and regions showing association with schizophrenia using all haplotypes in Table 9.2. Regions associated with schizophrenia in the group of non-carriers (SPG3A-1_cr_not) indicate the existence of risk factors acting independently of SPG3A (Table 9.4). Using the protective set, we partitioned the cases into two groups; the first group consisting of those cases that were carrier of a risk haplo-genotype and the second group consisting of the remaining cases, the non-carriers. The resulting sample sizes were respectively 99 and 387. LDSTAT (v2.0) was run in each group and regions showing association with schizoprenia are reported in Table 8.1 for the group of carriers and in Table 7.1 for the group of non-carriers using single SNPs and all haplotypes. Regions associated with schizophrenia in the group of carriers (SPG3A-1_cp_has) indicate the existence of risk factors acting independently of SPG3A (Table 8.2). Regions associated with schizophrenia in the group of non-carriers (SPG3A-1_cp_not) indicate the presence of an epistatic interaction between risk factors in those regions and risk factors in SPG3A (Table 7.2).

[0205] A fourth conditional analysis was performed using gene WNT7A on chromosome 3. The most significant association signal based on single SNPs in WNT7A, using build 36, was obtained with a SNP corresponding to SEQ ID 12686 (see Table below for conversion to the specific DNA alleles used). We selected a risk allele for conditional analyses. The set consisted of allele 2. Using this risk set, we partitioned the cases into two groups; the first group consisting of those cases that were carrier of a risk allele and the second group consisting of the remaining cases, the non-carriers. The resulting sample sizes were respectively 314 and 172. LDSTAT (v2.0) was run in each group and regions showing association with schizophrenia using single SNPs are reported in Table 26.1 for the group of carriers and in Table 30.1 for the group of non-carriers using all haplotypes. Regions associated with schizophrenia in the group of carriers (WNT7A-1_cr_has) indicate the presence of an epistatic interaction between risk factors in the region and risk factors in WNT7A (Table 26.2). Regions associated with schizophrenia in the group of non-carriers (WNT7A-1_cr_not) indicate the existence of risk factors acting independently of WNT7A (Table 30.2).

[0206] A fifth conditional analysis was performed using gene PAFAH1B1 on chromosome 17. The most significant association signal based on single SNPs in PAFAH1B1, using build 36, was obtained with a SNP corresponding to SEQ ID 18108 (see Table below for conversion to the specific DNA alleles used). We selected a risk genotype for conditional analyses. The set consisted of genotype 1/1. Using this risk set, we partitioned the cases into two groups; the first group consisting of those cases that were carrier of a risk allele and the second group consisting of the remaining cases, the non-carriers. The resulting sample sizes were respectively 319 and 167. LDSTAT (v2.0) was run in each group and regions showing association with schizoprenia using single SNPs are reported in Table 10.1 for the group of carriers and in Table 11.1 for the group of non-carriers using all haplotypes. Regions associated with schizophrenia in the group of carriers (PAFAH1B1-1_cr_has) indicate the presence of an epistatic interaction between risk factors in the region and risk factors in PAFAH1B1 (Table 10.2). Regions associated with schizophrenia in the group of non-carriers (PAFAH1B1-1_cr_not) indicates the existence of risk factors acting independently of PAFAH1B1 (Table 11.2).

[0207] Other conditional analyses were performed on subsets of the original set of 357 schizophrenic cases with paranoia using the program LDSTATS (v2.0). The selection of a subset of cases and their matched controls was based on the carrier status of cases at NRG1 on chromosome 8. The most significant association in NRG1, for the paranoid subset, was obtained with a haplotype window of size 5 containing SNPs corresponding to SEQ IDs 15139, 15140, 15141, 15142, 15143 (see Table below for conversion to the specific DNA alleles used). A reduced haplotype diversity was observed and we selected two sets of risk and two sets of protective haplo-genotypes for conditional analyses. The first and more narrowly-defined risk set consisted of haplo-genotypes 2 1 1 2 1/2 1 2 1 2, 2 1 1 2 1/1 2 2 1 1, 2 1 2 1 2/1 2 2 1 1, 2 1 2 2 2/1 2 2 1 1. The second set consisted of haplo-genotypes 2 1 2 1 2/1 2 2 1 1, 2 1 2 2 2/1 2 2 1 1 and haplotype 2 1 1 2 1, excluding, due to dominance considerations, heterozygote with haplotypes 2 1 2 1 1, 2 1 2 2 2, 2 2 2 1 2 or 2 1 2 2 1. Using the first risk set, we partitioned the cases into two groups; the first group consisting of those cases that were carrier of a risk haplo-genotype and the second group consisting of the remaining cases, the non-carriers. The resulting sample sizes were respectively 177 and 180. LDSTAT (v2.0) was run in each group and regions showing association with schizophrenia are reported in Tables 18.2 and 19.2. Regions associated with schizophrenia in the group of carriers (NRG1-1_cr1_has) indicate the presence of an epistatic interaction between risk factors in those regions and risk factors in NRG1 (Table 18.3). Regions associated with schizophrenia in the group of non-carriers (NRG1-1_crl_not) indicate the existence of risk factors acting independently of NRG1 (Table 19.3). Using the larger risk set, we partitioned the cases into two groups; the first group consisting of those cases that were carrier of a risk haplo-genotype and the second group consisting of the remaining cases, the non-carriers. The resulting sample sizes were respectively 214 and 143. LDSTAT (v2.0) was run in each group and regions showing association with schizophrenia are reported in Tables 20.2 and 21.1. Regions associated with schizophrenia in the group of carriers (NRG1-1_cr2_has) indicate the presence of an epistatic interaction between risk factors in those regions and risk factors in NRG1 (Table 20.3) while regions associated with schizophrenia in the group of non-carriers (NRG1-1_cr2_not) indicate the existence of risk factors acting independently of NRG1 (Table 21.2). The first and more narrowly-defined protective set consisted of haplo-genotypes 2 1 2 1 1/1 2 2 1 1, 1 2 2 1 1/1 2 2 1 1 and 1 2 2 1 1/2 2 2 1 2. The second protective set consisted of haplo-genotypes 1 2 2 1 1/1 2 2 1 1, 1 2 2 1 1/2 2 2 1 2, 1 2 2 1 1/1 2 2 2 2 and haplotype 2 1 2 1 1 excluding heterozygotes with haplotype 2 1 2 1 2. Using the first protective set, we partitioned the cases into two groups; the first group consisting of those cases that were carrier of a protective haplo-genotype and the second group consisting of the remaining cases, the non-carriers. The resulting sample sizes were respectively 103 and 254. LDSTAT (v2.0) was run in each group and regions showing association with schizophrenia are reported in Tables 14.1 and 16.2. Regions associated with schizophrenia in the group of carriers (NRG1-1_cp1_has) indicate the existence of risk factors acting independently of NRG1 (Table 14.2). Regions associated with schizophrenia in the group of non-carriers (NRG1-1_cp1_not) indicate the presence of an epistatic interaction between risk factors in those regions and risk factors in NRG1 (Table 16.3). Using the larger risk set, we partitioned the cases into two groups; the first group consisting of those cases that were carrier of a risk haplo-genotype and the second group consisting of the remaining cases, the non-carriers. The resulting sample sizes were respectively 122 and 235. LDSTAT (v2.0) was run in each group and regions showing association with schizophrenia are reported in Tables 17.2. Regions associated with schizophrenia in the group of non-carriers (NRG1-1_cp2_not) indicate the presence of an epistatic interaction between risk factors in those regions and risk factors in NRG1 (Table 17.3).

[0208] For each region that was associated with schizophrenia in the conditional analyses, we report the allele frequency and the relative risk (RR) for each SNP in the region. For a given SNP, the association with schizophrenia was evaluated with a Chi-Square test by comparing the allele frequency in the cases with the allele frequency in the controls. For a given SNP, the association with schizophrenia was evaluated with a Chi-Square test by comparing the allele frequency in the cases with the allele frequency in the controls. Alleles with a relative risk greater than one increase the risk of developing schizophrenia while alleles with a relative risk less than one are protective and decrease the risk.

DNA alleles used in haplotypes (CIAS1)

| SeqID | 11974 | 11975 | 11976 | 11977 | 11978 | 11979 | 11980 |
|---|---|---|---|---|---|---|---|
| Position | 245602706 | 245603769 | 245604311 | 245606936 | 245608675 | 245618707 | 245619172 |
| Alleles | T\|C | T\|G | T\|G | A\|G | T\|C | | |
| 1111111 | T | T | T | A | T | T | T |
| 1122111 | T | T | G | G | T | T | T |
| 1211111 | T | G | T | A | T | T | T |
| 1211222 | T | G | T | A | C | C | C |
| 1212211 | T | G | T | G | C | T | T |
| 2111111 | C | T | T | A | T | T | T |
| 2111112 | C | T | T | A | T | T | C |
| 2211222 | C | G | T | A | C | C | C |
| 2222111 | C | G | G | G | T | T | T |

DNA alleles used in haplotypes (PTPRD)

| SeqID | 15579 | 15580 | 15581 | 15582 | 15583 |
|---|---|---|---|---|---|
| Position | 8464233 | 8465677 | 8467093 | 8469185 | 8470144 |
| Alleles | T\|C | T\|C | A\|C | A\|G | T\|C |
| 11111 | T | T | A | A | T |
| 21111 | C | T | A | A | T |
| 21121 | C | T | A | G | T |
| 21122 | C | T | A | G | C |
| 21222 | C | T | C | G | C |
| 22111 | C | C | A | A | T |

DNA alleles used in haplotypes (SPG3)

| SeqID | 17338 | 17339 | 17340 | 17341 | 17342 | 17343 | 17344 | 17345 | 17346 |
|---|---|---|---|---|---|---|---|---|---|
| Position | 50069943 | 50099463 | 50122718 | 50139753 | 50156137 | 50162892 | 50181639 | 50191450 | 50193977 |
| Alleles | T\|C | A\|G | T\|G | T\|C | A\|G | A\|G | A\|G | A\|G | T\|C |
| 122212121 | T | G | G | C | A | G | A | G | T |
| 122212211 | T | G | G | C | A | G | G | A | T |
| 211111112 | C | A | T | T | A | A | A | A | C |
| 211111121 | C | A | T | T | A | A | A | G | T |
| 211211112 | C | A | T | C | A | A | A | A | C |
| 211211121 | C | A | T | C | A | A | A | G | T |
| 211211211 | C | A | T | C | A | A | G | A | T |
| 212111121 | C | A | G | T | A | A | A | G | T |
| 212112111 | C | A | G | T | A | G | A | A | T |
| 212112112 | C | A | G | T | A | G | A | A | C |
| 212112211 | C | A | G | T | A | G | G | A | T |
| 212122112 | C | A | G | T | G | G | A | A | C |

DNA alleles used in haplotypes (WNT7A)

| SeqID | 12686 |
|---|---|
| Position | 13905134 |
| Alleles | A\|C |
| 1 | A |
| 2 | C |

DNA alleles used in haplotypes (PAFAH1B1)

| SeqID | 18108 |
|---|---|
| Position | 2414919 |
| Alleles | A\|C |
| 1 | A |
| 2 | C |

DNA alleles used in haplotypes (NRG1)

| SeqID | 15139 | 15140 | 15141 | 15142 | 15143 |
|---|---|---|---|---|---|
| Position | 32216518 | 32217872 | 32223600 | 32234798 | 32236954 |
| Alleles | T\|G | A\|C | A\|G | A\|G | T\|C |
| 12211 | T | C | G | A | T |
| 21121 | G | A | A | 6 | T |
| 21211 | G | A | G | A | T |
| 21212 | G | A | G | A | C |
| 21221 | G | A | G | G | T |
| 21222 | G | A | G | G | C |
| 22212 | G | C | G | A | C |
| 12222 | T | C | G | G | C |

[0209] 6. Phenotype Analyses

[0210] The choice of phenotype for complex diseases, such as schizophrenia, can have a large impact on the success of gene discovery. It is quite possible that some genes affect only highly specific forms of a disease. It may be possible to discover specific genes which are obscured within the entire data set through the analysis of specific homogeneous sub-types of the disease. For this purpose we subdivided the entire sample into the following sub-phenotypes:

| Subphenotype | number of case/controls |
|---|---|
| Male cases | 349/349 |
| Female cases | 167/167 |
| Male cases with age of onset <20 years | 118/118 |
| Male cases with age of onset ≧20 years | 231/231 |
| Female cases with age of onset <25 years | 86/86 |
| Female cases with age of onset ≧25 years | 80/80 |
| Paranoid DSM-IV subtype | 380/380 |

[0211] A separate whole genome association study WGAS was performed on each sub-phenotype. Genome wide significance of results for each phenotype was tested by two types of permutation. In the first method, case and control status for each pair of cases and controls was randomly permuted. This tests the genome wide significance of the results for the subphenotype analysis. In the second method, subsets of the appropriate size were randomly selected from the entire data set. This tests whether the specific sub-phenotype gives results that are significantly distinct from the analysis of the entire data set.

### Example 4

### Gene Identification and Characterization

[0212] A series of gene characterization was performed for each candidate region described in Table 1. Any gene or EST mapping to the interval based on public map data or proprietary map data was considered as a candidate SCHIZOPHRENIA disease gene. The approach used to identify all genes located in the critical regions is described below.

[0213] Public Gene Mining

[0214] Once regions were identified using the analyses described above, a series of public data mining efforts were undertaken, with the aim of identifying all genes located within the critical intervals as well as their respective structural elements (i.e., promoters and other regulatory elements, UTRs, exons and splice sites). The initial analysis relied on annotation information stored in public databases (e.g. NCBI, UCSC Genome Bioinformatics, Entrez Human Genome Browser, OMIM—see below for database URL information). Tables 2-4 lists the genes that have been mapped to the candidate regions.

[0215] For some genes the available public annotation was extensive, whereas for others very little was known about a gene's function. Customized analysis was therefore performed to characterize genes that corresponded to this latter class. Importantly, the presence of rare splice variants and artifactual ESTs was carefully evaluated. Subsequent cluster analysis of novel ESTs provided an indication of additional gene content in some cases. The resulting clusters were graphically displayed against the genomic sequence, providing indications of separate clusters that may contribute to the same gene, thereby facilitating development of confirmatory experiments in the laboratory. While much of this information was available in the public domain, the customized analysis performed revealed additional information not immediately apparent from the public genome browsers.

[0216] A unique consensus sequence was constructed for each splice variant and a trained reviewer assessed each alignment. This assessment included examination of all putative splice junctions for consensus splice donor/acceptor sequences, putative start codons, consensus Kozak sequences and upstream in-frame stops, and the location of polyadenylation signals. In addition, conserved noncoding sequences (CNSs) that could potentially be involved in regulatory functions were included as important information for each gene. The genomic reference and exon sequences were then archived for future reference. A master assembly that included all splice variants, exons and the genomic structure was used in subsequent analyses (i.e., analysis of polymorphisms). Table 3 lists gene clusters based on the publicly available EST and cDNA clustering algorithm, ECGene.

[0217] An important component of these efforts was the ability to visualize and store the results of the data mining efforts. A customized version of the highly versatile genome browser GBrowse (http://www.gmod.org/) was implemented in order to permit the visualization of several types of information against the corresponding genomic sequence. In addition, the results of the statistical analyses were plotted against the genomic interval, thereby greatly facilitating focused analysis of gene content.

[0218] Computational Analysis of Genes and GeneMap

[0219] In order to assist in the prioritization of candidate genes for which minimal annotation existed, a series of computational analyses were performed that included basic BLAST searches and alignments to identify related genes. In some cases this provided an indication of potential function. In addition, protein domains and motifs were identified that further assisted in the understanding of potential function, as well as predicted cellular localization.

[0220] A comprehensive review of the public literature was also performed in order to facilitate identification of information regarding the potential role of candidate genes in the pathophysiology of SCHIZOPHRENIA disease. In addition to the standard review of the literature, public resources (Medline and other online databases) were also mined for information regarding the involvement of candidate genes in specific signaling pathways. A variety of pathway and yeast two hybrid databases were mined for information regarding protein-protein interactions. These included BIND, MINT, DIP, Interdom, and Reactome, among others. By identifying homologues of genes in the SCHIZOPHRENIA candidate regions and exploring whether interacting proteins had been identified already, knowledge regarding the GeneMaps for SCHIZOPHRENIA disease was advanced. The pathway information gained from the use of these resources was also integrated with the literature review efforts, as described above.

[0221] Expression Studies

[0222] In order to determine the expression patterns for genes, relevant information was first extracted from public databases. The UniGene database, for example, contains information regarding the tissue source for ESTs and cDNAs contributing to individual clusters. This information was extracted and summarized to provide an indication in which tissues the gene was expressed. Particular emphasis was placed on annotating the tissue source for bona fide ESTs, since many ESTs mapped to Unigene clusters are artifactual. In addition, SAGE and microarray data, also curated at NCB, (Gene Expression Omnibus), provided information on expression profiles for individual genes. Particular emphasis was placed on identifying genes that were expressed in tissues known to be involved in the pathophysiology of schizophrenia (i.e. Brain-related tissues). To complement available information about the expression pattern of candidate disease genes, differents experimental approaches were used. The first one was a RT-PCR based semi-quantitative gene expression profiling method that could be applied to a large number of target sequences (genes, transcripts, ESTs) over a panel of 24 selected tissues. In some cases, where unexpected secondary PCR products were observed in Brain-related tissues, the PCR products were separated by agarose-gel electrophorese, purified and their DNA sequences was determined. The second approach was to map expression sites of mouse transcripts orthologous to a small set of human disease candidate genes in the mouse embryo (day 10.5, 12.5 and 15.5), in the postnatal stages (day 1 and 10) and at adulthood using in situ hybridization (ISH) method.

[0223] a. Semi-Quantitative Gene Expression Profiling by RT-PCR

[0224] Total human RNA samples from 24 different tissues Total RNA sample were purchased from commercial sources (Clontech, Stratagene) and used as templates for first-strand cDNA synthesis with the High-Capacity cDNA Archive kit (Applied Biosystems) according to the manufacturer's instructions. A standard PCR protocol was used to amplify genes of interest from the original sample (50 ng cDNA); three serial dilutions of the cDNA samples corresponding to 5, 0.5 and 0.05 ng of cDNA were also tested. PCR products were separated by electrophoresis on a 96-well agarose gel containing ethidium bromide followed by UV imaging. The serial dilutions of the cDNA provided semi-quantitative determination of relative mRNA abundance. Tissue expression profiles were analyzed using standard gel imaging software (AlphaImager 2200); mRNA abundance was interpreted according to the presence of a PCR product in one or more of the cDNA sample dilutions used for amplification. For example, a PCR product present in all the cDNA dilutions (i.e. from 50 to 0.05 ng cDNA) was designated ++++ while a PCR product only detectable in the original undiluted cDNA sample (i.e., 50 ng cDNA) was designated as + or +/−, for barely detectable PCR products (see Table 37). For each target gene, one or more gene-specific primer pairs were designed to span at least one intron when possible. Multiple primer-pairs targeting the same gene allowed comparison of the tissue expression profiles and controlled for cases of poor amplification.

[0225] The presence of secondary PCR products were observed in brain-related tissues for gene BCAS1 when amplified with primers spanning between exon 7 (213pb, primer Seq ID: 19489) and exon 10 (66pb, primer Seq ID: 19488) suggesting alternative splicing variants. The DNA sequence determination of 3 isoforms (see Table 38a, Seq IDs: 19619, 19620 and 19621) confirmed that the major isoform in Brain lacks the 168pb exon 9.

[0226] The validation by DNA sequencing of the brain's specific EST HS.573649, when amplified with primers located in the first and third putatives exons (Seq IDs: 19603 and 19604), respectively, also revealed alternative splicing variants (Table 38b, Seq IDs: 19622, 19623, 19624 and 19625) with a major isoform bearing an extra 54 bp exon inserted between exon 1 and 2 (Seq ID: 19623).

[0227] b. In Situ Hybridization (ISH) Study

### General Procedure:

[0228] 4 genes, highlighted in the GWAS study, namely Kmo, Cadm3, Ptprd and Tmeff2 were selected for further characterization by ISH in mouse. For each gene, a fragment of the mouse ortholog cDNA was use for the synthesis of cRNA probes (Table 36). To maximally preserve the integrity of tissue in its environment, mouse whole-body sections were used (FIG. 1). Whole bodies were frozen cut into 10-μm sections. To complement the whole-body sections, tissue arrays including reproductive organs (RO), general tissue array (TA) and brain array (BA) were used (FIG. 1). Tissue slices were mounted on glass microscope slides, fixed in formaldehyde and hybridized with ³⁵S-labeled cRNA probes. Antisense cRNA generated positive signals whereas sense cRNA (identical to mRNAs) generated negative (control) signals. Prior to gene-specific ISH, the tissues were validated with riboprobes to LDL receptor mRNA (data not shown). Following ISH, gene expression patterns were analyzed by both x-ray film autoradiography and emulsion autoradiography with appropriate exposure times.

### Detailed Procedure:

[0229] Mouse cDNA Clone and DNA Templates Preparation

[0230] cDNA clones of mouse orthologs to human genes Kmo, Cadm3, Ptprd and Tmeff2 were obtained from commercial source (Open Biosystem). DNA fragments to be used as templates for the cRNA probes synthesis were amplified by PCR and cloned into pGEM-7Zf(+)/LIC-F (ATCC #87048). After sequence validation, the templates for the antisense cRNA probes synthesis were generated by PCR using forward primers located at the 5′ end of the cloned DNA fragments and a reverse primer located upstream of the SP6 polymerase promoter (in the vector). Similarly, the templates for the sense (control) cRNA probes synthesis were generated by PCR using a forward primer located upstream of the T7 promoter (in the vector) and reverse primers located at the 3′ end of the cloned DNA fragments.

cRNA Probe Preparation

[0231] cRNA transcripts were synthesized in vitro from linear DNA fragments by run-off transcription with the SP6 or T7 RNA Polymerase from their respective promoters. Cold probe synthesis proved that DNA templates are functional and, hence, applied to radioactive probe synthesis labeled with ³⁵S-UTP (>1,000 Ci/mmol; Amersham).

### Tissues Preparation.

[0232] Tissues were frozen-cut into 10-μm sections, mounted on gelatin-coated slides and stored at −80° C. Before ISH, they were fixed in 4% formaldehyde (freshly made from paraformaldehyde) in phosphate-buffered saline (PBS), treated with triethanolamine/acetic anhydride, washed and dehydrated with a series of ethanol.

### Hybridization and Washing Procedures.

[0233] Sections were hybridized overnight at 55° C. in 50% deionized formamide, 0.3 M NaCl, 20 mM Tris-HCl, pH 7.4, 5 mM EDTA, 10 nM NaPO4, 10% dextran sulfate, 1×Denhardt's, 50 μg/ml total yeast RNA, and 50-80,000 cpm/μl ³⁵S-labeled cRNA probe. The tissue was subjected to stringent washing at 65° C. in 50% formamide, 2×SSC, and 10 mM DTT, followed by washing in PBS before treatment with 20 μg/ml RNAse A at 37° C. for 30 minutes. After washes in 2×SSC and 0.1×SSC for 10 minutes at 37° C., the slides were dehydrated, apposed to X-ray film for 5 days, then dipped in Kodak NTB nuclear track emulsion, and exposed for 12 days in light-tight boxes with desiccant at 4° C.

### Imaging.

[0234] Photographic development was undertaken with Kodak D-19. The slides were lightly counterstained with cresyl violet and analyzed under both light- and darkfield optics. Sense control cRNA probes (identical to mRNAs) always gave background levels of the hybridization signal.

### Storage and Rehydration

[0235] “Crystallization” of any section could be repaired by allowing the coverslips to fall off after soaking in xylene for 24-48 hours. The slides were rehydrated to 70% EtOH and then re-dehydrated again in a series of ethanol (80%, 96% and 2×100% for 2 minutes each). After 3 changes with xylene, the coverslips were mounted with Cytoseal (VWR Scientific) or other comparable mounting medium. Using the same method, the coverslips were removed for histological staining to take brightfield micrographs. Histological stains that require acidic conditions could dissolve silver grains. Overstaining could obscure the silver grains. Any excess mounting medium or residual emulsion on the back of the slides was removed with a single-edged razor. The re-coverslipped slides were dried flat for 24 hours, and stored indefinitely at room temperature.

### Viewing Original Slides

[0236] The results are best viewed by darkfield illumination, with ×2.5, ×4, ×10, ×25 and 40× objectives; the silver grains can be localized over particular cells. The antisense probe detects mRNA, and the sense control probe shows the background level of silver grains for the experiments.

### Results:

### Kmo

[0237] Following ISH, Kmo gene expression patterns were analyzed by both x-ray film autoradiography and emulsion autoradiography with exposure times of 4 days and 12 days, respectively. Results are presented in Table Z1 and FIGS. 2 to 8.

[0238] Analysis of ISH results provide evidence of Kmo expression in the specialized regions of the embryonic, newborn, postnatal and adult mice. Undetectable on embryonic day 10.5, ISH signal was evident on day 12.5 in the rudimental liver, persisting there along further developmental stages. The highest level of expression was noted to occur in the adult liver. The Kmo gene was clearly expressed in the hepatocytes (FIG. 5). Starting from birth to the adult stages, Kmo expression was also evident in the spleen and kidney tissue. In the spleen, low-level labelling was spread out over the organ, including the red pulp and white pulp regions (FIG. 6). In addition to the spleen, Kmo mRNA was also detected in the lymph nodes (FIG. 5), emphasizing its role in the body immunosurveillance process. In the kidney, Kmo expression was limited to the cortex and outer medulla, where the proximal and distal tubules, but not glomerulli, were labelled (FIGS. 7 and 8).

[0239] Kmo gene expression is characterized by high tissue specificity displaying a restricted pattern of mRNA distribution, with a presence in the liver, lymphatic tissue and kidney cortex. The highest level of expression was noted in the adult liver hepatocytes, suggesting its role in the hepatic metabolic/catabolic function.

TABLE Z1
Detection of KMO mRNA in whole body sections from 3 different
mouse ontogeny stages, 2 postnatal stages and adulthood

| | Development | | | |
|---|---|---|---|---|
| # | Day | Stage | SCORE | Comments |
| 1 | e10.5 | Embryo, midgestation | − | — |
| 2 | e12.5 | Embryo, midgestation | + | Very low-level expression in the liver |
| 3 | e15.5 | Embryo, lategestation | ++ | Low-level expression in the liver |
| 4 | P1 | Newborn | ++ | Low-level expression in the liver |
| 5 | P10 | Postnatal | +++ | Medium-level expression in the liver |
| | | | | (+++), spleen (+) and kidney (+) |
| 6 | P56-77 | Adulthood | ++++ | High-level expression in the liver |
| | | | | (++++), spleen (+++) and kidney (++). |

Average labeling level:
− = not detectable;
+ = very weak;
++ = weak;
+++ = medium; and
++++ = high and
+++++ = very high GENE13 mRNA concentration.

### Cadm3

[0240] Following ISH, Cadm3 gene expression patterns were analyzed by both x-ray film autoradiography and emulsion autoradiography with exposure times of 3 days and 12 days, respectively. Results are presented in Tables Z2 and Z3 and FIGS. 9 to 15.

[0241] Analysis of ISH results provide evidence of Cadm3 expression in the central (CNS) and peripheral (PNS) nervous system of the embryonic, newborn, postnatal and adult mice. Light in e10.5 embryo, ISH signal increased significantly on day 12.5 and persisted elevated along further developmental stages. In the adult stage, when CNS architecture appears as fully developed, Cadm3 mRNA labelling was confined to grey matter clearly separated from unlabeled white matter. Labelled neurons displayed a widespread distribution in almost all CNS regions, showing Nissl-like pattern. Glial cells, ependymocytes, plexus choroids and endothelial cells in CNS appeared to be free of labelling. In the PNS, a presence of Cadm3 mRNA was noted in the cranial ganglia (trigeminal ganglion), dorsal root ganglia. During postnatal development, especially in p10 mice, there were labelled neurons in the intestinal wall, between smooth muscle fibres, forming a part of the plexus called plexus Auerbach. In the adult stage, Auerbach plexus appear to be free of labelling, suggesting by thus Cadm3 role of gut development rather than in adult intestine physiology.

[0242] Cadm3 gene expression is characterized by high tissue specificity displaying mRNA distribution pattern restricted to developing and adult CNS and PNS. The presence of Cadm3 mRNA specifically in the neuronal, but not glial cells suggests its neuronal function while its postnatal down-regulation in the plexus Auerbach suggests its role in the postnatal gut development.

TABLE Z2
Detection of CADM3 mRNA in whole body sections from 3
different mouse ontogeny stages, 2 postnatal stages and adulthood

| | Development | | | |
|---|---|---|---|---|
| # | Day | Stage | SCORE | Comments |
| 1 | e10.5 | Embryo, midgestation | + | Low-level expression in CNS and PNS |
| 2 | e12.5 | Embryo, midgestation | ++ | Medium-level expression in CNS and |
| | | | | PNS |
| 3 | e15.5 | Embryo, lategestation | ++++ | High-level expression in CNS and PNS |
| 4 | P1 | Newborn | +++++ | Very high-level expression in CNS and |
| | | | | PNS |
| 5 | P10 | Postnatal | +++++ | Very high-level expression in CNS and |
| | | | | PNS |
| 6 | P56-77 | Adulthood | +++++ | Very high-level expression in CNS and |
| | | | | PNS |

Average labelling level:
− = not detectable;
+ = very weak;
++ = weak;
+++ = medium; and
++++ = high and
+++++ = very high GENE15 mRNA concentration.

TABLE Z3
CADM3 mRNA tissue distribution in the adult mouse

| STRUCTURE | SCORE | COMMENTS |
|---|---|---|
| Section 1.01 Central nervous | +++++ | |
| system: | | |
| WHITE MATTER | − | |
| GREY MATTER | +++++ | |
| Cerebral cortex: | ++++ | |
| Neurons | ++++ | |
| Neuroblasts | ci | |
| Glial cells | − | |
| Circumventricular organs: | − | |
| Ependymocytes | − | |
| Tanycytes | − | |
| Choroid plexus | − | |
| Striatum: | ++ | |
| Hippocampus: | ++++ | |
| Hypothalamus: | ++ | |
| Thalamus: | ++ | |
| Epithalamus: | ++ | |
| Cerebellum: | +++ | |
| Medulla oblongata: | +++++ | |
| Spinal cord | +++ | |
| Section 1.02 Peripheral nervous | +++++ | |
| system: | | |
| Cranial ganglia: | +++++ | |
| Spinal ganglia: | +++++ | |
| Neurons | − | |
| Satelite cells | ne | |
| Paravertebral ganglia | ne | |
| Previsceral ganglia | − | ++ in p10 |
| Visceral plexus | − | |
| Peripheral nerves: | ++ | |
| Olfactory euroepithelium: | − | + in p1 |
| Retina | − | |
| Lens | ne | − in p1 |
| Corti organ | − | |
| Section 1.03 Circulatory system: | | |
| Section 1.04 Heart | | |
| Section 1.05 Blood Vessels | | |
| Respiratory System: | | |
| Nasal passage | | |
| Nasal mucosa | | |
| Trachea | | |
| Lung | − | |
| Section 1.06 Gastrointestinal | | |
| system: | | |
| Tongue | | |
| Oesophagus | | |
| Stomach | | |
| Small intestine | | |
| Large intestine | − | |
| Section 1.07 Gut associated | | |
| tissues: | | |
| Salivary gland | | |
| Exocrine pancreas | | |
| Liver | | |
| Gallbladder | − | |
| Section 1.08 Lymphatic tissues: | | |
| Thymus | | |
| Spleen | | |
| Lymphatic nodes | − | |
| Section 1.09 Endocrine System: | | |
| Pituitary gland | | |
| Thyroid | | |
| Parathyroid | | |
| Endocrine pancreas | − | |
| Adrenals | | |
| Section 1.10 Exocrine System: | | |
| Olfactory Bowman's glands | | |
| Lacrimal gland | | |
| Hardenia gland | | |
| Mammillary glands | | |
| Subaceus glands | − | |
| Sweet glands | | |
| Section 1.11 Urinary system: | | |
| Kidney | | |
| Cortex | | |
| Medulla | | |
| Urinary bladder | | |
| Section 1.12 Reproductive system: | ± | + in pregnant mouse |
| Ovary | | |
| Uterus | | |
| Testis | | |
| Epididymis | | |
| Seminal vesicle | | |
| Prostate | − | |
| Urethra | | |
| Skin: | | |
| Derma | | |
| Epidermis | − | |
| Hypodermis | | |
| Bone, Cartilage and Tooth: | | |
| Bone | | |
| Bone marrow | | |
| Cartilage: | | |
| Tooth | | |

Scale:
− = not detectable;
+ = weak;
++ = intermediate;
+++ = medium;
++++ = strong and
+++++ = very strong labelling;
ci = criteria insufficient to identify cell type at present condition.*;
ne = not examined.
*As the cell types were solely established based on their topography and morphology they are considered as presumptive only. Specific phenotype markers are required to identify cell type unambiguously.

### Ptprd

[0243] Following ISH, Ptprd gene expression patterns were analyzed by both x-ray film autoradiography and emulsion autoradiography with exposure times of 2 days and 10 days, respectively. Results are presented in Table Z4 and Z5 and FIGS. 16 to 24.

[0244] Analysis of ISH results provide evidence of Ptprd expression in the embryonic, newborn, postnatal and adult mice multiple regions including the central nervous system (CNS) and peripheral tissues. The onset time of Ptprd expression in different tissues is indicated in Table Z4. Light in e10.5 embryo, ISH signal increases significantly on day 12.5 and persists elevated along further developmental stages. Early expression was noted in e10.5 CNS, whereas late expression was observed in other regions: e12.5—gut; e15.5—kidney and lung; p1—adrenal gland and bone marrow, and p10—liver.

[0245] In the adult CNS Ptprd mRNA labelling formed a heterogeneous distribution pattern. Most labelling was found to be in a subpopulation of neuronal cells in the grey matter. If compare the large size neurons in the CNS, labelling intensity varied from one region to another, being high in the olfactory lobe mitral cells, moderate in the hippocampus pyramidal neurons, low in the cortex pyramidal cells and null in Purkinje cells of the cerebellum. This comparison indicates a regional specialization of Ptprd function. Among many labelled regions some are of interest to mental health. These are the hippocampal area 2 (CA2) involved in the stress regulation and the reticular thalamic nucleus (Rt), part of the brain visual tract, which is systemic to hallucinations in schizophrenia. In the white matter, Ptprd moderate labelling occurred in a subpopulation of the oligodendrocyte-like cells, which are known to produce myelin sheaths around the bundles of axon in CNS, indicating that Ptprd plays a role in the myelin production.

[0246] In addition to the nervous tissue, Ptprd mRNA was detected in the adrenal gland cortex. Higher concentration Ptprd mRNA was noted in a foremost peripheral zone known to contain aldosterone producing cells. Other endocrine cells containing tissues studied such as the pituitary gland, thyroid, gut and pancreas were not labelled. As summarized in the Table Z5, Ptprd mRNA was observed in the adult mouse hepatocytes in the liver, follicular cells in the ovary.

[0247] In conclusion, Ptprd gene expression is characterized by a widespread heterogeneous pattern of distribution throughout the multiple tissues observed along mouse ontogeny (Table Z4). In the central nervous system, Ptprd expression starts at midgestation and lasts until adulthood. During CNS ontogeny, Ptprd mRNA distribution pattern changes from homogeneous to heterogeneous, long-lasting within specific centres highly labelled. Some of these centers are involved in stress control (hippocampal area CA2 and specific hypothalamic regions), and visual tract reticular thalamic nucleus, involved in the hallucination in shizophrenia, suggesting that Ptprd might have a role to play in these conditions. Furthermore, the presence of Ptprd mRNA in the nervous system is not limited to neuronal cells, since, the labelled oligodendrocyte that produce myelin sheaths around the bundles of axons were observed in the white matter regions, such as corpus callosum in the brain. Ptprd may, thus, be involved in the myelin production in the white matter. Finally, most tissues including CNS, gut, kidney, adrenal gland, bone marrow and liver display a long-lasting pattern of Ptprd expression, each having its own onset time of expression, whether prenatal (most tissues) or postnatal (liver). Interestingly, the lung tissue displays a transient, two-peak pattern of expression (see Table Z4 and FIG. 16), suggesting a biphasic gene regulation mechanism including (i) an up-regulation event and (ii) a repression step. Altogether, the tissue specificity and the stage-wise gene expression characteristics suggest that combination of the followings may account to Ptprd function: (1) several Ptprd mRNA isoforms exist; (2) multiple, tissue-specific promoters regulate a gene expression; (3) differential splicing occurs in tissue-specific manner and (4) target gene expression repression mechanism operates. PtPRd-derived products might, thus, represent a target for both developmental and non-developmental gene expression regulatory factors, including a stress pathway in CNS.

TABLE Z4
Detection of PTPRD mRNA in mouse ontogeny

| # | Devel. Day | Stage | CNS | Gut | Kidney | Lung | Adr. | Bone | Liver |
|---|---|---|---|---|---|---|---|---|---|
| 1 | e10.5 | Midgestation | + | − | − | − | − | − | − |
| 2 | e12.5 | Midgestation | ++ | +++ | − | − | − | − | − |
| 3 | e15.5 | Lategestation | ++++ | +++ | ++ | +++ | + | ++ | − |
| 4 | P1 | Newborn | +++++ | ++ | +++ | + | +++ | +++ | − |
| 5 | P10 | Postnatal | +++++ | ++ | +++ | +++ | ne | +++ | +++ |
| 6 | P56-77 | Adulthood | +++ | + | ++ | − | +++ | ++ | +++ |

Average labelling level:
− = not detectable;
+ = very weak;
++ = weak;
+++ = medium; and
++++ = high and
+++++ = very high GENE17 mRNA concentration;
ne—not examined.

TABLE Z5
PTPRD mRNA tissue distribution in the adult mouse

| STRUCTURE | SCORE | COMMENTS |
|---|---|---|
| Section 1.13 Central nervous | | |
| system: | | |
| WHITE MATTER | ++ | |
| GREY MATTER | ++++ | |
| Cerebral cortex: | ++ | |
| Neurons | ++ | |
| Neuroblasts | − | |
| Glial cells | − | |
| Circumventricular organs: | − | |
| Ependymocytes | − | |
| Tanycytes | − | |
| Choroid plexus | − | |
| Striatum: | + | |
| Hippocampus: | +++ | |
| Hypothalamus: | ++ | |
| Thalamus: | ++++ | |
| Epithalamus: | + | |
| Cerebellum: | + | |
| Medulla oblongata: | +++ | |
| Spinal cord | +++ | |
| Section 1.14 Peripheral nervous | + | |
| system: | | |
| Cranial ganglia: | + | |
| Spinal ganglia: | + | |
| Neurons | − | |
| Satelite cells | − | |
| Paravertebral ganglia | − | |
| Previsceral ganglia | − | |
| Enteric plexus | − | |
| Peripheral nerves: | + | |
| Olfactory euroepithelium: | ne | +++ in p10 |
| Retina | ne | − in p10 |
| Lens | ne | + in p10 |
| Corti organ | | |
| Section 1.15 Circulatory system: | − | |
| Section 1.16 Heart | | |
| Section 1.17 Blood Vessels | | |
| Respiratory System: | | |
| Nasal passage | | |
| Nasal mucosa | | |
| Trachea | | |
| Lung | − | |
| Section 1.18 Gastrointestinal | ne | |
| system: | | |
| Tongue | − | |
| Oesophagus | + | |
| Stomach | + | |
| Small intestine | | |
| Large intestine | − | |
| Section 1.19 Gut associated | − | |
| tissues: | | |
| Salivary gland | ++ | |
| Exocrine pancreas | − | |
| Liver | − | |
| Gallbladder | | |
| Section 1.20 Lymphatic tissues: | | |
| Thymus | | |
| Spleen | | |
| Lymphatic nodes | | |
| Section 1.21 Endocrine System: | | |
| Pituitary gland | | |
| Thyroid | ++ | |
| Parathyroid | − | |
| Endocrine pancreas | | |
| Adrenals | | |
| Section 1.22 Exocrine System: | | |
| Olfactory Bowman's glands | | |
| Lacrimal gland | | |
| Hardenia gland | | |
| Mammillary glands | ++ | |
| Subaceus glands | ++ | |
| Sweet glands | − | |
| Section 1.23 Urinary system: | − | |
| Kidney | | |
| Cortex | +++ | |
| Medulla | − | |
| Urinary bladder | + | |
| Section 1.24 Reproductive system: | − | |
| Ovary | | |
| Uterus | − | |
| Testis | − | |
| Epididymis | ne | |
| Seminal vesicle | − | |
| Prostate | | |
| Urethra | | |
| Skin: | | |
| Derma | | |
| Epidermis | | |
| Hypodermis | | |
| Bone, Cartilage and Tooth: | | |
| Bone | | |
| Bone marrow | | |
| Cartilage: | | |
| Tooth | | |

Scale:
− = not detectable;
+ = weak;
++ = intermediate;
+++ = medium;
++++ = strong and
+++++ = very strong labelling;
ci = criteria insufficient to identify cell type at present condition.*;
ne = not examined.
*As the cell types were solely established based on their topography and morphology they are considered as presumptive only. Specific phenotype markers are required to identify cell type unambiguously.

### Tmeff2

[0248] Following ISH, Tmeff2 gene expression patterns were analyzed by both x-ray film autoradiography and emulsion autoradiography with exposure times of 4 days and 16 days, respectively. Results are presented in Table Z6 and Z7 and FIGS. 25 to 32.

[0249] Analysis of ISH results provide evidence of Tmeff2 expression in the central (CNS) and peripheral (PNS) nervous system of the embryonic, newborn, postnatal and adult mice. Light in e10.5 embryo, ISH signal increases significantly on day 12.5 and persists elevated along further developmental stages. In the adult stage, when CNS architecture appears as fully developed with grey matter clearly delineated from white matter, Tmeff2 mRNA labelling appears to be confined to a former and absent in the letter. Glial cells, ependymocytes, plexus choroids and endothelial cells in CNS appeared to be free of labelling. Labelled neurons displayed a widespread distribution in almost all CNS regions, showing Nissl-like pattern. However, at closer examination performed under high microscopic magnification it appears that proportion of neurons, present for example in the cerebral cortex, remains unlabelled (FIG. 28E). For this reason, Tmeff2 expression pattern cannot be termed as pan-neuronal-like, but a widespread neuron-specific expression pattern.

[0250] In the PNS, a presence of Tmeff2 mRNA was noted in the neurons, but not in supportive satellite cells of the cranial ganglia such as trigeminal ganglion, spinal ganglia such as dorsal root ganglia, paravertebral sympathetic ganglia and gastrointestinal plexus. The later was especially evident during prenatal and postnatal development. Labelled enteric neurons present in the space in the intestinal wall, in between the two smooth muscle layers, inner circular and outer longitudinal, take part of the enteric plexus called Auerbach's plexus. In the adult stage, Auerbach plexus appear to be much less labelled, suggesting by thus Tmeff2 role mainly in the gut development. A role of Tmeff2 in the gastrointestinal nerve supply could potentially be a control of the peristalsis.

[0251] In addition to the nervous tissue, Tmeff2 mRNA was detected in the adrenal gland and the supportive tissue. Presence of Tmeff2 mRNA in the adrenal gland was limited to the medulla containing adrenergic/peptidergic cells, whereas the cortex where corticoids are synthesized remained unlabelled. Other endocrine cells containing tissues studied such as the pituitary gland, thyroid, gut and pancreas were not labelled.

[0252] Supportive tissues, especially the fibroblasts in the membranes around skeletal muscles and certain bones (i.e. cranial bones and phalanges) displayed Tmeff2 mRNA labelling. The level of Tmeff2 expression seems to be maximal in late prenatal development, was pronounced in the postnatal stage and low in the adult mice.

[0253] In conclusion, Tmeff2 gene expression displays a high-degree of tissue specificity, characterized by mRNA distribution restricted to the CNS, PNS, adrenal medulla and membranes. Expression of Tmeff2 in the supportive membranes around the muscles and skeleton suggests an interaction between the membrane fibroblasts and target cells in their growth and maintain. Otherwise said, Tmeff2 could be responsible for any malformation in the musculature and skeleton if cell-to-cell interaction depended upon its function. The presence of Tmeff2 mRNA in the nervous system, specifically in the neuronal, but not glial cells, suggests its neuronal function in a large number of regions. Finally, the expression of Tmeff2 in the enteric Auerbach's plexus suggests its role in the gut growth, probably influencing the set up of musculature and a subsequent peristalsis. Whether other body smooth musculature that control the iris, blood vessels and skin hairs receives Tmeff2 nerve supply is presently not known and merits further investigation in view to test Tmeff2 as CNS and PNS patho-physiology marker. As it is known, muscular tissue constitutes an excellent support to studies in genetics and pharmacology. Muscular tissue is also an excellent target to elaborate and test the diagnostic/prognostic tools to gene-encoded disease of the nervous system, whenever central or peripheral, or both.

TABLE Z6
Detection of TMEFF2 mRNA in whole body sections from 3
different mouse ontogeny stages, 2 postnatal stages and adulthood

| | Development | | | |
|---|---|---|---|---|
| # | Day | Stage | Score | Comments |
| 1 | e10.5 | Embryo, midgestation | + | Low-level expression in CNS and PNS |
| 2 | e12.5 | Embryo, midgestation | ++ | High-level expression in CNS and PNS; |
| | | | | Medium-level in the membranes |
| 3 | e15.5 | Embryo, lategestation | ++++ | High-level expression in CNS, PNS |
| | | | | and membranes |
| 4 | P1 | Newborn | +++++ | Very high-level in CNS and PNS; |
| | | | | Medium-level in the membranes |
| 5 | P10 | Postnatal | +++++ | Very high-level in CNS and PNS; |
| | | | | Low-level expression in the membranes |
| 6 | P56-77 | Adulthood | ++++ | High-level in CNS and PNS; |
| | | | | Low-level expression in the membranes |

Average labelling level:
− = not detectable;
+ = very weak;
++ = weak;
+++ = medium; and
++++ = high and
+++++ = very high GENE19 mRNA concentration.

TABLE Z7
TMEFF2 mRNA tissue distribution in the adult mouse

| STRUCTURE | SCORE | COMMENTS |
|---|---|---|
| Section 1.25 Central nervous | | |
| system: | | |
| WHITE MATTER | − | |
| GREY MATTER | +++ | |
| Cerebral cortex: | +++ | |
| Neurons | +++ | |
| Neuroblasts | − | |
| Glial cells | − | |
| Circumventricular organs: | − | |
| Ependymocytes | − | |
| Tanycytes | − | |
| Choroid plexus | − | |
| Striatum: | ± | |
| Hippocampus: | +++ | |
| Hypothalamus: | ++ | |
| Thalamus: | ++++ | |
| Epithalamus: | ++++ | |
| Cerebellum: | ++++ | |
| Medulla oblongata: | ++++ | |
| Spinal cord | ++ | |
| Section 1.26 Peripheral nervous | ++++ | |
| system: | | |
| Cranial ganglia: | ++++ | |
| Spinal ganglia: | ++++ | |
| Neurons | − | |
| Satelite cells | ne | +++++ in p1 |
| Paravertebral ganglia | ne | +++ in p10 |
| Previsceral ganglia | ± | ++++ in e15.5 |
| Enteric plexus | − | |
| Peripheral nerves: | ne | +++ in p10 |
| Olfactory euroepithelium: | ± | |
| Retina | − | |
| Lens | − | |
| Corti organ | − | |
| Section 1.27 Circulatory system: | | |
| Section 1.28 Heart | | |
| Section 1.29 Blood Vessels | | |
| Respiratory System: | | |
| Nasal passage | | |
| Nasal mucosa | | |
| Trachea | | |
| Lung | − | |
| Section 1.30 Gastrointestinal | | |
| system: | | |
| Tongue | | |
| Oesophagus | | |
| Stomach | | |
| Small intestine | | |
| Large intestine | − | |
| Section 1.31 Gut associated | | |
| tissues: | | |
| Salivary gland | | |
| Exocrine pancreas | | |
| Liver | − | |
| Gallbladder | | |
| Section 1.32 Lymphatic tissues: | | |
| Thymus | | |
| Spleen | | |
| Lymphatic nodes | − | |
| Section 1.33 Endocrine System: | − | |
| Pituitary gland | ne | |
| Thyroid | − | |
| Parathyroid | +++ | |
| Endocrine pancreas | − | |
| Adrenals | | |
| Section 1.34 Exocrine System: | | |
| Olfactory Bowman's glands | | |
| Lacrimal gland | | |
| Hardenia gland | | |
| Mammillary glands | | |
| Subaceus glands | − | |
| Sweet glands | | |
| Section 1.35 Urinary system: | | |
| Kidney | | |
| Cortex | | |
| Medulla | − | |
| Urinary bladder | | |
| Section 1.36 Reproductive system: | | |
| Ovary | | |
| Uterus | | |
| Testis | | |
| Epididymis | | |
| Seminal vesicle | − | |
| Prostate | | |
| Urethra | | |
| Skin: | | |
| Derma | − | |
| Epidermis | | |
| Hypodermis | | |
| Bone, Cartilage and Tooth: | | |
| Bone | | |
| Bone marrow | | |
| Cartilage: | | |
| Tooth | | |

Scale:
− = not detectable;
+ = weak;
++ = intermediate;
+++ = medium;
++++ = strong and
+++++ = very strong labelling;
ci = criteria insufficient to identify cell type at present condition.*;
ne = not examined.
*As the cell types were solely established based on their topography and morphology they are considered as presumptive only. Specific phenotype markers are required to identify cell type unambiguously.

### Schizophrenia Genemap and Pathways

[0254] The GWAS, and subsequent data mining analyses resulted in a compelling GeneMap that contains networks and pathways highly relevant to schizophrenia. The emerging GeneMap includes both novel and known pathways in neurological development, synaptic plasticity, learning, memory and other neurological disorders. Other identified regions contain genes with biological function relevant for the central nervous system or associated with neurological conditions such as spastic paraplegia.

### Link to Schizophrenia Pathway:

[0255] This pathway includes genes that have been already reported to be associated with schizophrenia, such as KCNN3, KMO, VDR, and NRG1. Other genes such as DISC1 and DTNBP1, have been repeatedly reported to be linked with the disease and connect directly to genes from our findings.

[0256] A signal pointing at the 5′ end of the Neuregulin 1 gene was found among the regions in paranoid sub-phenotype analysis. The NRG1 gene is expressed at synapses in the central nervous system and has an important role in the expression and activation of neurotransmitter receptors. The association of NRG1 with schizophrenia has been replicated in various populations. NRG1 codes for many mRNA species and different proteins via alternative splicing; it is thought to code for about 15 proteins with a diverse range of functions in the brain, including axon guidance, synaptogenesis, neurotransmission, etc. Any of these forms could potentially influence susceptibility to schizophrenia.

[0257] The KCNN3 gene encodes a potassium channel and it is epistatic to PTPRD, the top signal from the full sample analysis. KCNN3 is ubiquitously expressed across a variety of tissues. The first exon contains a polymorphic CAG repeats translating in a polyglutamine repeat in the protein. Several reports have shown evidence for a possible association of CAG expansion at this locus with schizophrenia and it has been suggested that variations in the length of the polyglutamine repeats produces subtle alterations in channel function, thus altering neuronal behavior.

[0258] Vitamin D3 receptor (VDR), is an intracellular hormone receptor that specifically binds the active form of vitamin D (1,25-dihydroxyvitamin D3). Our data show that this gene is in heterogeneity with PAFAH1B1 (LIS1), a gene identified in the full sample analysis. In animal models, the expression of VDR in the embryonic rat brain has been shown to rise steadily between embryonic days 15 and 23. Also, vitamin D has been shown to induce the expression of nerve growth factor and to stimulate neurite outgrowth in embryonic hippocampal explant cultures. In the neonatal rats low prenatal vitamin D in utero has been shown to lead to brain anomalies. Exposure to low levels of vitamin D during early human life is known to alter brain development and it is considered as a risk factor for schizophrenia. The KMO gene is located in the chromosome region 1q42-q44, a region associated with schizophrenia by linkage analysis. Polymorphisms in this gene have been shown to be associated with schizophrenia. Kynurenine 3-mono-oxygenase (KMO) inhibitors increase brain kynurenic acid (KYNA) synthesis and cause pharmacological actions possibly mediated by a reduced activity of excitatory synapses. Metabolic variations in the KYNA pathway have been suggested to be related to the etiology of schizophrenia. Finally, in situ hybridization experiment in mouse during different stage of development revealed that KMO is characterized by high tissue specificity displaying a restricted pattern of mRNA distribution, with a presence in the liver, lymphatic tissue and kidney cortex. The highest level of expression was noted in the adult liver hepatocytes, suggesting its role in the hepatic metabolic/catabolic function.

### Neurological Disorder Pathway:

[0259] This pathway includes genes such as APP, TAU, and PSEN1 that have been shown to be associated with Alzheimer's disease. Both schizophrenia and Alzheimer's result in cognitive defects. Cognition is a complex mental process that integrates awareness, perception, reasoning, language, memory and judgment. Genes from our finding such as APBA2, PIN1, ITGA3, PAK7 and ABCA1 connect directly to genes associated with Alzheimer's. The APBA2 gene was identified in the full sample analysis and it has a role in the regulation of APP, the amyloid precursor protein. A copy number variation (CNV) at the APBA2 locus was recently found to be associated with schizophrenia. The PIN1 gene is an independent risk factor to SPG3A, a gene identified in the full sample analysis. PIN1 encodes an enzyme that have been shown to prevent the tangle-like lesions found in the brains of Alzheimer's disease patients, and it also plays a role in guarding against the development of amyloid peptide plaques. Genetic variations in the human PIN1 gene are associated with Alzheimer's disease. Reduced production of the Pin1 enzyme has been suggested to be of key importance in the onset of Alzheimer's disease. PIN1 promotes dephosphorylation of TAU, and regulates the cleavage of APP as well as amyloid beta production. ITGA3, identified from the full sample analysis, is located in a linkage schizophrenia candidate region. As part of the DAB1/RELN signaling pathway, this gene may contribute to appropriate neuronal placement in the developing cerebral cortex. This gene was also found to be epistatic to SPG3A. ITGA3 is predominantly expressed in brain, it promotes neurite outgrowth, and it may play a role in neurite development. The ABCA1 is an independent risk factor to NRG1. Located in close vicinity to the 9q linkage region associated with Alzheimer's. ABCA1 plays an important role in cellular cholesterol efflux, it has a potential in brain lipid transport and it regulates APP.

### Novel Pathway: Development and Synapse Formation

[0260] Schizophrenia appears to be a development disorder resulting when neurons form inappropriate connections during fetal development. This pathway includes genes from the full sample analysis such as WNT7A and NKD2 as well as genes from sub-analyses such as MSX1 and FZD7. All of them have a role in Wnt signaling. Wnt signaling is a canonical pathway that is active in the nervous system and that exhibits a dynamic pattern during forebrain development. The WNT7A gene encodes a protein that regulates axonal remodeling and synaptic differentiation in the cerebellum. The mouse and fly NKD2 homologs are dishevelled binding proteins acting as inducible antagonists of Wnt signals. It is therefore possible that genetic alteration of NKD2 leads to modulation of the WNT—beta-catenin signaling pathway. The MSX1 gene was found to be epistatic to the CIAS1 locus (a gene identified from the full sample analysis) and also in the female with age of onset over 25. MSX1 was reported to be implicated in the development and definition of the craniofacial skeleton and it is also known to be involved in limb, muscle and nail development. The FZD7 gene was identified as an independent risk factor to the SPG3A locus. FZD7 regulates Wnts and facilitates the Wnt signal cascade during embryonic mesoderm and neural induction. It is required for neural crest induction by Wnt in the developing vertebrate embryo.

### Novel Pathway: Long Term Potentiation

[0261] Several reports have suggested that schizophrenia is associated with disrupted plasticity in the cortex. It has been shown recently, that deficits in learning and memory in schizophrenia may be mediated through altered processes in long term potentiation (LTP). This pathway includes two genes that play an important role in LTP. The PTPRD gene corresponds to our top signal from the full sample analysis. PTPRD binds PTPRA, a gene that is considered as a novel member of the functional class of genes that control neuronal migration and synaptic plasticity. PTPRD is also involved in the regulation of synaptic plasticity or in the processes regulating learning and memory. Such gene is highly expressed in the developing mammalian nervous system, regulates neuroendocrine development, axonal regeneration and hippocampal LTP. In situ hybridization experiments to map Ptprd gene expression sites in the mouse embryo, postnatal stages and adulthood revealed that in the central nervous system, Ptprd expression starts at midgestation and lasts until adulthood. During CNS ontogeny, Ptprd mRNA distribution pattern changes from homogeneous to heterogeneous, long-lasting within specific centers highly labeled. Some of these centers are involved in stress control (hippocampal area CA2 and specific hypothalamic regions), and visual tract reticular thalamic nucleus, involved in the hallucination in schizophrenia, suggesting that Ptprd might have a role to play in these conditions. Finally, Ptprd mRNA in the nervous system is not limited to neuronal cells, since, the labeled oligodendrocyte that produce myelin sheaths around the bundles of axons were observed in the white matter regions, such as corpus callosum in the brain. Ptprd may, thus, be involved in the myelin production in the white matter.

[0262] The NRG2 gene relates through indirect interactions to PTPRA and plays an important role in neurodevelopment. Recent studies have shown that NRG2 is associated with schizophrenia. In pair-wise interaction tests, clear evidence of gene-gene interactions was detected for NRG1-NRG2, EGFR-NRG2, and suggestive evidence was also seen for ERBB4-NRG2.

### Neurodevelopment and Inflammation

[0263] Previously, the brain was considered as an immune privileged organ, not susceptible to inflammation or immune activation and was thought to be largely unaffected by systemic inflammatory and immune response processes. It is now accepted that the brain coordinates and regulates many aspects of the host defense response to several diseases including schizophrenia. Since many schizophrenia patients have autoimmune diseases, schizophrenia link to inflammation might help explain why many schizophrenic patients have co-morbid autoimmune diseases. The neurodevelopment and inflammation pathway is characterized by the presence of several genes that have been implicated in inflammation. Among them, genes such as interleukin-6 (IL-6) and interleukin-1β (IL-1β) have been shown to reduce significantly dendrite development and complexity of developing cortical neurons, consistent with the neuropathology of schizophrenia. IL-1β connects directly to NLRP3 and PAPP-A genes. NLRP3 was identified in the full sample analysis. This gene was found to be associated with various inflammatory diseases and also forms with other proteins, an inflammasome with high pro-ILB-processing activity. PAPP-A levels are elevated in acute coronary syndromes and are closely related to inflammation and oxidative stress. Also the PAPP-A expression is regulated by cytokines like IL-B1. Other genes in the pathway include BCAS1, VIPR2, RAD23B, TOM1 and CENPE. BCAS1 is a gene that binds to dynein and our preliminary expression analysis detected a brain-specific spliced variant. VIPR2 is a critical mediator of VIP neuroprotective properties against excitotoxic white matter lesions in the developing mouse brain. The protein encoded by RAD23B is a DNA repair enzyme but it has been shown to accumulate in neuronal inclusions in specific neurodegenerative disorders. Furthermore, RAD23B may play an important role in development since RAD23B (−/−) mice show impaired embryonic development. The TOM1 gene, epistatic to the WNT7A locus, was shown to be associated to bipolar disorder. Finally, in situ hybridization studies using mouse at different stages of development, revealed that KMO expression was also evident in the spleen and in the lymph nodes, emphasizing a potential role in the body immunosurveillance process.

### Schizophrenia and Drug Targets:

[0264] It has been suggested that the imbalance in the interrelated chemical reactions of the brain involving the neurotransmitters dopamine and glutamate (and possibly others) plays a role in schizophrenia.

[0265] The commonly prescribed drugs for schizophrenia are atypical antipsychotics. An important number of these antipsychotics were subjects to evaluation in a recent study, CATIE (Clinical Antipsychotic Trials of Intervention Effectiveness). Some issues such as insufficient efficacy and tolerability experienced by patients have been observed (74% of patients taking antipsychotics discontinued treatment within 18 months). Each medication has a specific mechanism of action, and many are meant to target a certain symptom or group of symptoms. Several approved FDA treatments have a mechanism of action that targets dopamine D2 receptor. In schizophrenic brain, it has been shown that the density of dopamine D2 receptor is high and its blockade is the main target for antipsychotic drugs.

[0266] Several compounds that target this receptor are already marketed; others are in clinical trials. DRD2 gene connects to AKT1, a gene that is present in schizophrenia GeneMap and that is in direct interaction with LIS1/PAFAH1B1, a gene discovered from the full sample analysis.

[0267] New treatments are developed and being tested. Several of them are targeting the N-methyl-D-aspartate receptors (NMDARs). Increasing evidence has suggested that the NMDAR hypofunction plays a key role in schizophrenia. Administration of noncompetitive NMDAR antagonists in humans and animals has been shown to produce behavioral symptoms that are remarkably similar to schizophrenia.

[0268] In the schizophrenia GeneMap, NMDAR connects directly to 3 of the identified genes. KMO and RASGRF2 are genes identified from the full sample analysis and NRG1 is a sub-phenotype gene.

[0269] The CHRNA7 gene is a nicotinic receptor subunit that is considered as an attractive target for novel therapeutic drugs for neuropsychiatric diseases. CHRNA7 interacts with the genes in the GeneMap such as APP, PSEN1 and MAPT. Both PSEN1 and APP interacts with APBA2 a gene identified from the full sample analysis. MAPT interacts with 2 genes in the GeneMap, both of these genes regulate MAPT activity. One of them is the PAK1 gene, epistasic with PTPRD and an independent risk factor to the SPG3A locus. The other gene is PIN1, an independent risk factor to the SPG3A locus.

[0270] Other drugs targeting glutamate receptor subunits GRM2, GRM3, or GRM5 are currently in clinical trials. GRM2 is in direct interaction with GRIP1, a gene in epistasis with PTPRD. GRM3 and GRM5 interact with subunits of NMDAR and ERBB4, two genes in the GeneMap. Drugs targeting subunits of the serotonin receptor, 5-HT1 and 5-HT2, are already on the market whereas others are clinical trials. Serotonin receptor subunits directly interact with genes in the GeneMap. 5-HT1 connects to NMDAR and Calmodulin and 5-HT2 connects to Calmodulin, DLG3 and DLG4.

The application's sequence listing, which the Patent Office published only in electronic form, follows.

SEQUENCE LISTING (19625 sequences)

SEQ ID NO: 1 - DNA, 3147 bp, Homo sapiens
aggcgtctgaggggcggacggaggcggcggcggcggcggcgggagcgggagcgggcggcgagtggggagcggggccgggagtggagcagccgccgcggcgggactggaccgagcctcgccggcgcgcacctgcccgcagcgcccgcggagcgcgcagcgcggcccgagcgcgacgacctgccgagcggcggccgaggcggcggtgtgggcgcgtcaggccgcgacgagggcgctgagacaaatttacatgtattggagaccagaccagaagcccttctgaattaagatctcacattcttgaaggtggcattgaagagcactaagatcggaagatgagtgagcttgaccagttacggcaggaggccgagcaacttaagaaccagattcgagacgccaggaaagcatgtgcagatgcaactctctctcagatcacaaacaacatcgacccagtgggaagaatccaaatgcgcacgaggaggacactgcgggggcacctggccaagatctacgccatgcactggggcacagactccaggcttctcgtcagtgcctcgcaggatggtaaacttatcatctgggacagctacaccaccaacaaggtccacgccatccctctgcgctcctcctgggtcatgacctgtgcatatgccccttctgggaactatgtggcctgcggtggcctggataacatttgctccatttacaatctgaaaactcgtgaggggaacgtgcgcgtgagtcgtgagctggcaggacacacaggttacctgtcctgctgccgattcctggatgacaatcagatcgtcaccagctctggagacaccacgtgtgccctgtgggacatcgagaccggccagcagacgaccacgtttaccggacacactggagatgtcatgagcctttctcttgctcctgacaccagactgttcgtctctggtgcttgtgatgcttcagccaaactctgggatgtgcgagaaggcatgtgccggcagaccttcactggccacgagtctgacatcaatgccatttgcttctttccaaatggcaatgcatttgccactggctcagacgacgccacctgcaggctgtttgaccttcgtgctgaccaggagctcatgacttactcccatgacaacatcatctgcgggatcacctctgtctccttctccaagagcgggcgcctcctccttgctgggtacgacgacttcaactgcaacgtctgggatgcactcaaagccgaccgggcaggtgtcttggctgggcatgacaaccgcgtcagctgcctgggcgtgactgacgatggcatggctgtggcgacagggtcctgggatagcttcctcaagatctggaactaacgccagtagcatgtggatgccatggagactggaagaccattccaacttggacgcgttaccatgagagcatatcctatccaaccgtactaacgtggacaccctacacctcccctcagaacttcaaaagggcaagatcttttttccttcacttattgctgaaaccaagagcacaattcccattgagagaaagatctctgtgctgtaaactaaaacaaattgtgcattccttccggggccatcgtctttgttttcttttttgtcttgaatgaattttaaaaggaaatatataataaaaatgttaaccagaaggtaaacttgagtgtaattgtcagacagacacacttttccaccagtgtatttgaattttagaccagtgaccctgttttgtggcattcatgcaaaacatgctgagggctttgttcatctggtcatcgtgtccaaatttcagtcatgtttgtagcaagattttggaagcattcatatttcctttttaaaatgtattcctttgtgttcaacagttaatcaaaaccagagagtctagggcagcctctctgatgttgtcaatgatgtaaattcagtccctggtttttaattttctgtctgatgtcacagatcattgttgcacacaaacgtggcatagaaaagaacatgttcagaagccatggggccaagcacatgcggggacggtctcaaatgcgtgatcagagaatccttcacctttgctgaaaagtgagctcagatccagcaccatgttcctcctgacccatcctgtctatcttctcagttgagtttttaatctcactttgggtttccttgtgaagttggagggaagtttataatagcctaacactaccccacccccaactaggaggaacctctgttttcaagagagatgcctgtcctgtgcttggatagtcagtcaattatttgtgtatgaaacaatgtacaaatcaatgttttgaaaataatgatctcagactttctaagttaaattttaaaaattttgattgtttgccatattgggtgggtttactcttagaatcgcatgctgtagaaatgctcaaaagtgcatatgggactcagtccttaggtgttctttttcttttaagaaataacctcttacagttgtaaccattgcggctctgtccacttctcgttgctgctctgtggcacatatcggaagcagtacagcgcgcggctctacacgcttgggtagcgggataagtcactgttttctttatttctttaaaaaaaaaaaagttctgttgcaaacgactgctgttggattctgagggtggggagggagagagagggagggagagggagtgaagagcctgccctcctatatggattcttcagggccctccacatctgaggtggctcattcccatcacacacagattgtcctggtgttcatttcaaggccagtgttcagcagcagcgtttggaaagcaggttctgtgggaccccccgccccgccccccgcactccttcatagcagcagtagtggcttctccatcctgttttctgcaacattctatacaaaactgtgctgtgaccttgcggtaggcctggatctggcaaagagaatacaaatgaaaccccttctttctctttccgtccaacaactctgtagagctctctgcacccttacccctttccaccttttgtatttaattttaaagtcagtgtactgcaaggaagctggatgcaagatagatactatattaaactgtactgttatttaagatgtaataaagcagtttgacatgaaaaaaaaaaaaaaaaaaaa

SEQ ID NO: 2 - protein, 340 aa, Homo sapiens [sequence omitted]

SEQ ID NO: 3 - DNA, 1110 bp, Homo sapiens
ggtaattagacccagacagggagggctcagtgcgggtctgaggagggaacacacgtgtgcaggcgtgtgctccacggtggcatgttgatacggaccagcctgggcaccaggccccctcgggagccagctttgctgttctgagtggaagggagatcaggtttccctgagaaaccccaaaatagcccccaactgtgcctggcttccagcgggcagcccagcccccaggccctgttttgctccctttcccccttcacccccagcccatgtcctgctgtctcctccctgaatggtggaccctcagcccctcctgtacaagatggtcaagcggtgcctcatgcatttgttcattcgacctgtcctgagagtttgtgacatgctggcacggggccaatgttgagtccaccaggatgggagggtggccaggctctgagccactgagcaccagctggccaggatgggtcttcaacaagaaatctcactgcagccctggtgtcaccaccctgcagaatcctgtcagacaaccaccgacatgacagagcgcctgtcggctgagcagatcaaggagtacaagggagtctttgagatgttcgacgaagagggcaacggggaggtgaagacgggggagctggagtggctcatgagcctgctgggtatcaaccccaccaagagtgagctggcctcaatggccaaggatgtggacagagacaacaaagggttcttcaactgcgatggtttcctggcactaatgggagtttaccatgagaaggcccagaaccaggagagcgagctgagggcggcattccgtgtctttgacaaagagggcaagggctacattgactggaacacactcaagtacgtgctaatgaacgcaggggagcccctcaacgaggtggaggcggagcagatgatgaaggaggccgacaaggatggggacaggaccatcgactatgaggagtttgtggccatgatgacgggggagtccttcaagctgatccagtaggtgcagctgccgcagccgggggaggcctgcccgggaaggctgctgcccctgccccctggcccccactcccccggctccgtgtaaaataaatgttccagcccgaaaaaaaa

SEQ ID NO: 4 - protein, 181 aa, Homo sapiens
MGLQQEISLQPWCHHPAESCQTTTDMTERLSAEQIKEYKGVFEMFDEEGNGEVKTGELEWLMSLLGINPTKSELASMAKDVDRDNKGFFNCDGFLALMGVYHEKAQNQESELRAAFRVFDKEGKGYIDWNTLKYVLMNAGEPLNEVEAEQMMKEADKDGDRTIDYEEFVAMMTGESFKLIQ

SEQ ID NO: 5 - DNA, 971 bp, Homo sapiens
gcttgaattcggcgcgccagatatcacacgtgccaagggctggctcaagcatggcccgggggccgctggccgcccgcggactgcggctgctgctgccgctcctgccgctcctgccgctcctgccgctgccgcaggtggcgctgggcttcgcggacggcagctgcgacccctcggaccagtgcccgccccaggcccgctggagcagcctgtggcacgtggggctcatcctgctggcggtcctcctgcttctgctgtgtggtgtcacagctggttgtgtccggttctgctgcctccggaagcaggcacaggcccagccacatctgccaccagcacggcagccctgcgacgtggcagtcatccctatggacagtgacagccctgtacacagcactgtgacctcctacagctccgtgcagtacccactgggcatgcggttgcccctgccctttggggagctggacctggactccatggctcctcctgcctacagcctgtacaccccggagcctccaccctcctacgatgaagctgtcaagatggccaagcccagagaggaaggaccagcactctcccagaaacccagccctctccttggggcctcgggcctagagaccactccagtgccccaggagtcgggccccaatactcaactaccaccttgtagccctggtgccccttgaaggaggtaggagaacggaccagagcttggagaactaatgcttggagccaagggccccagcccaccccaccgtcccacacattgctgtggccccaacctcggtgccatgttacaccggcccctggcgtcacccactaggcaggctgctgctttcagcctcagcccctggcccagccccagcaggccctcagcctggaagaggccccttgggcctaagcctcgggtgggagctcagggccacctgtgacgtctgcatcttcttggagagagaataaagtttgtatttaagtgg

SEQ ID NO: 6 - protein, 209 aa, Homo sapiens
MARGPLAARGLRLLLPLLPLLPLLPLPQVALGFADGSCDPSDQCPPQARWSSLWHVGLILLAVLLLLLCGVTAGCVRFCCLRKQAQAQPHLPPARQPCDVAVIPMDSDSPVHSTVTSYSSVQYPLGMRLPLPFGELDLDSMAPPAYSLYTPEPPPSYDEAVKMAKPREEGPALSQKPSPLLGASGLETTPVPQESGPNTQLPPCSPGAP

SEQ ID NO: 7 - DNA, 2824 bp, Homo sapiens
gggtctgtgtgcccctccgcactggctactgtcttcctcgggcgccggtcggcttttgcgtccccacattcaatcccaactgcggctcccgcggttcccgcactggccgcagaggagccacggggcacagctggctgtgtttagggccctgcacagccccacagccagtcgctccccccacagttccgaaagaatatggccccccagaggaaggacctgcatggactgtcattctccattcttcgagcacagaaccgcgacaagctgttcaaagtctctgtcccccacgtcctggagatgcggaagcgggagctgaggcccaggtgggtccaggaggggctgccccacctgcttccctccaggcccctctggtgggacccactgtggcccctgtagagtcccctccctacagattgcccggaatgacccatgtggctggaaggactgatgccttcagacacagctggatccaggtgctgccttcctgggacctacccaccccatttccccaggcctgacacccctgcacacagcctcaatccacgggtggggagcaaagccaccaccccccacccagccccccgggtgcagaatgagccctgggaaagctctaatgggtgcctgtggccccgggaaggaacatggctctctagccaggggccaaaggcacctgccccaacccctagcctccagccaccagctgacgaggacctgaagtgagtgatgagacccccacaggagccagagaagggtggaaaagccagtttgtcagacacaactgggacagccacagcttgggaccctgggaccctgggaccctgaggcagagccgcaggggtccggcctgggccgatggtgggtgggggcaaggcgggagcgcaagcctctgacttccttctagttccgacgagtaccaggccgcccgagccaccctgctcagagcgttccaggcgaagtttgacacatttgtagttccctgtgttgttgccagtggcgacatcaaagacaggaaggggtcagaacccctgagcttcaggtgcggggtgctctggccagaacagggtgtggtcagccgcaaacgcgctgtccctctgctactgcccaactctggggcctgggcgggcagggggccgcccaccctgccctcagcatgcccttcctatcccagcccccacaacaccctgtacctggagctgtggtgcccgacggtggcaccatctgttgtggtgacgtcccataaaggcaagaccatctttaacttcggcgacgtcgctgtggggcaccgcagtatcaagaagatctccatccagaacgtctctcccgaggatctggccctggacttctccctgctgaaccccaacggcccctttgtcctgctgaaccactccagcctgctgcgtgcaggtgggacccaggtcctggtgctttccttctctccccacgagagcatcctggctcaagaaacactggacatcatcaccaagagaggcacgctcaccctcaccctcatgggcactggcgtggcgtccatgatcacgtgctccattgaaggcagcgtcctcaacatgggctatgtgattgccggagagtctgtgtcctcaggcttcaagctgcagaacaactctctgctccccatcaagttctccatgcacctggacagcctctccagcacccggggccggggccagcagcagctgccgcagttcctcagctcgccctcccagaggacggaggtggtcgggacgcagaatctcaacggtcagagcgtgttcagcgtggcccccgtcaagggcgtcatggaccccgggaagacacaagacttcactgtcaccttcagccccgaccacgaaagcctctacttctccgacaagctccaggtggtgctctttgaaaagaaaatctcccaccagatcctgctgaagggtgccgcctgtcagcacatgatgttcgtggagggcggcgaccccctggacgtgcccgtggagtctctgacagcgatccctgtatttgaccccaggcacagagaggccagctcccggccaggccctctctctccagaagctgaggagctgaggcccatcctggtgaccctggactacatccagtttgacacagacacgccagccccacctgccacccgagagctgcaggtgggctgtatccggaccacccagccatctccaaagaagaccgttgagttcagcatagacagcgtcgcatccctgcagcacaagggtttctctattgagccctccaggggctccgtggagcgcggccagacgaagaccatcagcatctcctgggtgccacctgcggactttgatccagaccacccactcatggtgtcggccctgctgcagctaaggggggatgtgaaggagacctacaaggtcatctttgtagcccaggtgttgactggcccctaagcctctgcacagagcaccctcgggccctcctgtccaccctcaaagccctccccaggctgagggccaggtcatactaccctagagcctgggacctggccatcctctgccagtcagattccaataggccgccctccacatggcgccacggccacttcctgctgccctggaccccgcaagcccagggacatccaagagcacccctcctgagaccccagactcagaagcagcgagaaggccaggccagccctcagccatcctagccagaccccctcagagcccccagcccccaggagagccctccacagcctgtcaataaattttttgtaggccaacaaaaaaaaaaaaaaaaaaaaaaaaaaaaaaaaaaaaaaaaaaaaaaaaaaaaaaaaaaaaaaaaa

SEQ ID NO: 8 - protein, 305 aa, Homo sapiens
MGTGVASMITCSIEGSVLNMGYVIAGESVSSGFKLQNNSLLPIKFSMHLDSLSSTRGRGQQQLPQFLSSPSQRTEVVGTQNLNGQSVFSVAPVKGVMDPGKTQDFTVTFSPDHESLYFSDKLQVVLFEKKISHQILLKGAACQHMMFVEGGDPLDVPVESLTAIPVFDPRHREASSRPGPLSPEAEELRPILVTLDYIQFDTDTPAPPATRELQVGCIRTTQPSPKKTVEFSIDSVASLQHKGFSIEPSRGSVERGQTKTISISWVPPADFDPDHPLMVSALLQLRGDVKETYKVIFVAQVLTGP

SEQ ID NO: 9 - DNA, 1812 bp, Homo sapiens
atggaaccagagagattaaccacagtgatacctcccagcgaagagcagacggagatcacgctgggggaggtaacagaaggggaaattggccccttcagctccatcaaggtgcccatcgtcttcactccggtcgtcccaggcgacgtccaagccaggttcaaagtcacgtttaagaacccccagtgccccacgctgcatttcagggtcgtgggcgtggccatcgatgtgccggtctgggtgccgaagcccagcgtggacctgaagatctgcatgtatgaccggctctaccaggactctgtgctcgtgcacacgcggtcgaaagctgccctgcgcctgaagttcgaggtgtgcaaggagctgagggcccacctggagctcctgcccaagacaggctatatccaggcacagtcgtcctactccgtgcagctcaagttcctgccgcgacactccctcccggaggacgcagggaggtattttgacaaggagacccgagtcctggaggccccgatgaccatatgggttgccgaccagaacaagccagtgggattcaccgtgcatgccattgtcaccacctcggacctggagctcagtccctcggaggtggattttggctactgcaccatctatgaggccatcaggacggaaatcagcctccacaaccactcgctcctgccccaggagttcgggttcgtcaggcttcccaagtttgtggacgtccaacccaacgatgggtttgggacgatcctgcccctggaaacgctgcagttctgtgtgatcttccagcccaccaaggccgaggaacacagattccaactgacctgcaagtctgagatcaaccggtgcttcaagctgtcttgccgggctgtaggcgtccacccacccctggagctgtcccactaccagatcaagtttgccgccacggccctatacgacacctccgtggctacagtgtacgtcatcaactctcacctgagcatgagctcaccgacccactccaagccccgcattggctcagaggacgcctctcccatggggcccacgtctttcgagttcctgctgcccccagactcgcctatcaccatctcgccctcagtggggaccgtgtggccaggaaagaggtgcctggtccaggtggccttccggccagtgctgcccgagaagctgatccgccaggaagccctcccactcctgaacaaagaaatggagaccaaatctttccgaaagaatatggccccccagaggaaggacctgcatggactgtcattctccgttcttcgagcacagaaccgcgacaagctgttcaaagtctctgtcccccacgtcctggagatgcggaagcgggagctgaggcccagttccgacgagtaccaggccgcccgagccaccctgctcagagcgttccaggcgaagtttgacacatttgtagttccctgtgttgttgccagtggcgacatcaaagacaggaaggggtcagaacccctgagcttcagcccccacaacaccctgtacctggagctgtggtgcccgacggtggcaccatctgttgtggtgacgtcccataaaggcaagaccatctttaacttcggcgacgtcgctgtggggcaccgcagtatcaagaagatctccatccagaacgtctctcccgaggatctggccctggacttctccctgctgaaccccaacggcccctttgtcctgctgaaccactccagcctgctgcgtgcaggtgggacccaggtcctggtgctttccttctctccccacgagagcatcctgcctggcccccaggccctcacaccagccgccaagtga

SEQ ID NO: 10 - protein, 603 aa, Homo sapiens
MEPERLTTVIPPSEEQTEITLGEVTEGEIGPFSSIKVPIVFTPVVPGDVQARFKVTFKNPQCPTLHFRVVGVAIDVPVWVPKPSVDLKICMYDRLYQDSVLVHTRSKAALRLKFEVCKELRAHLELLPKTGYIQAQSSYSVQLKFLPRHSLPEDAGRYFDKETRVLEAPMTIWVADQNKPVGFTVHAIVTTSDLELSPSEVDFGYCTIYEAIRTEISLHNHSLLPQEFGFVRLPKFVDVQPNDGFGTILPLETLQFCVIFQPTKAEEHRFQLTCKSEINRCFKLSCRAVGVHPPLELSHYQIKFAATALYDTSVATVYVINSHLSMSSPTHSKPRIGSEDASPMGPTSFEFLLPPDSPITISPSVGTVWPGKRCLVQVAFRPVLPEKLIRQEALPLLNKEMETKSFRKNMAPQRKDLHGLSFSVLRAQNRDKLFKVSVPHVLEMRKRELRPSSDEYQAARATLLRAFQAKFDTFVVPCVVASGDIKDRKGSEPLSFSPHNTLYLELWCPTVAPSVVVTSHKGKTIFNFGDVAVGHRSIKKISIQNVSPEDLALDFSLLNPNGPFVLLNHSSLLRAGGTQVLVLSFSPHESILPGPQALTPAAK

SEQ ID NO: 11 - DNA, 1882 bp, Homo sapiens
gtcccgagcccgccgcggcatggacgcgcccgcccggctgctggccccgctcctgctcctctgcgcgcagcagctccgcggcaccagagcgatgaatgacatcggcgactacgtgggctccaacctggagatctcctggctccccaacctggacgggctgatagccggctacgcccgcaacttccggcctggcatcggaggcccccccgtgaatgtggcccttgccctggaggtggccagcatcgaccacatctcagaggccaacatggagtacaccatgacggtgttcctgcaccagagctggcgggacagcaggctctcctacaaccacaccaacgagaccctgggtctggacagccgcttcgtggacaagctgtggctgcccgacaccttcatcgtgaacgccaagtcggcctggttccacgacgtgacggtggagaacaagctcatccggctgcagcccgacggcgtgatcctgtacagcatccgaatcacctccactgtggcctgcgacatggacctggccaaataccccatggacgagcaggagtgcatgctggacctggagagctacggttactcatcggaggacatcgtctactactggtcggagagccaggagcacatccacgggctggacaagctgcagctggcgcagttcaccatcaccagctaccgcttcaccacggagctgatgaacttcaagtccgctggccagttcccacggctcagcctgcacttccacctgcggaggaaccgcggcgtgtacatcatccaatcctacatgccctccgtcctgctggtcgccatgtcctgggtctccttctggatcagccaggcggcggtgcccgccagggtgtctctaggcatcaccacggtgctgacgatgaccacgctcatggtcagtgcccgctcctccctgccacgggcatcagccatcaaggcactggacgtctacttctggatctgctatgtcttcgtgtttgccgccctggtggagtacgcctttgctcatttcaacgccgactacaggaagaagcagaaggccaaggtcaaggtctccaggccgagggcagagatggacgtgaggaacgccattgtcctcttctccctctctgctgccggcgtcacgcaggagctggccatctcccgccggcagcgccgcgtcccggggaacctgatgggctcctacaggtcggtgggggtggagacaggggagacgaagaaggagggggcagcccgctcaggaggccaggggggcatccgtgcccggctcaggcccatcgacgcagacaccattgacatttacgcccgcgctgtgttccctgcggcgtttgcggccgtcaatgtcatctactgggcggcatacgccatgtgagcacaggactcaggccaccctcgcttgtcctggcgcccggcggcagctgcccagaaacttcctgggagaaagagccctcgggctgccttcccctctgcgtgtttcgaagtgggatgacagtcggccacggaaaacaagaggaagcctcggcctccctgagctctgaccccagcctcacccgaaaggccagcctggggctctccggcaggcagcccgagacctgcacagatgaaggagcagaggttctgaccgagaggctgagccaggccggggtctgggcccttcagggagccgcggatttttatgttcagaaagtgatcctggtttctaggtctttgctctgcaggatcgggatcagagcgtgggaggaggtgggggtggacgtccatccggtgaacagtgaaggcgtttgtgaggtctttctggtcccagcatgaaataaagccttggcctgggggccgcttcattcaaaaaaaaaaaaaaaaaaaaaaaaaaaaaaaaaaa

SEQ ID NO: 12 - protein, 452 aa, Homo sapiens [sequence omitted]

SEQ ID NO: 13 - DNA, 2147 bp, Homo sapiens
gttttagtttgtgcctcagctgctggctacagcttcccgggggagccgggtaccacccgggcctggagacatgaggaggcagggatgtgaggggcgggggacaggacagccggccttccgttaaatatctgctcctcgcgctcgagcctccctgcctattgtcggggccggaggcgagccgacgcagcatcagctcgtcaacgggaaggaagatgcctccctgcacgcccgccgcgcacagagcataaagaatctgcgctgaggaggcaggagaagaaagccgaatctatctaccgccggggagccagaagatggaggaagctgtaccgtgccaacggccacctcttccaagccaagcgctttaacaggagagcgtactgcggtcagtgcagcgagaggatatggggcctcgcgaggcaaggctacaggtgcatcaactgcaaactgctggtccataagcgctgccacggcctcgtcccgctgacctgcaggaagcatatggattctgtcatgccttcccaagagcctccagtagacgacaagaacgaggacgccgaccttccttccgaggagacagatggaattgcttacatttcctcatcccggaagcatgacagcattaaagacgactcggaggaccttaagccagttatcgatgggatggatggaatcaaaatctctcaggggcttgggctgcaggactttgacctaatcagagtcatcgggcgcgggagctacgccaaggttctcctggtgcggttgaagaagaatgaccaaatttacgccatgaaagtggtgaagaaagagctggtgcatgatgacgaggatattgactgggtacagacagagaagcacgtgtttgagcaggcatccagcaaccccttcctggtcggattacactcctgcttccagacgacaagtcggttgttcctggtcattgagtacgtcaacggcggggacctgatgttccacatgcagaggcagaggaagctccctgaggagcacgccaggttctacgcggccgagatctgcatcgccctcaacttcctgcacgagagggggatcatctacagggacctgaagctggacaacgtcctcctggatgcggacgggcacatcaagctcacagactacggcatgtgcaaggaaggcctgggccctggtgacacaacgagcactttctgcggaaccccgaattacatcgcccccgaaatcctgcggggagaggagtacgggttcagcgtggactggtgggcgctgggagtcctcatgtttgagatgatggccgggcgctccccgttcgacatcatcaccgacaacccggacatgaacacagaggactaccttttccaagtgatcctggagaagcccatccggatcccccggttcctgtccgtcaaagcctcccatgttttaaaaggatttttaaataaggaccccaaagagaggctcggctgccggccacagactggattttctgacatcaagtcccacgcgttcttccgcagcatagactgggacttgctggagaagaagcaggcgctccctccattccagccacagatcacagacgactacggtctggacaactttgacacacagttcaccagcgagcccgtgcagctgaccccagacgatgaggatgccataaagaggatcgaccagtcagagttcgaaggctttgagtatatcaacccattattgctgtccaccgaggagtcggtgtgaggccgcgtgcgtctctgtcgtggacacgcgtgattgaccctttaactgtatccttaaccaccgcatatgcatgccaggctgggcacggctccgagggcggccagggacagacgcttgcgccgagaccgcagagggaagcgtcagcgggcgctgctgggagcagaacagtccctcacacctgggcccgggcaggccagcttcgtgctggaggaacttgctgctgtgcctgcgtcgcggcggatccgcggggaccctgccgagggggctgtcatgcggtttccaaggtgcacattttccacggaaacagaactcgatgcactgacctgctccgccaggaaagtgagcgtgtagcgtcctgaggaataaaatgttccgatgatgtggaaaaaaaaaaaaaaaaaaaaaaaaaaaaaaaaaaa

SEQ ID NO: 14 - protein, 409 aa, Homo sapiens
MDSVMPSQEPPVDDKNEDADLPSEETDGIAYISSSRKHDSIKDDSEDLKPVIDGMDGIKISQGLGLQDFDLIRVIGRGSYAKVLLVRLKKNDQIYAMKVVKKELVHDDEDIDWVQTEKHVFEQASSNPFLVGLHSCFQTTSRLFLVIEYVNGGDLMFHMQRQRKLPEEHARFYAAEICIALNFLHERGIIYRDLKLDNVLLDADGHIKLTDYGMCKEGLGPGDTTSTFCGTPNYIAPEILRGEEYGFSVDWWALGVLMFEMMAGRSPFDIITDNPDMNTEDYLFQVILEKPIRIPRFLSVKASHVLKGFLNKDPKERLGCRPQTGFSDIKSHAFFRSIDWDLLEKKQALPPFQPQITDDYGLDNFDTQFTSEPVQLTPDDEDAIKRIDQSEFEGFEYINPLLLSTEESV

SEQ ID NO: 15 - DNA, 2044 bp, Homo sapiens
agaacatcgctcggtgccagacaggcaggacgcagcgggctggcctgcggggctcactgctgccccccggggccgagcacgaaagggagagttggagggcgcttcctcgccgggtgttgcggtgtgagcggggactggtgagtgtgtgctgtcttcagagagagaagagcagttttcaggaatctatctaccgccggggagccagaagatggaggaagctgtaccgtgccaacggccacctcttccaagccaagcgctttaacaggagagcgtactgcggtcagtgcagcgagaggatatggggcctcgcgaggcaaggctacaggtgcatcaactgcaaactgctggtccataagcgctgccacggcctcgtcccgctgacctgcaggaagcatatggattctgtcatgccttcccaagagcctccagtagacgacaagaacgaggacgccgaccttccttccgaggagacagatggaattgcttacatttcctcatcccggaagcatgacagcattaaagacgactcggaggaccttaagccagttatcgatgggatggatggaatcaaaatctctcaggggcttgggctgcaggactttgacctaatcagagtcatcgggcgcgggagctacgccaaggttctcctggtgcggttgaagaagaatgaccaaatttacgccatgaaagtggtgaagaaagagctggtgcatgatgacgaggatattgactgggtacagacagagaagcacgtgtttgagcaggcatccagcaaccccttcctggtcggattacactcctgcttccagacgacaagtcggttgttcctggtcattgagtacgtcaacggcggggacctgatgttccacatgcagaggcagaggaagctccctgaggagcacgccaggttctacgcggccgagatctgcatcgccctcaacttcctgcacgagagggggatcatctacagggacctgaagctggacaacgtcctcctggatgcggacgggcacatcaagctcacagactacggcatgtgcaaggaaggcctgggccctggtgacacaacgagcactttctgcggaaccccgaattacatcgcccccgaaatcctgcggggagaggagtacgggttcagcgtggactggtgggcgctgggagtcctcatgtttgagatgatggccgggcgctccccgttcgacatcatcaccgacaacccggacatgaacacagaggactaccttttccaagtgatcctggagaagcccatccggatcccccggttcctgtccgtcaaagcctcccatgttttaaaaggatttttaaataaggaccccaaagagaggctcggctgccggccacagactggattttctgacatcaagtcccacgcgttcttccgcagcatagactgggacttgctggagaagaagcaggcgctccctccattccagccacagatcacagacgactacggtctggacaactttgacacacagttcaccagcgagcccgtgcagctgaccccagacgatgaggatgccataaagaggatcgaccagtcagagttcgaaggctttgagtatatcaacccattattgctgtccaccgaggagtcggtgtgaggccgcgtgcgtctctgtcgtggacacgcgtgattgaccctttaactgtatccttaaccaccgcatatgcatgccaggctgggcacggctccgagggcggccagggacagacgcttgcgccgagaccgcagagggaagcgtcagcgggcgctgctgggagcagaacagtccctcacacctgggcccgggcaggccagcttcgtgctggaggaacttgctgctgtgcctgcgtcgcggcggatccgcggggaccctgccgagggggctgtcatgcggtttccaaggtgcacattttccacggaaacagaactcgatgcactgacctgctccgccaggaaagtgagcgtgtagcgtcctgaggaataaaatgttccgatgatgtggaaaaaaaaaaaaaaaaaaaaaaaaaaaaaaaaaaa

SEQ ID NO: 16 - protein, 409 aa, Homo sapiens; identical to SEQ ID NO: 14

SEQ ID NO: 17 - DNA, 2359 bp, Homo sapiens
gccccgcgcgccgccggagttccgcggagttgaccgggtcggcgccgtcggtcctgagcgctgccttccgcgttccgccgcggccccacctggagcccccgccccgcgccatggccggagctcccggggcgcagcgctgacggcggcggggggagcgcgccatgcccagcaggaccggccccaagatggaagggagcggcggccgcgtccgcctcaaggcgcattacgggggggacatcttcatcaccagcgtggacgccgccacgaccttcgaggagctctgtgaggaagtgagagacatgtgtcgtctgcaccagcagcacccgctcaccctcaagtgggtggacagcgaaggtgacccttgcacggtgtcctcccagatggagctggaagaggctttccgcctggcccgtcagtgcagggatgaaggcctcatcattcatgttttcccgagcacccctgagcagcctggcctgccatgtccgggagaagacaaatctatctaccgccggggagccagaagatggaggaagctgtaccgtgccaacggccacctcttccaagccaagcgctttaacaggagagcgtactgcggtcagtgcagcgagaggatatggggcctcgcgaggcaaggctacaggtgcatcaactgcaaactgctggtccataagcgctgccacggcctcgtcccgctgacctgcaggaagcatatggattctgtcatgccttcccaagagcctccagtagacgacaagaacgaggacgccgaccttccttccgaggagacagatggaattgcttacatttcctcatcccggaagcatgacagcattaaagacgactcggaggaccttaagccagttatcgatgggatggatggaatcaaaatctctcaggggcttgggctgcaggactttgacctaatcagagtcatcgggcgcgggagctacgccaaggttctcctggtgcggttgaagaagaatgaccaaatttacgccatgaaagtggtgaagaaagagctggtgcatgatgacgaggatattgactgggtacagacagagaagcacgtgtttgagcaggcatccagcaaccccttcctggtcggattacactcctgcttccagacgacaagtcggttgttcctggtcattgagtacgtcaacggcggggacctgatgttccacatgcagaggcagaggaagctccctgaggagcacgccaggttctacgcggccgagatctgcatcgccctcaacttcctgcacgagagggggatcatctacagggacctgaagctggacaacgtcctcctggatgcggacgggcacatcaagctcacagactacggcatgtgcaaggaaggcctgggccctggtgacacaacgagcactttctgcggaaccccgaattacatcgcccccgaaatcctgcggggagaggagtacgggttcagcgtggactggtgggcgctgggagtcctcatgtttgagatgatggccgggcgctccccgttcgacatcatcaccgacaacccggacatgaacacagaggactaccttttccaagtgatcctggagaagcccatccggatcccccggttcctgtccgtcaaagcctcccatgttttaaaaggatttttaaataaggaccccaaagagaggctcggctgccggccacagactggattttctgacatcaagtcccacgcgttcttccgcagcatagactgggacttgctggagaagaagcaggcgctccctccattccagccacagatcacagacgactacggtctggacaactttgacacacagttcaccagcgagcccgtgcagctgaccccagacgatgaggatgccataaagaggatcgaccagtcagagttcgaaggctttgagtatatcaacccattattgctgtccaccgaggagtcggtgtgaggccgcgtgcgtctctgtcgtggacacgcgtgattgaccctttaactgtatccttaaccaccgcatatgcatgccaggctgggcacggctccgagggcggccagggacagacgcttgcgccgagaccgcagagggaagcgtcagcgggcgctgctgggagcagaacagtccctcacacctgggcccgggcaggccagcttcgtgctggaggaacttgctgctgtgcctgcgtcgcggcggatccgcggggaccctgccgagggggctgtcatgcggtttccaaggtgcacattttccacggaaacagaactcgatgcactgacctgctccgccaggaaagtgagcgtgtagcgtcctgaggaataaaatgttccgatgatgtggaaaaaaaaaaaaaaaaaaaaaaaaaaaaaaaaaaa

SEQ ID NO: 18 - protein, 592 aa, Homo sapiens
MPSRTGPKMEGSGGRVRLKAHYGGDIFITSVDAATTFEELCEEVRDMCRLHQQHPLTLKWVDSEGDPCTVSSQMELEEAFRLARQCRDEGLIIHVFPSTPEQPGLPCPGEDKSIYRRGARRWRKLYRANGHLFQAKRFNRRAYCGQCSERIWGLARQGYRCINCKLLVHKRCHGLVPLTCRKHMDSVMPSQEPPVDDKNEDADLPSEETDGIAYISSSRKHDSIKDDSEDLKPVIDGMDGIKISQGLGLQDFDLIRVIGRGSYAKVLLVRLKKNDQIYAMKVVKKELVHDDEDIDWVQTEKHVFEQASSNPFLVGLHSCFQTTSRLFLVIEYVNGGDLMFHMQRQRKLPEEHARFYAAEICIALNFLHERGIIYRDLKLDNVLLDADGHIKLTDYGMCKEGLGPGDTTSTFCGTPNYIAPEILRGEEYGFSVDWWALGVLMFEMMAGRSPFDIITDNPDMNTEDYLFQVILEKPIRIPRFLSVKASHVLKGFLNKDPKERLGCRPQTGFSDIKSHAFFRSIDWDLLEKKQALPPFQPQITDDYGLDNFDTQFTSEPVQLTPDDEDAIKRIDQSEFEGFEYINPLLLSTEESV

SEQ ID NO: 19 - DNA, 8726 bp, Homo sapiens
gacaatgctggggagatgaagatagtgtgtggctgcttctggactcaaggaggaggagagagattccgcgagccgacaccatgcgatccaaggcgagggcgaggaagctagccaaaagtgacggtgacgttgtaaataatatgtatgagcccaaccgggacctgctggccagccacagcgcggaggacgaggccgaggacagtgccatgtcgcccatccccgtggggccaccgtcccccttccccaccagcgaggacttcacccccaaggagggctcgccgtacgaggcccctgtctacattcctgaagacattccgatcccagcagacttcgagctccgagagtcctccatcccaggggctggcctgggggtctgggccaagaggaagatggaagccggggagaggctgggcccctgcgtggtggtgccccgggcggcggcaaaggagacagacttcggatgggagcaaatactgacggacgtggaagtgtcgccccaggaaggctgcatcacaaagatctccgaagacctgggcagtgagaagttctgcgtggatgcaaatcaggcgggggctggcagctggctcaagtacatccgtgtggcgtgctcctgcgatgaccagaacctcaccatgtgtcagatcagtgagcagatttactataaagtcattaaggacattgagccaggtgaggagctgctggtgcacgtgaaggaaggcgtctaccccctgggcacagtgccgcccggcctggacgaggagcccacgttccgctgtgacgagtgtgacgaactcttccagtccaagctggacctgcggcgccataagaagtacacgtgtggctcagtgggggctgcgctctacgagggcctggctgaggagctcaagcccgagggccttggcggtggcagcggccaagcccacgagtgcaaggactgcgagcggatgttccccaacaagtacagcctggagcagcacatggtcatccacacggaggagcgcgagtacaaatgcgaccagtgtcccaaggccttcaactggaagtccaacctcatccgccaccagatgtcccacgacagcggcaaacgcttcgaatgtgaaaactgcgtgaaggtgttcacggaccccagcaaccttcagcggcacatccgctcgcagcacgtgggcgctcgggcccacgcctgccccgactgcgggaagaccttcgccacgtcctccggcctcaagcagcacaagcatatccacagcacggtgaagcctttcatatgtgaggtctgccacaagtcctacacgcagttctccaacctgtgccggcacaagcggatgcacgccgactgccgcacgcagatcaagtgcaaggactgtggccagatgttcagcactacctcctccctcaacaagcaccggcgcttctgcgagggcaagaaccattacacgccgggcggcatctttgccccgggcctgcccttgacccccagccccatgatggacaaggcaaaaccctcccccagcctcaatcacgccagcctgggcttcaacgagtactttccctccaggccgcacccggggagcctgcccttctccacggcgcctcccacgttccccgcactcacccccggcttcccgggcatcttccctccatccttgtacccccggccgcctctgctacctcccacatcgctgctcaagagccccctgaaccacacccaggacgccaagctccccagtcccctggggaacccagccctgcccctggtctccgccgtcagcaacagcagccagggcacgacggcagctgcggggcccgaggagaagttcgagagccgcctggaggactcctgtgtggagaagctgaagaccaggagcagcgacatgtcggacggcagtgactttgaggacgtcaacaccaccacggggaccgacctggacacgaccacggggacgggctcggacctggacagcgacgtggacagcgaccctgacaaggacaagggcaagggcaagtccgccgagggccagcccaagtttgggggcggcttggcgcccccgggggccccgaacagcgtggccgaggtgcctgtcttctattcccagcactcattcttcccgccacccgacgagcagctgctgactgcaacgggcgccgccggggactccatcaaggccatcgcatccattgccgagaagtactttggccccggcttcatggggatgcaggagaagaagctgggctcgctcccctaccactcggcgttccccttccagttcctgcccaacttcccccactccctttaccccttcacggaccgagccctcgcccacaacttgctggtcaaggccgagccaaagtcaccccgggacgccctcaaggtgggcggccccagtgccgagtgcccctttgatctcaccaccaagcccaaagacgtgaagcccatcctgcccatgcccaagggcccctcggcccccgcatccggcgaggagcagccgctggacctgagcatcggcagccgggcccgtgccagccaaaacggcggcgggcgggagccccgcaagaaccacgtctatggggaacgcaagctgggcgccggcgaggggctgccccaggtgtgcccggcgcggatgccccagcagcccccgctccactacgccaagccctcgcccttcttcatggaccccatctacagggtagaaaagcggaaggtcacagaccccgtgggagccctgaaggagaagtacctgcggccgtccccgctgctcttccacccccagatgtcagccatagagaccatgacagagaagctggagagctttgcagccatgaaggcggactcgggcagctccctgcagcccctcccccaccaccccttcaacttccggtccccacccccaacgctctccgaccccatcctcaggaagggcaaggagcgatacacgtgcaggtactgtgggaagatcttccccagatcagccaatctcaccagacacctgaggacgcacactggggagcagccgtacaggtgtaagtactgcgaccgctccttcagcatctcttcgaacctccagcggcacgtccggaacatccacaacaaggagaagcctttcaagtgccacctgtgcaaccgctgcttcgggcagcagaccaacctggaccggcacctcaagaagcacgagcacgagaacgcaccagtgagccagcaccccggggtcctcacgaaccacctggggaccagcgcgtcctctcccacctcagagtcggacaaccacgcacttttagacgagaaagaagactcttatttctcggaaatcagaaactttattgccaatagtgagatgaaccaagcatcaacgcgaacagagaaacgggcggacatgcagatcgtggacggcagtgcccagtgtccaggcctagccagtgagaagcaggaggacgtggaggaggaggacgacgatgacctggaggaggacgatgaggacagcctggccgggaagtcgcaggatgacaccgtgtcccccgcacccgagccccaggccgcctacgaggatgaggaggatgaggagccagccgcctccctggccgtgggctttgaccacacccgaaggtgtgctgaggaccacgaaggcggtctgttagctttggagccgatgccgacttttgggaaggggctggacctccgcagagcagctgaggaagcatttgaagttaaagatgtgcttaattccaccttagattctgaggctttaaaacatacactgtgcaggcaggctaagaaccaggcatatgcaatgatgctgtccctttccgaagacactcctctccacaccccctcccagggttctctggacgcttggttgaaggtcactggagccacgtcggagtctggagcatttcaccccatcaaccacctctgacgggctgggcagccgggggccggtggccagagcgagggcaccagccacgaaggacggaggcgggcggggccccggagaaccctgtccctgcgtgtggccactcctcagcatcctccccacccaccatggttcattccgacttttccaatggaaactcagatcccaaaagtccctaaagcagtcgtagagtctcaccatctccaaggattggtcttgagaacactgttcagtgacggccatgcaggtggccgtccaaagacagccaacggagctgcctcgcagaatcagccagtgggcaggtggacgctctgctgagacagaagctggtggccactgccgggtgcccgcgtggggtcgcggaagggaatggatagactggtgtgctcaaaagagagagatcactcaaatgatttttataatgaaatgacaagaataacccttttggtaaccgtattgactgcagagtctatttaagcatgtggttttaaaaatagacagtattttttaaaaatcaaaaaatgacttgcaaattgttttttaaaagtaattttgcattgctttgaaatttgagctcatttgcaaacccgagtctgcctgggaacccgcactgtgcctgggtgtattctttatactgtagataatggagaaattttctatctctgtccctatttgtataagccaaggtgatgctgggtgccccgaggcagaacaagaggcgcggggccacacccgtgaaccatgcagacggccgaagaagtcttaggcagggcgccctgggctgcaggcctgcccgaggctgggatgggaagtgtgcctgccctcgtgtgacatggaattggtgtcaggaccgccacgtggccttcagaggaatccacaggtccccacccaagatccctcaattatatggggaagtcgagggcctgtggcttggatccgccatgcagagatgtggccgggcacccatcttccttccctcctctgtccctgcctcggccaccccacgcgggaacccagcgccgtcctctgaaggcagggccttggccacgtcctgggtctcccacctcccacctgaccccagcggctccggtgtcctccacgtggctgccctggggagcaatcccagcggatcgctccgggccaccaagccgcacctgtgcctgagactccggatggacgacacagtcgtcacgtcgctcttcctgcgggttcttggcgagacacagcttgagaacagaagggcgtcgggggaacctgccgcaaggagcagagacagcacagccccccgggcccagccgcctccctctcttgggacgcaacttcttccccactcggatgggctttaaattattcccataggggccaatttcaaataataatttttttccctgatggaatttaccttaatctgtatataacttgtaattttttctaattcatttcttttcttattttatttcctccttaacagtatttttggcattagacattcttattgtgaagaaataatgttaatataagtatctggtgaaggaccaaaaccgtgtgataaggttgtgtgtcgtgtgggagtggggcgattttttatgtgccaaatacccccgtcccccccatgaatcctgctgtccctgctgccgtttaccagacaatcatatgtttttgttaaatttgcgtttcagttacatttgcatttaagacaagtgttctatttatttcttgtattgtttggaagaaaaaatgatgatagagtcccaaaaagaagagaaaaaaaatgcccaagttgccctttaaaaaaaaagagcgtaaatacaaacaggagtggtgcaagccgccttggtgtgggtttgtgtcacgtgtggacatctcctcaggctttgtgtcacgcgtggacatctcctcaggctgtccccagcggtgacgggaggtgtcctggctgctccaggacaaaagacaatcgtctctgtgggtgccgggtggtccaggcttgcactgaagacgtgccacggggaggctcctgcaggaggctcaacccgacggatcacagtgaaagggattcctcccacgccagatctgcacaacgaggcaagacaggacccacctgtgcgtgcgctggggccatggggtggccccgccggggcagcgggggagctgcctgcagaagagccagctggcgtgtcgggaaggatccaggatctgcaaacacaactgctcaggccttctcacgcgtttccacaacatcccctgggtcagacccaccaggtaccccgtaggaatttccagtttcccttgatctagatgggattcttataaaaattcaacctcagacataaacaccccatttctgtaaacccaaattatatggtttcttctgcgaaagagtaaggtgtgtgcttttttttttttgcaatatgaccccgtctctctgaagtgggacattcggacggatggagccctcagcgtgtcttttcagcaggagcagaaccgatgagagccgcccttaccgttggtctccggatcccccagtcccatcccgccgttttcggctgtcttcctaaccgtcctgtcttctcttggcgctctttccttccacctttcccaagagtcctggttgcacgttttaagtcatatattttcgtccccctgaaaatgatggcaagcccagtttctcctgagcattcagacccccaggccccagcacttggcgttttcaggaggccctgttcttagagcccctgacaaaggcagcacttatttcctgggctggtgcgccccaaaacacggccccgacacttagtgtggccccaggccccagcgagcctcgccctcccagttttgctctgcccagcagtgttggtgcccagagatgacaagggccagggagcctggcccgggtgtgagaattcagagattctggcctccagctgtcaccacaccgtaacggggccatgtaactgtgcagcatggacagggatgcgacggggcagctggctgtgtccatggccaggtggccagggtcagggctgcaagccaggggtccagggcccttccgttcagcccaaatgctgccccaatgctaactccttggattgtcaacccccatcccccaaatggaaattccgaaggaggcctcctcgcacctgccctccgctgctcctcagaccccagcccccagcgagccgacgtccccacccgttcctgctctcatccccaggttgggcacgtggggttcctcctctgtgggcctggcagacccttcatgagtgggacccaagatatcactgacttcaacccagaggatcgagcccctgcaccctgcctggggccctggggtgtggagcagtggctggggtgggcgtggtgtggcctgagagactgcccagctggagaggccttcctttacaaggccacgcgtgcagctgtcccatccagaccccgactggccaagacctccacgtccccagagtccagccctggaaattccaagggccctggcgtcctctgccttccccgcttccccatgagcgtctgcaaaacacttgcctgaatacatatcacgtattttagactcgaagcctcaaagcactggattgtggtcccctgccccctctgtcccgtccccctgcccaagtgactgaaacctactgagctatattcactgtgctgtcctagggggagggagagcagagctcgcccctgcactgcagccttgtgggggagggcaaggctctcctcccagccagggacgccaggacatagctgctcctggtcagtggaggtcagccgggtatcaaaagccatgaaactgtgtctctgtagcaatgagtgatactgtgacaaaaccatccttgcattcttcctagaagagttcctctgctccttccattccatttttgtgtttgttttgttcttttctgtcactgatccgtattaccacttttggaaaaaaataaataaataaataaataaaaggcagcttgagtttccaaacgtgtgattcacttgtgaacaaaagtcattctaacaattgccttcagcgtcacgtgcattgccactgcgctttcggcacgagggatgctgagccctggtgtcagagtcgtaatttaaagcgtgtgtgtatatggactttgtcccttaaggtcgatataaagaatcctcgcagaatcacagacctgtgccgcccgccaccttctgccattgttacattacagatttggtttagttttgttttgttttgttttttcttttagaactgtatagtattgaaaaagaaatcaaatgtaaatgtctggttttcatataatgtttaaaaagaccattgagaaggaggctggcgctcgccccatgtcccccttgattgtaaattgcttctgttctgtttataagtaaactgtgcatgactcctgcttagcggtcattatcgtgtctgttggtgaaatttttattaaaaggaaaattctgtagatgcacttattgaatatgtgattaggatctacgtctgagactaggagtcctgaactgctgacgcgaaagaggcgcagttcccaattaatacggaaatcgctgtgggagaagaatgaaataagacgtgaagtgtaggaaatcatgaaaagaacaattttgcaaattgcattctgatgcttgtgatgaacacaaatgtacttgtgtagagacatttccttaagagaaagcctaggagaagccgatttggaggttaatgctgtagaataggactgtataccaaatgtaatctttccaatgctccaatgaatttatacatgagattgatatgcaataaatctgtgtgcttttctaaaaaaaaaa

SEQ ID NO: 20 - protein, 1275 aa, Homo sapiens
MRSKARARKLAKSDGDVVNNMYEPNRDLLASHSAEDEAEDSAMSPIPVGPPSPFPTSEDFTPKEGSPYEAPVYIPEDIPIPADFELRESSIPGAGLGVWAKRKMEAGERLGPCVVVPRAAAKETDFGWEQILTDVEVSPQEGCITKISEDLGSEKFCVDANQAGAGSWLKYIRVACSCDDQNLTMCQISEQIYYKVIKDIEPGEELLVHVKEGVYPLGTVPPGLDEEPTFRCDECDELFQSKLDLRRHKKYTCGSVGAALYEGLAEELKPEGLGGGSGQAHECKDCERMFPNKYSLEQHMVIHTEEREYKCDQCPKAFNWKSNLIRHQMSHDSGKRFECENCVKVFTDPSNLQRHIRSQHVGARAHACPDCGKTFATSSGLKQHKHIHSTVKPFICEVCHKSYTQFSNLCRHKRMHADCRTQIKCKDCGQMFSTTSSLNKHRRFCEGKNHYTPGGIFAPGLPLTPSPMMDKAKPSPSLNHASLGFNEYFPSRPHPGSLPFSTAPPTFPALTPGFPGIFPPSLYPRPPLLPPTSLLKSPLNHTQDAKLPSPLGNPALPLVSAVSNSSQGTTAAAGPEEKFESRLEDSCVEKLKTRSSDMSDGSDFEDVNTTTGTDLDTTTGTGSDLDSDVDSDPDKDKGKGKSAEGQPKFGGGLAPPGAPNSVAEVPVFYSQHSFFPPPDEQLLTATGAAGDSIKAIASIAEKYFGPGFMGMQEKKLGSLPYHSAFPFQFLPNFPHSLYPFTDRALAHNLLVKAEPKSPRDALKVGGPSAECPFDLTTKPKDVKPILPMPKGPSAPASGEEQPLDLSIGSRARASQNGGGREPRKNHVYGERKLGAGEGLPQVCPARMPQQPPLHYAKPSPFFMDPIYRVEKRKVTDPVGALKEKYLRPSPLLFHPQMSAIETMTEKLESFAAMKADSGSSLQPLPHHPFNFRSPPPTLSDPILRKGKERYTCRYCGKIFPRSANLTRHLRTHTGEQPYRCKYCDRSFSISSNLQRHVRNIHNKEKPFKCHLCNRCFGQQTNLDRHLKKHEHENAPVSQHPGVLTNHLGTSASSPTSESDNHALLDEKEDSYFSEIRNFIANSEMNQASTRTEKRADMQIVDGSAQCPGLASEKQEDVEEEDDDDLEEDDEDSLAGKSQDDTVSPAPEPQAAYEDEEDEEPAASLAVGFDHTRRCAEDHEGGLLALEPMPTFGKGLDLRRAAEEAFEVKDVLNSTLDSEALKHTLCRQAKNQAYAMMLSLSEDTPLHTPSQGSLDAWLKVTGATSESGAFHPINHL

SEQ ID NO: 21 - DNA, 8669 bp, Homo sapiens
gacaatgctggggagatgaagatagtgtgtggctgcttctggactcaaggaggaggagagagattccgcgagccgacaccatgcgatccaaggcgagggcgaggaagctagccaaaagtgacggtgacgttgtaaataatatgtatgagcccaaccgggacctgctggccagccacagcgcggaggacgaggccgaggacagtgccatgtcgcccatccccgtggggccaccgtcccccttccccaccagcgaggacttcacccccaaggagggctcgccgtacgaggcccctgtctacattcctgaagacattccgatcccagcagacttcgagctccgagagtcctccatcccaggggctggcctgggggtctgggccaagaggaagatggaagccggggagaggctgggcccctgcgtggtggtgccccgggcggcggcaaaggagacagacttcggatgggagcaaatactgacggacgtggaagtgtcgccccaggaaggctgcatcacaaagatctccgaagacctgggcagtgagaagttctgcgtggatgcaaatcaggcgggggctggcagctggctcaagtacatccgtgtggcgtgctcctgcgatgaccagaacctcaccatgtgtcagatcagtgagcagatttactataaagtcattaaggacattgagccaggtgaggagctgctggtgcacgtgaaggaaggcgtctaccccctgggcacagtgccgcccggcctggacgaggagcccacgttccgctgtgacgagtgtgacgaactcttccagtccaagctggacctgcggcgccataagaagtacacgtgtggctcagtgggggctgcgctctacgagggcctggctgaggagctcaagcccgagggccttggcggtggcagcggccaagcccacgagtgcaaggactgcgagcggatgttccccaacaagtacagcctggagcagcacatggtcatccacacggaggagcgcgagtacaaatgcgaccagtgtcccaaggccttcaactggaagtccaacctcatccgccaccagatgtcccacgacagcggcaaacgcttcgaatgtgaaaactgcgtgaaggtgttcacggaccccagcaaccttcagcggcacatccgctcgcagcacgtgggcgctcgggcccacgcctgccccgactgcgggaagaccttcgccacgtcctccggcctcaagcagcacaagcatatccacagcacggtgaagcctttcatatgtgaggtctgccacaagtcctacacgcagttctccaacctgtgccggcacaagcggatgcacgccgactgccgcacgcagatcaagtgcaaggactgtggccagatgttcagcactacctcctccctcaacaagcaccggcgcttctgcgagggcaagaaccattacacgccgggcggcatctttgccccgggcctgcccttgacccccagccccatgatggacaaggcaaaaccctcccccagcctcaatcacgccagcctgggcttcaacgagtactttccctccaggccgcacccggggagcctgcccttctccacggcgcctcccacgttccccgcactcacccccggcttcccgggcatcttccctccatccttgtacccccggccgcctctgctacctcccacatcgctgctcaagagccccctgaaccacacccaggacgccaagctccccagtcccctggggaacccagccctgcccctggtctccgccgtcagcaacagcagccagggcacgacggcagctgcggggcccgaggagaagttcgagagccgcctggaggactcctgtgtggagaagctgaagaccaggagcagcgacatgtcggacggcagtgactttgaggacgtcaacaccaccacggggaccgacctggacacgaccacggggacgggctcggacctggacagcgacgtggacagcgaccctgacaaggacaagggcaagggcaagtccgccgagggccagcccaagtttgggggcggcttggcgcccccgggggccccgaacagcgtggccgaggtgcctgtcttctattcccagcactcattcttcccgccacccgacgagcagctgctgactgcaacgggcgccgccggggactccatcaaggccatcgcatccattgccgagaagtactttggccccggcttcatggggatgcaggagaagaagctgggctcgctcccctaccactcggcgttccccttccagttcctgcccaacttcccccactccctttaccccttcacggaccgagccctcgcccacaacttgctggtcaaggccgagccaaagtcaccccgggacgccctcaaggtgggcggccccagtgccgagtgcccctttgatctcaccaccaagcccaaagacgtgaagcccatcctgcccatgcccaagggcccctcggcccccgcatccggcgaggagcagccgctggacctgagcatcggcagccgggcccgtgccagccaaaacggcggcgggcgggagccccgcaagaaccacgtctatggggaacgcaagctgggcgccggcgaggggctgccccaggtgtgcccggcgcggatgccccagcagcccccgctccactacgccaagccctcgcccttcttcatggaccccatctacagggtagaaaagcggaaggtcacagaccccgtgggagccctgaaggagaagtacctgcggccgtccccgctgctcttccacccccagatgtcagccatagagaccatgacagagaagctggagagctttgcagccatgaaggcggactcgggcagctccctgcagcccctcccccaccaccccttcaacttccggtccccacccccaacgctctccgaccccatcctcaggaagggcaaggagcgatacacgtgcaggtactgtgggaagatcttccccagatcagccaatctcaccagacacctgaggacgcacactggggagcagccgtacaggtgtaagtactgcgaccgctccttcagcatctcttcgaacctccagcggcacgtccggaacatccacaacaaggagaagcctttcaagtgccacctgtgcaaccgctgcttcgggcagcagaccaacctggaccggcacctcaagaagcacgagcacgagaacgcaccagtgagccagcaccccggggtcctcacgaaccacctggggaccagcgcgtcctctcccacctcagagtcggacaaccacgcacttttagacgagaaagaagactcttatttctcggaaatcagaaactttattgccaatagtgagatgaaccaagcatcaacgcgaacagagaaacgggcggacatgcagatcgtggacggcagtgcccagtgtccaggcctagccagtgagaagcaggaggacgtggaggaggaggacgacgatgacctggaggaggacgatgaggacagcctggccgggaagtcgcaggatgacaccgtgtcccccgcacccgagccccaggccgcctacgaggatgaggaggatgaggagccagccgcctccctggccgtgggctttgaccacacccgaaggtgtgctgaggaccacgaaggcggtctgttagctttggagccgatgccgacttttgggaaggggctggacctccgcagagcagctgaggaagcatttgaagttaaagatgtgcttaattccaccttagattctgaggctttaaaacatacactgtgcaggcaggctaagaaccagggttctctggacgcttggttgaaggtcactggagccacgtcggagtctggagcatttcaccccatcaaccacctctgacgggctgggcagccgggggccggtggccagagcgagggcaccagccacgaaggacggaggcgggcggggccccggagaaccctgtccctgcgtgtggccactcctcagcatcctccccacccaccatggttcattccgacttttccaatggaaactcagatcccaaaagtccctaaagcagtcgtagagtctcaccatctccaaggattggtcttgagaacactgttcagtgacggccatgcaggtggccgtccaaagacagccaacggagctgcctcgcagaatcagccagtgggcaggtggacgctctgctgagacagaagctggtggccactgccgggtgcccgcgtggggtcgcggaagggaatggatagactggtgtgctcaaaagagagagatcactcaaatgatttttataatgaaatgacaagaataacccttttggtaaccgtattgactgcagagtctatttaagcatgtggttttaaaaatagacagtattttttaaaaatcaaaaaatgacttgcaaattgttttttaaaagtaattttgcattgctttgaaatttgagctcatttgcaaacccgagtctgcctgggaacccgcactgtgcctgggtgtattctttatactgtagataatggagaaattttctatctctgtccctatttgtataagccaaggtgatgctgggtgccccgaggcagaacaagaggcgcggggccacacccgtgaaccatgcagacggccgaagaagtcttaggcagggcgccctgggctgcaggcctgcccgaggctgggatgggaagtgtgcctgccctcgtgtgacatggaattggtgtcaggaccgccacgtggccttcagaggaatccacaggtccccacccaagatccctcaattatatggggaagtcgagggcctgtggcttggatccgccatgcagagatgtggccgggcacccatcttccttccctcctctgtccctgcctcggccaccccacgcgggaacccagcgccgtcctctgaaggcagggccttggccacgtcctgggtctcccacctcccacctgaccccagcggctccggtgtcctccacgtggctgccctggggagcaatcccagcggatcgctccgggccaccaagccgcacctgtgcctgagactccggatggacgacacagtcgtcacgtcgctcttcctgcgggttcttggcgagacacagcttgagaacagaagggcgtcgggggaacctgccgcaaggagcagagacagcacagccccccgggcccagccgcctccctctcttgggacgcaacttcttccccactcggatgggctttaaattattcccataggggccaatttcaaataataatttttttccctgatggaatttaccttaatctgtatataacttgtaattttttctaattcatttcttttcttattttatttcctccttaacagtatttttggcattagacattcttattgtgaagaaataatgttaatataagtatctggtgaaggaccaaaaccgtgtgataaggttgtgtgtcgtgtgggagtggggcgattttttatgtgccaaatacccccgtcccccccatgaatcctgctgtccctgctgccgtttaccagacaatcatatgtttttgttaaatttgcgtttcagttacatttgcatttaagacaagtgttctatttatttcttgtattgtttggaagaaaaaatgatgatagagtcccaaaaagaagagaaaaaaaatgcccaagttgccctttaaaaaaaaagagcgtaaatacaaacaggagtggtgcaagccgccttggtgtgggtttgtgtcacgtgtggacatctcctcaggctttgtgtcacgcgtggacatctcctcaggctgtccccagcggtgacgggaggtgtcctggctgctccaggacaaaagacaatcgtctctgtgggtgccgggtggtccaggcttgcactgaagacgtgccacggggaggctcctgcaggaggctcaacccgacggatcacagtgaaagggattcctcccacgccagatctgcacaacgaggcaagacaggacccacctgtgcgtgcgctggggccatggggtggccccgccggggcagcgggggagctgcctgcagaagagccagctggcgtgtcgggaaggatccaggatctgcaaacacaactgctcaggccttctcacgcgtttccacaacatcccctgggtcagacccaccaggtaccccgtaggaatttccagtttcccttgatctagatgggattcttataaaaattcaacctcagacataaacaccccatttctgtaaacccaaattatatggtttcttctgcgaaagagtaaggtgtgtgcttttttttttttgcaatatgaccccgtctctctgaagtgggacattcggacggatggagccctcagcgtgtcttttcagcaggagcagaaccgatgagagccgcccttaccgttggtctccggatcccccagtcccatcccgccgttttcggctgtcttcctaaccgtcctgtcttctcttggcgctctttccttccacctttcccaagagtcctggttgcacgttttaagtcatatattttcgtccccctgaaaatgatggcaagcccagtttctcctgagcattcagacccccaggccccagcacttggcgttttcaggaggccctgttcttagagcccctgacaaaggcagcacttatttcctgggctggtgcgccccaaaacacggccccgacacttagtgtggccccaggccccagcgagcctcgccctcccagttttgctctgcccagcagtgttggtgcccagagatgacaagggccagggagcctggcccgggtgtgagaattcagagattctggcctccagctgtcaccacaccgtaacggggccatgtaactgtgcagcatggacagggatgcgacggggcagctggctgtgtccatggccaggtggccagggtcagggctgcaagccaggggtccagggcccttccgttcagcccaaatgctgccccaatgctaactccttggattgtcaacccccatcccccaaatggaaattccgaaggaggcctcctcgcacctgccctccgctgctcctcagaccccagcccccagcgagccgacgtccccacccgttcctgctctcatccccaggttgggcacgtggggttcctcctctgtgggcctggcagacccttcatgagtgggacccaagatatcactgacttcaacccagaggatcgagcccctgcaccctgcctggggccctggggtgtggagcagtggctggggtgggcgtggtgtggcctgagagactgcccagctggagaggccttcctttacaaggccacgcgtgcagctgtcccatccagaccccgactggccaagacctccacgtccccagagtccagccctggaaattccaagggccctggcgtcctctgccttccccgcttccccatgagcgtctgcaaaacacttgcctgaatacatatcacgtattttagactcgaagcctcaaagcactggattgtggtcccctgccccctctgtcccgtccccctgcccaagtgactgaaacctactgagctatattcactgtgctgtcctagggggagggagagcagagctcgcccctgcactgcagccttgtgggggagggcaaggctctcctcccagccagggacgccaggacatagctgctcctggtcagtggaggtcagccgggtatcaaaagccatgaaactgtgtctctgtagcaatgagtgatactgtgacaaaaccatccttgcattcttcctagaagagttcctctgctccttccattccatttttgtgtttgttttgttcttttctgtcactgatccgtattaccacttttggaaaaaaataaataaataaataaataaaaggcagcttgagtttccaaacgtgtgattcacttgtgaacaaaagtcattctaacaattgccttcagcgtcacgtgcattgccactgcgctttcggcacgagggatgctgagccctggtgtcagagtcgtaatttaaagcgtgtgtgtatatggactttgtcccttaaggtcgatataaagaatcctcgcagaatcacagacctgtgccgcccgccaccttctgccattgttacattacagatttggtttagttttgttttgttttgttttttcttttagaactgtatagtattgaaaaagaaatcaaatgtaaatgtctggttttcatataatgtttaaaaagaccattgagaaggaggctggcgctcgccccatgtcccccttgattgtaaattgcttctgttctgtttataagtaaactgtgcatgactcctgcttagcggtcattatcgtgtctgttggtgaaatttttattaaaaggaaaattctgtagatgcacttattgaatatgtgattaggatctacgtctgagactaggagtcctgaactgctgacgcgaaagaggcgcagttcccaattaatacggaaatcgctgtgggagaagaatgaaataagacgtgaagtgtaggaaatcatgaaaagaacaattttgcaaattgcattctgatgcttgtgatgaacacaaatgtacttgtgtagagacatttccttaagagaaagcctaggagaagccgatttggaggttaatgctgtagaataggactgtataccaaatgtaatctttccaatgctccaatgaatttatacatgagattgatatgcaataaatctgtgtgcttttctaaaaaaaaaa

SEQ ID NO: 22 - protein, 1256 aa, Homo sapiens
MRSKARARKLAKSDGDVVNNMYEPNRDLLASHSAEDEAEDSAMSPIPVGPPSPFPTSEDFTPKEGSPYEAPVYIPEDIPIPADFELRESSIPGAGLGVWAKRKMEAGERLGPCVVVPRAAAKETDFGWEQILTDVEVSPQEGCITKISEDLGSEKFCVDANQAGAGSWLKYIRVACSCDDQNLTMCQISEQIYYKVIKDIEPGEELLVHVKEGVYPLGTVPPGLDEEPTFRCDECDELFQSKLDLRRHKKYTCGSVGAALYEGLAEELKPEGLGGGSGQAHECKDCERMFPNKYSLEQHMVIHTEEREYKCDQCPKAFNWKSNLIRHQMSHDSGKRFECENCVKVFTDPSNLQRHIRSQHVGARAHACPDCGKTFATSSGLKQHKHIHSTVKPFICEVCHKSYTQFSNLCRHKRMHADCRTQIKCKDCGQMFSTTSSLNKHRRFCEGKNHYTPGGIFAPGLPLTPSPMMDKAKPSPSLNHASLGFNEYFPSRPHPGSLPFSTAPPTFPALTPGFPGIFPPSLYPRPPLLPPTSLLKSPLNHTQDAKLPSPLGNPALPLVSAVSNSSQGTTAAAGPEEKFESRLEDSCVEKLKTRSSDMSDGSDFEDVNTTTGTDLDTTTGTGSDLDSDVDSDPDKDKGKGKSAEGQPKFGGGLAPPGAPNSVAEVPVFYSQHSFFPPPDEQLLTATGAAGDSIKAIASIAEKYFGPGFMGMQEKKLGSLPYHSAFPFQFLPNFPHSLYPFTDRALAHNLLVKAEPKSPRDALKVGGPSAECPFDLTTKPKDVKPILPMPKGPSAPASGEEQPLDLSIGSRARASQNGGGREPRKNHVYGERKLGAGEGLPQVCPARMPQQPPLHYAKPSPFFMDPIYRVEKRKVTDPVGALKEKYLRPSPLLFHPQMSAIETMTEKLESFAAMKADSGSSLQPLPHHPFNFRSPPPTLSDPILRKGKERYTCRYCGKIFPRSANLTRHLRTHTGEQPYRCKYCDRSFSISSNLQRHVRNIHNKEKPFKCHLCNRCFGQQTNLDRHLKKHEHENAPVSQHPGVLTNHLGTSASSPTSESDNHALLDEKEDSYFSEIRNFIANSEMNQASTRTEKRADMQIVDGSAQCPGLASEKQEDVEEEDDDDLEEDDEDSLAGKSQDDTVSPAPEPQAAYEDEEDEEPAASLAVGFDHTRRCAEDHEGGLLALEPMPTFGKGLDLRRAAEEAFEVKDVLNSTLDSEALKHTLCRQAKNQGSLDAWLKVTGATSESGAFHPINHL

SEQ ID NO: 23 - DNA, 1476 bp, Homo sapiens
ccccgccgggctcgcgccgcagaggccggtgaggcgccggcggccacgccgcggaaggcgcgggccgagcagagccgggcgttggagcccgcgcgcgcatggaggcgttgccggcagccccctgagggcagcggggagacaagacccggcgacctcgcgcatccctcgagccgccacgcgctctcgccaccgggcggcgacgggccgcggagccggcgcggccatggcgacgggcggccagcagaaggagaacacgctgcttcacctcttcgccggcgggtgtggaggcacagttggtgctattttcacttgtccactagaagtcattaagacacggttgcagtcttcaagattagctctccggacagtctactatcctcaggttcatctggggaccattagtggagctggaatggtgagaccaacatccgtgacacctggactctttcaggttctgaagtcgatcttggagaaagagggaccaaagtcactttttagaggcttgggtccaaatttggttggagttgcaccatcaagggctgtatactttgcatgttactccaaagccaaagagcaatttaatggcattttcgtgcctaacagcaatattgtgcatattttctcagctggctctgcagcttttatcacaaattccttaatgaatcctatatggatggttaaaacccgaatgcagctagaacagaaagtgaggggctctaagcagatgaatacactccagtgtgctcgttacgtttaccagaccgaaggcattcgtggcttctatagaggattaactgcctcgtatgctggaatttccgaaactataatctgctttgctatttatgaaagtttaaagaagtatctgaaagaagctccattagcctcttctgcaaatgggactgagaaaaattccacaagtttttttggacttatggcagctgctgctctttctaagggctgtgcctcctgcattgcttatccacacgaagtcataaggacgaggctccgggaagagggcaccaagtacaagtcttttgtccagacggcgcgcctggtgttccgggaagaaggctaccttgccttttatagaggactgtttgcccagcttatccggcagatcccaaatactgccattgtgttgtctacttatgagttaattgtgtacctgttagaagaccgtactcagtaacaggccggaaaattgtgctctagaagaataaaactgaaaaactctagagaattttttttccccattgatgtttagaaagtttgagactgaaacaggaaaggccataaaatatctggttcatatcacctgttggacatttccttttggattcatgctttctggaaggtttaaattcattaacgttaatagttaattataactttttttttaacttaagaggattcagggttaagcaccaactaaattaaatcatgctatttaatttaagtataaaaaaaaaaaaaaaa

SEQ ID NO: 24 - protein, 321 aa, Homo sapiens
MATGGQQKENTLLHLFAGGCGGTVGAIFTCPLEVIKTRLQSSRLALRTVYYPQVHLGTISGAGMVRPTSVTPGLFQVLKSILEKEGPKSLFRGLGPNLVGVAPSRAVYFACYSKAKEQFNGIFVPNSNIVHIFSAGSAAFITNSLMNPIWMVKTRMQLEQKVRGSKQMNTLQCARYVYQTEGIRGFYRGLTASYAGISETIICFAIYESLKKYLKEAPLASSANGTEKNSTSFFGLMAAAALSKGCASCIAYPHEVIRTRLREEGTKYKSFVQTARLVFREEGYLAFYRGLFAQLIRQIPNTAIVLSTYELIVYLLEDRTQ

SEQ ID NO: 25 - DNA, 3846 bp, Homo sapiens
cggagagccatggagggagtgagcgcgctgctggcccgctgccccacggccggcctggccggcggcctgggggtcacggcgtgcgccgcggccggcgtgttgctctaccggatcgcgcggaggatgaagccaacgcacacgatggtcaactgctggttctgcaaccaggatacgctggtgccctatgggaaccgcaactgctgggactgtccccactgcgagcagtacaacggcttccaggagaacggcgactacaacaagccgatccccgcccagtacttggagcacctgaaccacgtggtgagcagcgcgcccagcctgcgcgacccttcgcagccgcagcagtgggtgagcagccaagtcctgctgtgcaagaggtgcaaccaccaccagaccaccaagatcaagcagctggccgccttcgctccccgcgaggagggcaggtatgacgaggaggtcgaggtgtaccggcatcacctggagcagatgtacaagctgtgccggccgtgccaagcggctgtggagtactacatcaagcaccagaaccgccagctgcgcgccctgttgctcagccaccagttcaagcgccgggaggccgaccagacccacgcacagaacttctcctccgccgtgaagtccccggtccaggtcatcctgctccgtgccctcgccttcctggcctgcgccttcctactgaccaccgcgctgtatggggccagcggacacttcgccccaggcaccactgtgcccctggccctgccacctggtggcaatggctcagccacacctgacaatggcaccacccctggggccgagggctggcggcagttgctgggcctactccccgagcacatggcggagaagctgtgtgaggcctgggcctttgggcagagccaccagacgggcgtcgtggcactgggcctactcacctgcctgctggcaatgctgctggctggccgcatcaggctccggaggatcgatgccttctgcacctgcctgtgggccctgctgctggggctgcacctggctgagcagcacctgcaggccgcctcgcctagctggctagacacgctcaagttcagcaccacatctttgtgctgcctggttggcttcacggcggctgtggccacaaggaaggcaacgggcccacggaggttccggccccgaaggtcagagaagcagccatgactgcggggggaggacacacggatgctcaggcccaggctttgccaggtccgaagcgggcccctctctgtcctgcctcttttcacctgctcacgccctcccacccccaccctacagccccaggtcctggcccagtccctccactgcctcgaagagtcagtctgccctgccttttcctttcgggcaccaccagccatccccgagtgccctgtagccactcaccactgctgccacctctctggccaatggccctttcactggcctggtgactggaatgtgggcagcgcccacacaggctctggcccatggcttcctactggcagctccaggcacccccctctcaccacgccgtttgctggctctgacactgttgggtgagggtcctggtcctgctgtcttcccttctggcctctgcacaggggtggtgacagtggctacaggctgggcccctggcgtgccctgaccgtgcagcagagtgaggctggggcagcagagagccccagcctcacccctgaggagcacctgtggtctgtccccttggtcctgcttatggctggaccggccctgcaggaggtggtggagccgtgaaggaggccgagctgcagctctggctgctgcttggcctcctgctccaagaccctcccgagtccccggaaatggagagtgcagttcttgggcccagcctggccttcgccatgagtttggggagcgagaccccacctgagacaggcagtaggagcctgtgctgaccttggggaatctgagcttttccaagggtaaggggcccagggtatgcaggccttcagtgacatcaggtcgttgtcatcctttccctccctgacctgtcacgagcctctgcaggtgcctgctcaccatggcccagcgccactctgtcctccgactcaggtgagggggcagcccacagacctgctcctcagtagcagggcctggccaggcccctgctgttctcagcctcagtttgccatctatgaaatgaggtggacccctctccatagcccttgggtgccagctcagtgggtgtggggatcacatgaggtggctcatgaggacacactctggaagtcgaggggctgccacgtgcagaggaagttcccggcctgggggctttatccaggggtcccagtcgagagtggcccgaggccgtccctcaccgggcatgttccctctggctgcccactccctcagggcccacatgtcctgccactcgccactctgagcacgagttcaccttccagatgtggccagggtgtgccagctcctctctcctgtgcgttggaaccccgggggaggcaagagcagatcacaggtgcatgagggttacacccgtcacctgggtctgccgggatgggttgggggggcaggtgccaggcctcactgctgtgaatctgccacgcctgggggtcctagaggctgccccaccccagtgattgggtagcagctcacatcccacccagcttcacaagtgaggaacccaggtgcatcgggagaccctcgggggcttctgtggcctctgtgcccgatgacctgcgtggcttcagacaaggccccagcgttactgggctcagcttgttgttctgtgtggagcgtgaggtgagaaaacccctctgaaaagatgtggtcggggccacgcttcccactggttctgcagtgaggagttggggcgggtgagccaaagcggccccccatggtgtctacctgaggggcagggaaccgcctgcctgtgcactcacgccaccccccagcccacaaagagcccatctgagagaaggacgtggtggagccaggacgggaaagcgtcctgtcggctggccatgctgttgcttgcgtctcgaatcttcggttctcgaggaagtgttgacagtgtgatgctaatgtctgcttttcttggcgttgggtagaagcaggacatctgtgtgtatgtgcgtatttaaattagattatttataataaccagagccagccctcgcgctggccaggatcctcctgccgagctgatgtcgctcctgccctctgccggggtccggaagcgacatctcaggaggtagctctcagcagagtgaggattcctgcctttcgtagagttttgtgtgactttttaaattattcatgtgtcccttaaaagtttcactacgtggagaaaattccagcaccaagtgttgtggcaacagctgagagagtgcaggcaccactgtgttgtggcttgttgaccgggaatgtgtcacccctgccagggaactcttctcctcgcgggggacttgggatggccatcagaccttctagggtctggctggggtcatcctaggtatgggtgaccgtccctgagacataagcgaggtagattcagccatcctcaccctcagacttgaggtccccacccaggccaagccggccccccgtaccccttgcctgggagcaaaccgccaggacgcagcctccacgccgcacctgccacattcagccctgcccaggaaggaacacatgacccttctgtctgtgactgttgctgagtctctgtctcatgtcgtagaattgtggataattgtctagtgaccctctcatcactgtaaccatcgcgcctggcctagatgtcgtgttttggatgctgtgttttcaataaatgcctctggggccctgctttta

SEQ ID NO: 26 - protein, 392 aa, Homo sapiens
MEGVSALLARCPTAGLAGGLGVTACAAAGVLLYRIARRMKPTHTMVNCWFCNQDTLVPYGNRNCWDCPHCEQYNGFQENGDYNKPIPAQYLEHLNHVVSSAPSLRDPSQPQQWVSSQVLLCKRCNHHQTTKIKQLAAFAPREEGRYDEEVEVYRHHLEQMYKLCRPCQAAVEYYIKHQNRQLRALLLSHQFKRREADQTHAQNFSSAVKSPVQVILLRALAFLACAFLLTTALYGASGHFAPGTTVPLALPPGGNGSATPDNGTTPGAEGWRQLLGLLPEHMAEKLCEAWAFGQSHQTGVVALGLLTCLLAMLLAGRIRLRRIDAFCTCLWALLLGLHLAEQHLQAASPSWLDTLKFSTTSLCCLVGFTAAVATRKATGPRRFRPRRSEKQP

SEQ ID NO: 27 - DNA, 5217 bp, Homo sapiens
atgtcagcaggctggaccccgcggcgcctggcggcgttgccatggcaacgcgcgtacacaggccggccgggcgggcggggtgccgggtgcgagctggagactccgcgggagcgcggccgggaggcttcgccccggagctggcccgacgcctcccgagctggcagggctctcggcggaggtcggagcgtgggcttcctcctcccgccagggaaaacagagaggatgaaggcctatctaaagagcgcagaaggcttttttgtcctaaataaaagtaccacaattggaaggcatgaaaattcagaccttgttttacagtctcctgacatcgacaaccaccatgcactcattgaatataacgaggcggagtgcagctttgttctccaggacttcaattcccgcaacggcacgtttgtcaacgagtgccacattcaaaacgtggctgtgaagctcatccctggagacatcctgagatttgggtctgcagggctgacctatgaactggtcattgaaaatccacctccggtctctttcccatggatgaggggcccagcaccatggccagggccacagccacctcgtgccacacagcagccaaaccaggcccccccaccatcacatatccccttccaccaaggtgtccagccagcaccgatgcaaaggagctggtcccaggcctttcccagacccaccgtggtcctgccggcctcccacaggcggcctgtgagcgccaacaaggagatgttctcgttcgtggtggacgacgcccgcaagccacccgtcatcaagcaagtgtggaccaatgccatgaaactgtcagaaaaatcagtggccgaggggattcctggggcagttccccctgcggagatttatgtggaggaggacttggcccagcaggacaaggatgaaataattctgctgctgggaaaagaggtcagccgtctctcagattatgaaattgaatccaaatacaaagacgtcataatagcaaacctgcagaatgaagtggctgagctgagtcagaaggtgtcagagaccaccacctccaggcagaatgagaaggagatctcgcagaagtgtcaggttctggatgaagacatcgatgccaaacagaaagagatccagagcttgaaaagccagatcagtgccctacagaaaggctacagcaaggtgctgtgccagaccctgtcagagcggaactcagaaatcacatccctgaagaatgagggcgagaacttaaagagagacaacgctatcacatcagggatggtgtcatctttgcaaaaagacatattagcaaaggatgagcaagttcaacaactaaaggaagaggtcagtcacctaaaaagtcagaacaaggacaaggaccaccagctggaagcccttggctctagatgctcggtgctaaaggaagagttaaaacaggaagatgctcacagggagctcagggaagcccaggagaaagagttaaaactctgcaaaacccaaatccaagacatggagaaagaaatgaagaagcttagggcagagctgaggaagagttgtactgaacaaagcgtgatctctaggactctgagagaaaaaagcaaggttgaagagaagcttcaggaggattccagaaggaaattgcttcagctgcaagaaatggggaacagagagagcgtcattaaaatcaatttggagagggcagtaggtcagctggagcacttcagaagtcaagtcatcaaggccacctatggacgggcgaagccgttccgggacaagcccgtcaccgaccaacagttaatagagaaaattacccaggtcactgaggacaacatcaattttcagcagaaaaagtggaccctccagaaagagacccagctgagcaactccaagcaggaggagaccaccgagaacatcgagaagctgaggacgtcgctggacagctgccaggcttgcatgaaaatatcctgttgcagccatgacctgaagaaggaggtcgaccttcttcagcacctccaggtgagcccacctgtctcggggctccagaaggtggtgctggacgtcctgaggcacgcgctgtcctggctggaggaggtggagcagctcctccgggacctcgggatcctgccctccagccccaacaaagatcaagttcaacagttctcaggaaactcagcagtctttactgcaggaaaagctgcgggagcatctggcagagaaggagaagctgaacgaggagaggctagagcaagaggagaagctcaaagccaaaatcaggcaactgacggaagagaaggcggtaaggctttggaggagtacattactcaagagagaaacagagcgaaagagactttagaggaagaacggaagagaatgcaagaactggagagcctcctggcccagcagaagaaggctttggcgaaaagcattacccaggagaagaacagagtgaaggaagcattagaggaagagcagacaagagtccaagagctggaggaacgcttggcccgccagaaggagatctcagagagcaacattgcgtacgagaaacgcaaagcaaaggaggccatggagaaggaaaagaaaaaggtgcaagacctggagaatcgcttaaccaagcagaaagaggaattagaattaaaagagcaaaaagaggacgttttaaataataaattaagtgacgcactggccatggttgaagagactcagaaaacaaaggcaactgaaagtctaaaagcagagagcctcgccttgaaattaaatgaaacattagccgaactggaaactaccaagacaaaaatgatcatggtggaagagcggctaatcctgcagcagaagatggtaaaggccctccaggatgagcaggaatcacagagacacgggtttgaagaagagatcatggaatataaggagcaaatcaaacagcacgcccagacaattgtgagcctcgaagagaaactccagaaagtcactcagcaccataaaaaaatagaaggcgagattgcaacattgaaggacaatgacccagccccaaaggaggaaaggccgcaagaccctctggtggctcccatgacagagagcagtgccaaagacatggcgtacgaacatctgatagatgacttattggctgctcagaaggaaattctgtctcagcaggaagtcatcatgaagttaaggaaagaccttaccgaagcccacagcagaatgtcggatttgagaggggagctaaacgagaagcagaagatggaactggagcagaacgtggtgctggtccagcagcagagcaaggagctgagtgtgctcaaggagaagatggcccagatgagcagcctggtagaaaagaaagatcgggagctgaaggcccttgaggaggcactcagggcttcccaagagaaacacagactccagctgaacacagagaaggaacagaagccccggaagaagacccagacgtgtgacacctctgtgcagatagaacccgtccacactgaggccttctccagcagccaagagcagcaatccttcagcgatctaggggtcaggtgcaaagggtcccggcacgaggaggtcattcagcgtcagaaaaaggccttatctgaacttcgagcgcgaattaaagaactcgagaaggcgcgctcaccagatcataaagaccaccagaatgaatcatttctagatttaaagaacctcagaatggaaaacaatgtccagaaaatactactggatgcaaaaccggatttgccaactctctcaagaatagagatcctagcgcctcagaatggcctttgcaacgcaaggttcggctcagccatggagaagtcagggaagatggatgtggctgaggctttagagctcagtgaaaagctgtacctggatatgagcaaaaccctcggaagtctcatgaacatcaagaatatgtcaggccacgtgtccatgaaatacctctcccgccaggagagggagaaggtcaaccagcttcgacaaagggacctcgacctggtgtttgataagatcacccaactcaagaaccagctggggaggaaagaggagctgttgagaggatatgaaaaggacgttgaacagctcaggcggagcaaagtgtccattgagatgtaccagtcgcaggtggcaaagctggaggatgatatctacaaagaggccgaagagaaggccctgctgaaggaggccctggagcgcatggagcaccagctgtgccaggagaagaggatcaacagggccatccggcagcagaaggttggaaccagaaaagcctccctaaagatggaccaagaaagagagatgctgaggaaagagacctccagcaagtccagccagagccttttgcattctaagcccagtggaaagtactagagaaacctcgtcccaccaggcctcatgtgatcctctgtgagttcatgtgactcttctgtgtcatctgtgtcaaaatactgagttgcttttgtaagtctttaaagattgttaccctagtgtttcatttcctagaccagtattttgaacaatattatattttggagactgtggggagaagggttcttctttaaaaatacctatgaatgtacacgaactcaggtatatgaagaatagaagtgtgtaacccagatgtccaggcctggtagatataattatgtggtccacgttgggtcatgatgttcccaaatatcaaacctcctaagacttccaacagactcacacttgagaaaacctaagacttgtactggagcctcagggcagaattgtaaccttggagctctcagggccttgggatagtgaattcaagtctccgttatggcctggcaggatggctcatgcctgtaatctcagcactttgggaggccgaggcaggcggattataagatcaggagtttgagaccagcctggcaaacatagtgaatacctgtctctactaaaaatacaaaaattagccaggtgtggtggcacatgcctgtagtcccagctacacaggaggctgaggtgggagaatcacttgaacctaggaggcagaggttgcagtgagccaagaccacgccattgcacgccagcctaacagagtgagactctgtctttaaaaaaaaaaaaaaatggctgggcctgtaatcccagctactcgggaggctgagacaggagaatcacttcaacccgggaggtgatgattgcagggagccaagatcacacaactgcactctagcctgagtgacagagcaagactccatctca

SEQ ID NO: 28 - protein, 1450 aa, Homo sapiens
MSAGWTPRRLAALPWQRAYTGRPGGRGAGCELETPRERGREASPRSWPDASRAGRALGGGRSVGFLLPPGKTERMKAYLKSAEGFFVLNKSTTIGRHENSDLVLQSPDIDNHHALIEYNEAECSFVLQDFNSRNGTFVNECHIQNVAVKLIPGDILRFGSAGLTYELVIENPPPVSFPWMRGPAPWPGPQPPRATQQPNQAPPPSHIPFHQGVQPAPMQRSWSQAFPRPTVVLPASHRRPVSANKEMFSFVVDDARKPPVIKQVWTNAMKLSEKSVAEGIPGAVPPAEIYVEEDLAQQDKDEIILLLGKEVSRLSDYEIESKYKDVIIANLQNEVAELSQKVSETTTSRQNEKEISQKCQVLDEDIDAKQKEIQSLKSQISALQKGYSKVLCQTLSERNSEITSLKNEGENLKRDNAITSGMVSSLQKDILAKDEQVQQLKEEVSHLKSQNKDKDHQLEALGSRCSVLKEELKQEDAHRELREAQEKELKLCKTQIQDMEKEMKKLRAELRKSCTEQSVISRTLREKSKVEEKLQEDSRRKLLQLQEMGNRESVIKINLERAVGQLEHFRSQVIKATYGRAKPFRDKPVTDQQLIEKITQVTEDNINFQQKKWTLQKETQLSNSKQEETTENIEKLRTSLDSCQACMKISCCSHDLKKEVDLLQHLQVSPPVSGLQKVVLDVLRHALSWLEEVEQLLRDLGILPSSPNKDQVQQFSGNSAVFTAGKAAGASGREGEAERGEARARGEAQSQNQATDGREGGKALEEYITQERNRAKETLEEERKRMQELESLLAQQKKALAKSITQEKNRVKEALEEEQTRVQELEERLARQKEISESNIAYEKRKAKEAMEKEKKKVQDLENRLTKQKEELELKEQKEDVLNNKLSDALAMVEETQKTKATESLKAESLALKLNETLAELETTKTKMIMVEERLILQQKMVKALQDEQESQRHGFEEEIMEYKEQIKQHAQTIVSLEEKLQKVTQHHKKIEGEIATLKDNDPAPKEERPQDPLVAPMTESSAKDMAYEHLIDDLLAAQKEILSQQEVIMKLRKDLTEAHSRMSDLRGELNEKQKMELEQNVVLVQQQSKELSVLKEKMAQMSSLVEKKDRELKALEEALRASQEKHRLQLNTEKEQKPRKKTQTCDTSVQIEPVHTEAFSSSQEQQSFSDLGVRCKGSRHEEVIQRQKKALSELRARIKELEKARSPDHKDHQNESFLDLKNLRMENNVQKILLDAKPDLPTLSRIEILAPQNGLCNARFGSAMEKSGKMDVAEALELSEKLYLDMSKTLGSLMNIKNMSGHVSMKYLSRQEREKVNQLRQRDLDLVFDKITQLKNQLGRKEELLRGYEKDVEQLRRSKVSIEMYQSQVAKLEDDIYKEAEEKALLKEALERMEHQLCQEKRINRAIRQQKVGTRKASLKMDQEREMLRKETSSKSSQSLLHSKPSGKY

SEQ ID NO: 29 - DNA, 2272 bp, Homo sapiens
gaaagctggtgtggagggagaagcgagtgtggtccggagaaagaaggcgtggagaagagggagggagcgagagcgagagaataaatatataaataaatacgagaacgaaatccactccgcagtctccgggctcggaaactttggccccgagcgccagagcgccagagcgcgagagcgcggcgctcgccactctgaggctggcggcctcgattccggccgcgttcccccggcccccctccgtccgcggggcctggtctccgggttctgccaggcgcatcagcccgcacaacttctggccgaggccagccggcagaggcggacttggggttggagtgtttgtttgtttgaacttcctcgtcgtcgccaccttccctccccccaacctccaccccacctcacccccctccccagcttctggacgcgtttgactgcagccaggggtggggggtgggggtagggagtgtgtgtggaggggagggagaagaggttaaaaaaaagaagacgaagaagacggaaagaaagagatcgcagcaggggtgaagggagcggacgggaagcgatttttgccgactttggattcgtccccggcgtgcgcaagaatggcggcccttcccggcacggtaccgagaatgatgcggccggctccggggcagaactacccccgcacgggattccctttggaagtgtccaccccgcttggccaaggccgggtcaatcagctgggaggggtcttcatcaatgggcgacccctgcctaaccacatccgccacaagatagtggagatggcccaccatggcatccggccctgtgtcatctcccgacagctgcgtgtctcccacggctgcgtctccaagattctttgccgctaccaggagaccgggtccatccggcctggggccatcggcggcagcaagcccagacaggtggcgactccggatgtagagaaaaagattgaggagtacaagagggaaaacccaggcatgttcagctgggagatccgggacaggctgctgaaggatgggcactgtgaccgaagcactgtgccctcaggtttagtgagttcgattagccgcgtgctcagaatcaagttcgggaagaaagaggaggaggatgaagcggacaagaaggaggacgacggcgaaaagaaggccaaacacagcatcgacggcatcctgggcgacaaagggaaccggctggacgagggctcggatgtggagtcggaacctgacctcccactgaagcgcaagcagcgacgcagtcggaccacattcacggccgagcagctggaggagctggagaaggcctttgagaggacccactacccagacatatacacccgcgaggagctggcgcagaggaccaagctgacagaggcgcgtgtgcaggtctggttcagtaaccgccgcgcccgttggcgtaagcaggcaggagccaaccagctggcggcgttcaaccaccttctgccaggaggcttcccacccaccggcatgcccacgctgcccccctaccagctgccggactccacctaccccaccaccaccatctcccaagatgggggcagcactgtgcaccggcctcagcccctgccaccgtccaccatgcaccagggcgggctggctgcagcggctgcagccgccgacaccagctctgcctacggagcccgccacagcttctccagctactctgacagcttcatgaatccggcggcgccctccaaccacatgaacccggtcagcaacggcctgtctcctcaggtgatgagcatcttgggcaaccccagtgcggtgcccccgcagccacaggctgacttctccatctccccgctgcatggcggcctggactcggccacctccatctcagccagctgcagccagcgggccgactccatcaagccaggggacagcctgcccacctcccaggcctactgcccacccacctacagcaccaccggctacagcgtggaccccgtggccggctatcagtacggccagtacggccagagtgagtgcctggtgccctgggcgtcccccgtccccattccttctcccacccccagggcctcctgcttgtttatggagagctacaaggtggtgtcagggtggggaatgtccatttcacagatggaaaaattgaagtccagccagatggaacagttcacctaaaatgacactgagttgggcaaaacccaggacatctcctggctaagcctctgcttccgtactatggctccaacagaaataaaatacacagcacaaatatcaaaaaaaaaaaa

SEQ ID NO: 30 - protein, 520 aa, Homo sapiens
MAALPGTVPRMMRPAPGQNYPRTGFPLEVSTPLGQGRVNQLGGVFINGRPLPNHIRHKIVEMAHHGIRPCVISRQLRVSHGCVSKILCRYQETGSIRPGAIGGSKPRQVATPDVEKKIEEYKRENPGMFSWEIRDRLLKDGHCDRSTVPSGLVSSISRVLRIKFGKKEEEDEADKKEDDGEKKAKHSIDGILGDKGNRLDEGSDVESEPDLPLKRKQRRSRTTFTAEQLEELEKAFERTHYPDIYTREELAQRTKLTEARVQVWFSNRRARWRKQAGANQLAAFNHLLPGGFPPTGMPTLPPYQLPDSTYPTTTISQDGGSTVHRPQPLPPSTMHQGGLAAAAAAADTSSAYGARHSFSSYSDSFMNPAAPSNHMNPVSNGLSPQVMSILGNPSAVPPQPQADFSISPLHGGLDSATSISASCSQRADSIKPGDSLPTSQAYCPPTYSTTGYSVDPVAGYQYGQYGQSECLVPWASPVPIPSPTPRASCLFMESYKVVSGWGMSISQMEKLKSSQMEQFT

SEQ ID NO: 31 - DNA, 2255 bp, Homo sapiens
gaaagctggtgtggagggagaagcgagtgtggtccggagaaagaaggcgtggagaagagggagggagcgagagcgagagaataaatatataaataaatacgagaacgaaatccactccgcagtctccgggctcggaaactttggccccgagcgccagagcgccagagcgcgagagcgcggcgctcgccactctgaggctggcggcctcgattccggccgcgttcccccggcccccctccgtccgcggggcctggtctccgggttctgccaggcgcatcagcccgcacaacttctggccgaggccagccggcagaggcggacttggggttggagtgtttgtttgtttgaacttcctcgtcgtcgccaccttccctccccccaacctccaccccacctcacccccctccccagcttctggacgcgtttgactgcagccaggggtggggggtgggggtagggagtgtgtgtggaggggagggagaagaggttaaaaaaaagaagacgaagaagacggaaagaaagagatcgcagcaggggtgaagggagcggacgggaagcgatttttgccgactttggattcgtccccggcgtgcgcaagaatggcggcccttcccggcacggtaccgagaatgatgcggccggctccggggcagaactacccccgcacgggattccctttggaagtgtccaccccgcttggccaaggccgggtcaatcagctgggaggggtcttcatcaatgggcgacccctgcctaaccacatccgccacaagatagtggagatggcccaccatggcatccggccctgtgtcatctcccgacagctgcgtgtctcccacggctgcgtctccaagattctttgccgctaccaggagaccgggtccatccggcctggggccatcggcggcagcaagcccagacaggtggcgactccggatgtagagaaaaagattgaggagtacaagagggaaaacccaggcatgttcagctgggagatccgggacaggctgctgaaggatgggcactgtgaccgaagcactgtgccctcagtgagttcgattagccgcgtgctcagaatcaagttcgggaagaaagaggaggaggatgaagcggacaagaaggaggacgacggcgaaaagaaggccaaacacagcatcgacggcatcctgggcgacaaagggaaccggctggacgagggctcggatgtggagtcggaacctgacctcccactgaagcgcaagcagcgacgcagtcggaccacattcacggccgagcagctggaggagctggagaaggcctttgagaggacccactacccagacatatacacccgcgaggagctggcgcagaggaccaagctgacagaggcgcgtgtgcaggtctggttcagtaaccgccgcgcccgttggcgtaagcaggcaggagccaaccagctggcggcgttcaaccaccttctgccaggaggcttcccacccaccggcatgcccacgctgcccccctaccagctgccggactccacctaccccaccaccaccatctcccaagatgggggcagcactgtgcaccggcctcagcccctgccaccgtccaccatgcaccagggcgggctggctgcagcggctgcagccgccgacaccagctctgcctacggagcccgccacagcttctccagctactctgacagcttcatgaatccggcggcgccctccaaccacatgaacccggtcagcaacggcctgtctcctcaggtgatgagcatcttgggcaaccccagtgcggtgcccccgcagccacaggctgacttctccatctccccgctgcatggcggcctggactcggccacctccatctcagccagctgcagccagcgggccgactccatcaagccaggggacagcctgcccacctcccaggcctactgcccacccacctacagcaccaccggctacagcgtggaccccgtggccggctatcagtacggccagtacggccagagtgagtgcctggtgccctgggcgtcccccgtccccattccttctcccacccccagggcctcctgcttgtttatggagagctacaaggtggtgtcagggtggggaatgtccatttcacagatggaaaaattgaagtccagccagatggaacagttcacctaaaatgacactgagttgggcaaaacccaggacatctcctggctaagcctctgcttccgtactatggctccaacagaaataaaatacacagcacaaatatca

SEQ ID NO: 32 - protein, 518 aa, Homo sapiens
MAALPGTVPRMMRPAPGQNYPRTGFPLEVSTPLGQGRVNQLGGVFINGRPLPNHIRHKIVEMAHHGIRPCVISRQLRVSHGCVSKILCRYQETGSIRPGAIGGSKPRQVATPDVEKKIEEYKRENPGMFSWEIRDRLLKDGHCDRSTVPSVSSISRVLRIKFGKKEEEDEADKKEDDGEKKAKHSIDGILGDKGNRLDEGSDVESEPDLPLKRKQRRSRTTFTAEQLEELEKAFERTHYPDIYTREELAQRTKLTEARVQVWFSNRRARWRKQAGANQLAAFNHLLPGGFPPTGMPTLPPYQLPDSTYPTTTISQDGGSTVHRPQPLPPSTMHQGGLAAAAAAADTSSAYGARHSFSSYSDSFMNPAAPSNHMNPVSNGLSPQVMSILGNPSAVPPQPQADFSISPLHGGLDSATSISASCSQRADSIKPGDSLPTSQAYCPPTYSTTGYSVDPVAGYQYGQYGQSECLVPWASPVPIPSPTPRASCLFMESYKVVSGWGMSISQMEKLKSSQMEQFT

SEQ ID NO: 33 - DNA, 4333 bp, Homo sapiens
gccccagattcctgggacccaatcccggatttcagaacctcaggaccttgcaagtccgagctaggatttctccctggactttagattcctggaacgggacgtcaggccgtattccggatccctagatcccgtgggagattctccgattccgaacggattccagatcccaagattcctgatctgccggcccaggctcctgccccgcccccggttcccagtgcgcggcgccccgcgcctgagcgcccccgcatggcggggccgtgtccccggtccggggcggagcgcgccggcagctgctggcaggacccgctggccgtggcgctgagccggggccggcagctcgcggcgcccccgggccggggctgcgcgcggagccggccgctcagcgtggtctacgtgctgacccgggagccgcagcccgggctcgagcctcgggagggaaccgaggcggagccgctgcccctgcgctgcctgcgcgaggcttgcgcgcaggtcccccggccgcggccgcccccgcagctgcgcagcctgcccttcgggacgctggagctaggcgacaccgcggctctggatgccttctacaacgcggatgtggtggtgctggaggtgagcagctcgctggtacagccctccctgttctaccaccttggtgtgcgtgagagcttcagcatgaccaacaatgtgctcctctgctcccaggccgacctccctgacctgcaggccctgcgggaggatgttttccagaagaactcggattgcgttggcagctacacactgatcccctatgtggtgacggccactggtcgggtgctgtgtggtgatgcaggccttctgcggggcctggctgatgggctggtacaggctggagtggggaccgaggccctgctcactcccctggtgggccggcttgcccgcctgctggaggccacacccacagactcttgtggctatttccgggagaccattcggcgggacatccggcaggcgcgggagcggttcagtgggccacagctgcggcaggagctggctcgcctgcagcggagactggacagcgtggagctgctgagccccgacatcatcatgaacttgctgctctcctaccgcgatgtgcaggactactcggccatcattgagctggtggagacgctgcaggccttgcccacctgtgatgtggccgagcagcataatgtctgcttccactacacttttgccctcaaccggaggaacaggcctggggaccgggcgaaggccctgtctgtgctgctgccgctggtacagcttgagggctctgtggcgcccgatctgtactgcatgtgtggccgtatctacaaggacatgttcttcagctcgggtttccaggatgctgggcaccgggagcaggcctatcactggtatcgcaaggcttttgacgtagagcccagccttcactcaggcatcaatgcagctgtgctcctcattgctgccgggcagcactttgaggattccaaagagctccggctaataggcatgaagctgggctgcctgctggcccgcaaaggctgcgtggagaagatgcagtattactgggatgtgggtttctacctgggagcccagatcctcgccaatgaccccacccaggtggtgctggctgcagagcagctgtataagctcaatgcccccatatggtacctggtgtccgtgatggagaccttcctgctctaccagcacttcaggcccacgccagagccccctggagggccaccacgccgtgcccacttctggctccacttcttgctacagtcctgccaaccattcaagacagcctgtgcccagggcgaccagtgcttggtgctggtcctggagatgaacaaggtgctgctgcctgcaaagctcgaggttcggggtactgacccagtaagcacagtgaccctgagcctgctggagcctgagacccaggacattccctccagctggaccttcccagtcgcctccatatgcggagtcagcgcctcaaagcgcgacgagcgctgctgcttcctctatgcactccccccggctcaggacgtccagctgtgcttccccagcgtagggcactgccagtggttctgcggcctgatccaggcctgggtgacgaacccggattccacggcgcccgcggaggaggcggagggcgcgggggagatgttggagtttgattatgagtacacggagacgggcgagcggctggtgctgggcaagggcacgtatggggtggtgtacgcgggccgcgatcgccacacgagggtgcgcatcgccatcaaggagatcccggagcgggacagcaggttctctcagcccctgcatgaagagatcgctcttcacagacgcctgcgccacaagaacatagtgcgctatctgggctcagctagccagggcggctaccttaagatcttcatggaggaagtgcctggaggcagcctgtcctccttgctgcggtcggtgtggggacccctgaaggacaacgagagcaccatcagtttctacacccgccagatcctgcagggacttggctacttgcacgacaaccacatcgtgcacagggacataaaaggggacaatgtgctgatcaacaccttcagtgggctgctcaagatttctgacttcggcacctccaagcggctggcaggcatcacaccttgcactgagaccttcacaggaactctgcagtatatggccccagaaatcattgaccagggcccacgcgggtatgggaaagcagctgacatctggtcactgggctgcactgtcattgagatggccacaggtcgcccccccttccacgagctcgggagcccacaggctgccatgtttcaggtgggtatgtacaaggtccatccgccaatgcccagctctctgtcggccgaggcccaagcctttctcctccgaacttttgagccagacccccgcctccgagccagcgcccagacactgctgggggaccccttcctgcagcctgggaaaaggagccgcagccccagctccccacgacatgctccacggccctcagatgccccttctgccagtcccactccttcagccaactcaaccacccagtctcagacattcccgtgccctcaggcaccctctcagcacccacccagccccccgaagcgctgcctcagttatgggggcaccagccagctccgggtgcccgaggagcctgcggccgaggagcctgcgtctccggaggagagttcggggctgagcctgctgcaccaggagagcaagcgtcgggccatgctggccgcagtattggagcaggagctgccagcgctggcggagaatctgcaccaggagcagaagcaagagcagggggcccgtctgggcagaaaccatgtggaagagctgctgcgctgcctcggggcacacatccacactcccaaccgccggcagctcgcccaggagctgcgggcgctgcaaggacggctgagggcccagggccttgggcctgcgcttctgcacagaccgctgtttgccttcccggatgcggtgaagcagatcctccgcaagcgccagatccgtccacactggatgttcgttctggactcactgctcagccgtgctgtgcgggcagccctgggtgtgctaggaccggaggtggagaaggaggcggtctcaccgaggtcagaggagctgagtaatgaaggggactcccagcagagcccaggccagcagagcccgcttccggtggagcccgagcagggccccgctcctctgatggtgcagctgagcctcttgagggcagagactgatcggctgcgcgaaatcctggcggggaaggaacgggagtaccaggccctggtgcagcgggctctacagcggctgaatgaggaagcccggacctatgtcctggccccagagcctccaactgctctttcaacggaccagggcctggtgcagtggctacaggaactgaatgtggattcaggcaccatccaaatgctgttgaaccatagcttcaccctccacactctgctcacctatgccactcgagatgacctcatctacacccgcatcaggggagggatggtatgccgcatctggagggccatcttggcacagcgagcaggatccacaccagtcacctctggaccctgagagctgaatgagggcatcataggccagacaggcccaaggatggatgaatggagaggacaaaggcagcttctgacacaccagccccaggacctggggcgactggaggaagccaggcgagtggggcccaggactggttccagtgagagaaaccaaccacaggcacccaagcactaccagacaaagcgtattaaacagaacacttttgaacctttaaaaa

SEQ ID NO: 34 - protein, 1288 aa, Homo sapiens
MAGPCPRSGAERAGSCWQDPLAVALSRGRQLAAPPGRGCARSRPLSVVYVLTREPQPGLEPREGTEAEPLPLRCLREACAQVPRPRPPPQLRSLPFGTLELGDTAALDAFYNADVVVLEVSSSLVQPSLFYHLGVRESFSMTNNVLLCSQADLPDLQALREDVFQKNSDCVGSYTLIPYVVTATGRVLCGDAGLLRGLADGLVQAGVGTEALLTPLVGRLARLLEATPTDSCGYFRETIRRDIRQARERFSGPQLRQELARLQRRLDSVELLSPDIIMNLLLSYRDVQDYSAIIELVETLQALPTCDVAEQHNVCFHYTFALNRRNRPGDRAKALSVLLPLVQLEGSVAPDLYCMCGRIYKDMFFSSGFQDAGHREQAYHWYRKAFDVEPSLHSGINAAVLLIAAGQHFEDSKELRLIGMKLGCLLARKGCVEKMQYYWDVGFYLGAQILANDPTQVVLAAEQLYKLNAPIWYLVSVMETFLLYQHFRPTPEPPGGPPRRAHFWLHFLLQSCQPFKTACAQGDQCLVLVLEMNKVLLPAKLEVRGTDPVSTVTLSLLEPETQDIPSSWTFPVASICGVSASKRDERCCFLYALPPAQDVQLCFPSVGHCQWFCGLIQAWVTNPDSTAPAEEAEGAGEMLEFDYEYTETGERLVLGKGTYGVVYAGRDRHTRVRIAIKEIPERDSRFSQPLHEEIALHRRLRHKNIVRYLGSASQGGYLKIFMEEVPGGSLSSLLRSVWGPLKDNESTISFYTRQILQGLGYLHDNHIVHRDIKGDNVLINTFSGLLKISDFGTSKRLAGITPCTETFTGTLQYMAPEIIDQGPRGYGKAADIWSLGCTVIEMATGRPPFHELGSPQAAMFQVGMYKVHPPMPSSLSAEAQAFLLRTFEPDPRLRASAQTLLGDPFLQPGKRSRSPSSPRHAPRPSDAPSASPTPSANSTTQSQTFPCPQAPSQHPPSPPKRCLSYGGTSQLRVPEEPAAEEPASPEESSGLSLLHQESKRRAMLAAVLEQELPALAENLHQEQKQEQGARLGRNHVEELLRCLGAHIHTPNRRQLAQELRALQGRLRAQGLGPALLHRPLFAFPDAVKQILRKRQIRPHWMFVLDSLLSRAVRAALGVLGPEVEKEAVSPRSEELSNEGDSQQSPGQQSPLPVEPEQGPAPLMVQLSLLRAETDRLREILAGKEREYQALVQRALQRLNEEARTYVLAPEPPTALSTDQGLVQWLQELNVDSGTIQMLLNHSFTLHTLLTYATRDDLIYTRIRGGMVCRIWRAILAQRAGSTPVTSGP

SEQ ID NO: 35 - DNA, 1059 bp, Homo sapiens
agcaagatggatctactgtggatcctgccctccctgtggcttctcctgcttggggggcctgcctgcctgaagacccaggaacaccccagctgcccaggacccagggaactggaagccagcaaagttgtcctcctgcccagttgtcccggagctccaggaagtcctggggagaagggagccccaggtcctcaagggccacctggaccaccaggcaagatgggccccaagggtgagccaggagatccagtgaacctgctccggtgccaggaaggccccagaaactgccgggagctgttgagccagggcgccaccttgagcggctggtaccatctgtgcctacctgagggcagggccctcccagtcttttgtgacatggacaccgaggggggcggctggctggtgtttcagaggcgccaggatggttctgtggatttcttccgctcttggtcctcctacagagcaggttttgggaaccaagagtctgaattctggctgggaaatgagaatttgcaccagcttactctccagggtaactgggagctgcgggtagagctggaagactttaatggtaaccgtactttcgcccactatgcgaccttccgcctcctcggtgaggtagaccactaccagctggcactgggcaagttctcagagggcactgcaggggattccctgagcctccacagtgggaggccctttaccacctatgacgctgaccacgattcaagcaacagcaactgtgcagtgattgtccacggtgcctggtggtatgcatcctgttaccgatcaaatctcaatggtcgctatgcagtgtctgaggctgccgcccacaaatatggcattgactgggcctcaggccgtggtgtgggccacccctaccgcagggttcggatgatgcttcgatagggcactctggcagccagtgcccttatctctcctgtacagcttccggatcgtcagccaccttgcctttgccaaccacctctgcttgcctgtccacatttaaaaataaaatcattttagccctttcaaaaaaaaaaaaaaaaaaaaaaaaaaaaa

SEQ ID NO: 36 - protein, 299 aa, Homo sapiens
MDLLWILPSLWLLLLGGPACLKTQEHPSCPGPRELEASKVVLLPSCPGAPGSPGEKGAPGPQGPPGPPGKMGPKGEPGDPVNLLRCQEGPRNCRELLSQGATLSGWYHLCLPEGRALPVFCDMDTEGGGWLVFQRRQDGSVDFFRSWSSYRAGFGNQESEFWLGNENLHQLTLQGNWELRVELEDFNGNRTFAHYATFRLLGEVDHYQLALGKFSEGTAGDSLSLHSGRPFTTYDADHDSSNSNCAVIVHGAWWYASCYRSNLNGRYAVSEAAAHKYGIDWASGRGVGHPYRRVRMMLR

SEQ ID NO: 37 - DNA, 1026 bp, Homo sapiens
agcaagatggatctactgtggatcctgccctccctgtggcttctcctgcttggggggcctgcctgcctgaagacccaggaacaccccagctgcccaggacccagggaactggaagccagcaaagttgtcctcctgcccagttgtcccggagctccaggaagtcctggggagaagggagccccaggtcctcaagggccacctggaccaccaggcaagatgggccccaagggtgagccaggccccagaaactgccgggagctgttgagccagggcgccaccttgagcggctggtaccatctgtgcctacctgagggcagggccctcccagtcttttgtgacatggacaccgaggggggcggctggctggtgtttcagaggcgccaggatggttctgtggatttcttccgctcttggtcctcctacagagcaggttttgggaaccaagagtctgaattctggctgggaaatgagaatttgcaccagcttactctccagggtaactgggagctgcgggtagagctggaagactttaatggtaaccgtactttcgcccactatgcgaccttccgcctcctcggtgaggtagaccactaccagctggcactgggcaagttctcagagggcactgcaggggattccctgagcctccacagtgggaggccctttaccacctatgacgctgaccacgattcaagcaacagcaactgtgcagtgattgtccacggtgcctggtggtatgcatcctgttaccgatcaaatctcaatggtcgctatgcagtgtctgaggctgccgcccacaaatatggcattgactgggcctcaggccgtggtgtgggccacccctaccgcagggttcggatgatgcttcgatagggcactctggcagccagtgcccttatctctcctgtacagcttccggatcgtcagccaccttgcctttgccaaccacctctgcttgcctgtccacatttaaaaataaaatcattttagccctttcaaaaaaaaaaaaaaaaaaaaaaaaaaaaa

SEQ ID NO: 38 - protein, 288 aa, Homo sapiens
MDLLWILPSLWLLLLGGPACLKTQEHPSCPGPRELEASKVVLLPSCPGAPGSPGEKGAPGPQGPPGPPGKMGPKGEPGPRNCRELLSQGATLSGWYHLCLPEGRALPVFCDMDTEGGGWLVFQRRQDGSVDFFRSWSSYRAGFGNQESEFWLGNENLHQLTLQGNWELRVELEDFNGNRTFAHYATFRLLGEVDHYQLALGKFSEGTAGDSLSLHSGRPFTTYDADHDSSNSNCAVIVHGAWWYASCYRSNLNGRYAVSEAAAHKYGIDWASGRGVGHPYRRVRMMLR

SEQ ID NO: 39 - DNA, 1539 bp, Homo sapiens
agtctgggagggacgcgcccggcagctgtccaccgatcccggccaccgcccccggccacccccaccccgcgagcccatggaggctccgggaccccgcgccttgcggactgcgctctgtggcggctgttgctgcctcctcctatgtgcccagctggctgtggctggtaaaggagctcgaggctttgggaggggagccctgatccgcctgaatatctggccggcggtccaaggggcctgcaaacagctggaggtctgtgagcactgcgtggagggagacagagcgcgcaatctctccagctgcatgtgggagcagtgccggccagaggagccaggacactgtgtggcccaatctgaggtggtcaaggaaggttgctccatctacaaccgctcagaggcatgtccagctgctcaccaccaccccacctatgaaccgaagacagtcacaacagggagccccccagtccctgaggcccacagccctggatttgacggggccagctttatcggaggtgtcgtgctggtgttgagcctacaggcggtggctttctttgtgctgcacttcctcaaggccaaggacagcacctaccagacgctgtgagtacctggccagcagcaagtacctgagtcccagctcacctcctggttcctgccccaccgttccccttcagtacccagggtgctgtcttctccatgggcaagccctcaggacggtgacagcgtgctccatgtgagccacaccccttttgtctcctccagttggggtgtttcctttgtcagatgttggctgggaccaggactcagcctgggccagtctaggagcccagctgagccctcctgtgtcttttcccttcatgctgccagcagggaagagaaccagtaggtgccagcccaggcaagcctgtggcccgcgtttctgtggctgtgggcaggagctgggccttgtgtctagttgggttttgctctgagaaggggagctgtgcctgaggccctctgtgtgccgtgtgtgctgtggggcgggtcgccacagcctgtgttaaagtgtttgctcttcctctgctgcctcctctcgaggcagggggtccttggctggctgaggcagtgtcaccttcctgagtgtcctctttggcctctgcagaatctgacccctttgggcctggactccatcctgaggggaaaggaggatgcagagggtggcctctgggcacccttgtgggtaagcggggggcgggggcgggaaaaactctggccgccagtttttggctcctgcgggcaccaagcaggctcagtgtctgatgcctgacatctcctcctgtcctgggcctggaacctgcagctgagaaaatccctcaaccacctcgtctcctccatcgcccctgctgggccccccagcctgacagtgggttgtatgcctgcctctttccaccaactggcctgggcactgcccccaaataaaggaactctgcactgcacttcatgtcctgtgtcttgggctgtgtgtggattggatggggtgagggtacggccattgtcctcttctta

SEQ ID NO: 40 - protein, 173 aa, Homo sapiens
MEAPGPRALRTALCGGCCCLLLCAQLAVAGKGARGFGRGALIRLNIWPAVQGACKQLEVCEHCVEGDRARNLSSCMWEQCRPEEPGHCVAQSEVVKEGCSIYNRSEACPAAHHHPTYEPKTVTTGSPPVPEAHSPGFDGASFIGGVVLVLSLQAVAFFVLHFLKAKDSTYQTL

SEQ ID NO: 41 - DNA, 2145 bp, Homo sapiens
cgcgggggtttctcggggtccacgcacgccctgcgccgccaggacccgagcggagcctccccgcggcccggccgcgcctggtcctgagcggtaccatgatgtggggtgcaggcagccctctggcctggctctcagctggctcaggcaacgtgaatgtaagcagcgtgggcccagcagaggggcccacaggtccagccgcaccactgccctcgcctaaggcctgggatgtggtgctctgcatctcaggcaccctggtgtcctgcgagaatgcgctagtggtggccatcatcgtgggcactcctgccttccgtgcccccatgttcctgctggtgggcagcctggccgtggcagacctgctggcaggcctgggcctggtcctgcactttgctgctgtcttctgcatcggctcagcggagatgagcctggtgctggttggcgtgctggcaatggcctttaccgccagcatcggcagtctactggccatcactgtcgaccgctacctttctctgtacaatgccctcacctactattcagagacaacagtgacacggacctatgtgatgctggccttagtgtggggaggtgccctgggcctggggctgctgcctgtgctggcctggaactgcctggatggcctgaccacatgtggcgtggtttatccactctccaagaaccatctggtagttctggccattgccttcttcatggtgtttggcatcatgctgcagctctacgcccaaatctgccgcatcgtctgccgccatgcccagcagattgcccttcagcggcacctgctgcctgcctcccactatgtggccacccgcaagggcattgccacactggccgtggtgcttggagcctttgccgcctgctggttgcccttcactgtctactgcctgctgggtgatgcccactctccacctctctacacctatcttaccttgctccctgccacctacaactccatgatcaaccctatcatctacgccttccgcaaccaggatgtgcagaaagtgctgtgggctgtctgctgctgctgttcctcttccaagatccccttccgatcccgctcccccagtgatgtctagctgagtcttcatgacccttcaaccctgattactacagaattccagaatgttaggctctccagggcttctttccaaacccccagctccacaccccccagacccagctggttctggagttctaggacattgggtgtttcaaggttctgttcagatccctatgggggcccagctggctccacggttccagaatgttcaggtggtcagtgttctactcagaaatgtctcacagcccagctgggttgcaattccagaatgctgggagttttacagtgccattccaagtcccagatgtccctcttcccccaaacttgaccttgaccatgtcactttacgtttgaatttctgagctaaagagtcagagagattagtcacatagttgcctaaataggagagagaaagattatatatgcacatatacaaagacagtgtctatttatgattgatttatttatttataaatttacttatgggtggtaaggggcaaaaaagaggcccacaccttgatatccaggccataccagggtatcccttgtcccttcacccccatttctgacctcagttcctggaggggggaaagggtgaaagagaaaccacgtattttgttattattttggattattttttatcgaagagatcatagaaaccagagccttctccccaggcctgccctcctcgggtttggaaggggaacacaccagcctctggttttttatttttttaagaagccatcacctgagcaaccaaaaattcctctgcgctggggtccgactgccctctggtggccatttggggaaaactgcagcccggccaggcagctgggaccagaatgcaaccccagctccactccagcctggcgtccagggccacagccatggcctgggggccaagcctcaccctgcggtgccctaaaggagggggggcacgagccaacaccccacccctctgccaaccggggtatggcccccagtgcattccctgttcccgtctccaacccaactcaataaaaaatgattttgtcataaaaaaaaaaaaaaaaaaaaaaaaaaaaaaaaaaaaa

SEQ ID NO: 42 - protein, 330 aa, Homo sapiens
MMWGAGSPLAWLSAGSGNVNVSSVGPAEGPTGPAAPLPSPKAWDVVLCISGTLVSCENALVVAIIVGTPAFRAPMFLLVGSLAVADLLAGLGLVLHFAAVFCIGSAEMSLVLVGVLAMAFTASIGSLLAITVDRYLSLYNALTYYSETTVTRTYVMLALVWGGALGLGLLPVLAWNCLDGLTTCGVVYPLSKNHLVVLAIAFFMVFGIMLQLYAQICRIVCRHAQQIALQRHLLPASHYVATRKGIATLAVVLGAFAACWLPFTVYCLLGDAHSPPLYTYLTLLPATYNSMINPIIYAFRNQDVQKVLWAVCCCCSSSKIPFRSRSPSDV

SEQ ID NO: 43 - DNA, 4270 bp, Homo sapiens
ggggaatcgcgtaatggcggacacaggcagggcgagcgcggctgggggcgtagcgcgctgagggggtccggccgtttggcagcccgcgaggcggtccgcgggagcacactctgtgcggagactgggcggccggccgacccttcctgtcgctgacggcgactgcgggaggccaggttgtttttcaccattcagaacattgcctgaagcaggtccaccatgccgttagtaacgaggaacatcgagccaaggcacctgtgccgtcagacgttgcctagcgttagaagcgagctggaatgcgtgaccaacatcaccctggcaaatgtcatccgacagctgggcagcctgagtaaatatgcagaggacatttttggagagctctttactcaggcaaatacctttgcctctcgggtaagctcccttgctgagagggtcgaccgactacaggttaaagtcactcagctggatcccaaggaagaagaagtgtcactgcaaggaatcaacacccgaaaagccttcagaagttccaccattcaagaccagaagctttttgacagaaactctctcccagtgcctgtcttagaaacatacaatacctgtgatactcctccccctctcaacaatcttaccccttacagggacgatggaaaagaggcactcaaattctacacagacccttcatacttctttgatctttggaaggagaagatgctgcaggacaccaaggatatcatgaaagagaagagaaagcataggaaagaaaagaaagataatccaaatcgagggaatgtaaacccacgtaaaatcaagacacgtaaggaagagtgggagaaaatgaagatggggcaagaatttgtggagtccaaagaaaagctggggacttctgggtatccacccactttggtgtaccagaatggcagcattggctgtgttgaaaacgtggatgcaagtagctatccgccaccaccacagtcagactctgcttcttcaccttctccttccttctccgaggacaacttgcctcctccaccagcagaattcagttacccagtggacaaccaaagaggatctggtttggctggacccaaaagatccagtgtggtcagcccaagccatccaccaccagctcctcctctaggctctccaccaggccctaaacccgggtttgctccaccacctgcccctccgccacctccgcctccaatgataggcatcccacctccaccaccgcctgtaggatttgggtctccagggacgcctccaccaccctcacccccatctttcccacctcaccctgattttgctgcccctccacctcctcctccaccaccagcagctgactacccaactctgccaccacctcccttgtcccagccaacaggaggagcacctcctcctccccctcctcctcctcctccggggccccctcctccccctttcactggtgcagatggccagcctgctataccaccaccgctttctgataccaccaagcccaagtcctccttgcctgccgtgagcgatgcccgtagcgacctgctttcagccatccgtcaaggttttcagctgcgcagggttgaggagcagcgggaacaagagaagcgggatgttgtgggcaatgacgtggccaccatcttgtctcgtcgcattgctgttgagtacagtgactcagaagatgactcctctgaatttgatgaggacgactggtccgattaactctttctgcctgctgcccaccttctttttctttccttcctacctgccttctttgatgccaaccccaacagacccgtagggggagaaaagggaggaaaaaagtaattttaaggggccaaagctttccctgaagcaaccaaagatatatccaagtgcttcctccaagtcaacatgtatttcctctccccattttcaggccctgtggggctcctgaggttcagtagctgggatgttccctctttccttcaagtgcctgttgcatattgaaaggaaggagaaatcccaaagcagattcctttgatcgggtttctgttggagatggggcttcccttaggagccatattcaactacagccttctaaaacctgtgccctcagccacttcgaatgccagccaccttctggttctaaaacggggagtggtctgaatgaacacagctgacccctttcccgcgcactgaaagggcagagtaggccgaagggtccaagggccagactgcctcaccctctgccctaatcagcagggtgggcctgccttttgctaagcgatctctatgcctgggatgccctttattccaggaggcatcaagcctctaaagaatgtctcacctcctctgcccaaaaatgatgcctttctgtaggctggtgttgttgcctccctcccaggatccctttggtgagtatggtgttcaggatgcaccaccaccacctctagataccttcaggcaacacagcccagttttaacctctagtatccatgaccaaactatccctgacacatgaggacaggggcctcttctggctgtcaggagcaaagcctgaagacttggagctgcaggactggaagaacagtggagccccgtgggtctcaccctttaaggatgctgaggcctagagatgggaagtgacttgctcaaggtcacacaattggatagtgacatagctagagcgcagagttcctgattccaagtcacctgtgctttctgggaccaaagaatgggcacctgctggagtccgggcagagctttctcagttgtattgctactccagacctcaccataggttggggtcccagtaggaaggctcagggtctgtgccagccctgtcggtgctgctcagaccttcatagcctctcttgtcattctttgttgccccttttctgtcaccagccaaccacatagccttgggaccagcctctctgggggaccagaagtagtgagagaaggaaggggataggcagctttgacaggtgctgctttcaattcctctgcaactcctcccccttttatttccccaatttaaacaaagattctgccaactgtggaaacttcagtccctcaggctggcagccatgccagtacctgcctgggggtggggggtgcctggcagccatgaagcaggctgaaaggcagaggggctccaggtcctgtttccagctcccctcactgcacatggtgaagctcgctccctccctccctcccttcccgcttttcccagagctaatacacaggtgctattattcagaaaaaaactggtcagctctagccaacagtgaggtttcttttcttctgccctaactattgtgtagcctcttatgctgaaatcggcttctgctggcttctccggctttcagagccctgaaacaaagagaaacaggatctgtccctacccagcacagcaaatggttgtagtaattgccaaagccctcataaagccctccggcttgaggagagagtgtatagtcatgggttctgcctctgtgcccttgctggccgcttctcctctgccttctttcctggaactcagggtgtggggactgagcctgtaggggacagcatgccgtcttgctgtggccactcccaagtgtgccctcttccctctttacacatcaggtgtctctggcacaggacttggcactaagctccatgctgagacaccaggctatgtgggcccccaccttgtttcccagcctgcaccttagaagccgaaggtgctttcatcagaaccctaaaatggtcgttgaaggcgcctgggccgcagcccagcagtagttggagaggcaggcagagggcagtggttctcccaaataggagacctggggcctggccaggccagggtttgggcctaatggctttgactaaattacccccatcctccttgcccggaaaagggagagctagagccactcactgtcattctgctctgaccttgaagggggcggtgttggcctggcttctggaatggactgagtccatcgtggaaagggctgggggcaggaggaggtggggaggggcactgcctgcggaaggtaggattagatcattagctcagtgacctcctagggtttcgatgtgctatgttctcatcctacagttggtttggtaatgatctgcaagtcccggagagcaacagcacagctctgcctgacgctctcattaaaatctatgcagccaagctcggcactttgtagcagccggccttgcgaagcctcctcagctcggggggccggggacccagtgagccgagaggccctctgggctccacttatgcatatgcacc

SEQ ID NO: 44 - protein, 498 aa, Homo sapiens
MPLVTRNIEPRHLCRQTLPSVRSELECVTNITLANVIRQLGSLSKYAEDIFGELFTQANTFASRVSSLAERVDRLQVKVTQLDPKEEEVSLQGINTRKAFRSSTIQDQKLFDRNSLPVPVLETYNTCDTPPPLNNLTPYRDDGKEALKFYTDPSYFFDLWKEKMLQDTKDIMKEKRKHRKEKKDNPNRGNVNPRKIKTRKEEWEKMKMGQEFVESKEKLGTSGYPPTLVYQNGSIGCVENVDASSYPPPPQSDSASSPSPSFSEDNLPPPPAEFSYPVDNQRGSGLAGPKRSSVVSPSHPPPAPPLGSPPGPKPGFAPPPAPPPPPPPMIGIPPPPPPVGFGSPGTPPPPSPPSFPPHPDFAAPPPPPPPPAADYPTLPPPPLSQPTGGAPPPPPPPPPPGPPPPPFTGADGQPAIPPPLSDTTKPKSSLPAVSDARSDLLSAIRQGFQLRRVEEQREQEKRDVVGNDVATILSRRIAVEYSDSEDDSSEFDEDDWSD

SEQ ID NO: 45 - DNA, 2414 bp, Homo sapiens
acagtgaggctggggaaggggaagtgaatttaatgagaaacttggggttgtgagtgggggaaggatttgggtgtgggatgaaggtgcaggacagggctgggccgggccattggactcaggtatgcctaggcttggggtggagcttcaaggcagcgcgggctccagcccctggaagagccaccccccacccacctgagatttcccaaattccagctgccgctctagttgcttctgcaagcaaaggagcccttgtggtcagaggggcctctgaagcctgggccaggctctcccgccctctcagggcacacacacctccattcagcccaagccccgccctttgggggggctgggggccagggcgggctgcccccacgtcagtcgtcagttgggggccacctgacccaaaggctgggcgggcagtggggttgataagacctggaccccactggtcccacaaccgtgccggctgctgcccgtgctgccagaactatgagggtcctctctggcactagcctcatgctctgcagcctgctgctgctgctccaggccctgtgcagccctggcctcgccccccagtccagaggccatctctgccggacgcggcccacagacctggtgtttgttgtcgacagctctcgcagcgttcggcctgttgaatttgagaaagtgaaggtattcctgtcccaggtcatcgagtcgctggacgtggggcccaatgccacccgggtgggcatggtcaactatgccagcaccgtgaagcaggagttctcgctgcgggctcatgtctccaaggccgcactgctgcaggctgtgcgccgtatccagccgctgtccacaggcaccatgaccggcctggccatccagttcgctatcaccaaagccttcggcgatgcagagggtggtcgttccaggtcccctgacatcagcaaggtggtcatcgtggtgacagacgggaggccccaggacagcgtgcaggacgtgtctgcgcgggcccgggccagcggcgtcgagctgttcgccatcggagtgggcagcgtggacaaggccacgctgcggcagatcgccagcgagccgcaggacgaacacgtcgattacgtggagagctacagcgtcatcgagaagctgtccaggaagttccaggaggccttctgcgtggtgtcagacctgtgcgccacaggggaccatgactgtgagcaggtgtgcatcagctcccccggttcctacacctgcgcctgccacgagggcttcactctgaacagcgacggcaagacctgcaatgtctgcagtggtggtggtggcagctcggccactgacctggtcttcctcattgacggatccaagagtgtgaggccagagaactttgagctggtgaagaagttcatcagtcagatcgtggatacgctggacgtgtcagacaagctggcccaggtggggctggtgcagtactcaagctctgtgcgccaggagttccccctgggtcgcttccacaccaagaaggacatcaaggcggctgtgcggaatatgtcctacatggagaagggcacaatgaccggggctgctctcaagtacctcattgacaattccttcactgtgtccagtggggctaggcccggggcccagaaggtgggcattgtcttcactgatggccggagccaggactacattaatgatgctgccaagaaggccaaagacctcggctttaagatgtttgctgtgggtgtgggcaatgccgtggaggatgagctgagggaaatagcctcagagcctgtggcagagcactacttctacacggctgacttcaagaccatcaaccagataggcaagaagttgcagaagaagatctgtgtggaggaagacccgtgtgcctgcgagtccctggtgaaattccaagccaaagtggaggggctgctgcaggccctgaccaggaaactggaagctgtgagtaagcggctggccatcctggagaacacagttgtctaaggctgcctgtcaccactgtggcctctccaagcgtcctgcacgtgtccgccgtagctttaccattttagtgagggaagccagcccgggggtgggagggggtgtgtctgggtgtgcctattgagagcgtgtaatggcgtttgggagctcgtgtgtgtatgtgtgcgtgtgtgtatgcgtgcatgtgtgtgtgtgtgtgtgtgtgtgcacgtgcgcctgagggtgggcatgagtcttgccagaatgtgagtgtgagagtgataatgcaggggtgagtgtgagagggactgcgtttgcatttttataatcaaaagcttaatatattcccatctttttttagttaaccctttcttgactctgagtgctgtgaatttctttactgatttctctattctccggtgagaaacaattaaatgtgatttaacgtaagcagtgaa

SEQ ID NO: 46 - protein, 496 aa, Homo sapiens
MRVLSGTSLMLCSLLLLLQALCSPGLAPQSRGHLCRTRPTDLVFVVDSSRSVRPVEFEKVKVFLSQVIESLDVGPNATRVGMVNYASTVKQEFSLRAHVSKAALLQAVRRIQPLSTGTMTGLAIQFAITKAFGDAEGGRSRSPDISKVVIVVTDGRPQDSVQDVSARARASGVELFAIGVGSVDKATLRQIASEPQDEHVDYVESYSVIEKLSRKFQEAFCVVSDLCATGDHDCEQVCISSPGSYTCACHEGFTLNSDGKTCNVCSGGGGSSATDLVFLIDGSKSVRPENFELVKKFISQIVDTLDVSDKLAQVGLVQYSSSVRQEFPLGRFHTKKDIKAAVRNMSYMEKGTMTGAALKYLIDNSFTVSSGARPGAQKVGIVFTDGRSQDYINDAAKKAKDLGFKMFAVGVGNAVEDELREIASEPVAEHYFYTADFKTINQIGKKLQKKICVEEDPCACESLVKFQAKVEGLLQALTRKLEAVSKRLAILENTVV

SEQ ID NO: 47 - DNA, 2232 bp, Homo sapiens
cttccccttctctgccctgctccaggcaccaggctctttccccttcagtgtctcagaggaggggacggcagcaccatggacccccgcttgtccactgtccgccagacctgctgctgcttcaatgtccgcatcgcaaccaccgccctggccatctaccatgtgatcatgagcgtcttgttgttcatcgagcactcagtagaggtggcccatggcaaggcgtcctgcaagctctcccagatgggctacctcaggatcgctgacctgatctccagcttcctgctcatcaccatgctcttcatcatcagcctgagcctactgatcggcgtagtcaagaaccgggagaagtacctgctgcccttcctgtccctgcaaatcatggactatctcctgtgcctgctcaccctgctgggctcctacattgagctgcccgcctacctcaagttggcctcccggagccgtgctagctcctccaagttccccctgatgacgctgcagctgctggacttctgcctgagcatcctgaccctctgcagctcctacatggaagtgcccacctatctcaacttcaagtccatgaaccacatgaattacctccccagccaggaggatatgcctcataaccagttcatcaagatgatgatcatcttttccatcgccttcatcactgtccttatcttcaaggtctacatgttcaagtgcgtgtggcggtgctacagattgatcaagtgcatgaactcggtggaggagaagagaaactccaagatgctccagaaggtggtcctgccgtcctacgaggaagccctgtctttgccatcgaagaccccagaggggggcccagcaccacccccatactcagaggtgtgaccctcgccaggccccagccccagtgctgggaggggtggagctgcctcataatctgcttttttgctttggtggcccctgtggcctgggtgggccctcccgcccctccctggcaggacaatctgcttgtgtctccctcgctggcctgctcctcctgcagggcctgtgagctgctcacaactgggtcaacgctttaggctgagtcactcctcgggtctctccataattcagcccaacaatgcttggtttatttcaatcagctctgacacttgtttagacgattggccattctaaagttggtgagtttgtcaagcaactatcgacttgatcagttcagccaagcaactgacaaatcaaaaacccacttgtcagttcagtaaaataatttggtcaaacaacagtctattgcattgatttataaatagttgtcagttcacatagcaatttaatcaagtaatcattaattagttaccccctatatataaatatatgtaatcaatttcttcaaatagcttgcttacatgataatcaattagccaaccatgagtcatttagaatagtgataaatagaatacacagaatagtgatgaaattcaatttaaaaaatcacgttagcctccaaaccatttaattcaaatgaacccatcaactggatgccaactctggcgaatgtaggacctctgagtggctgtataattgttaattcaaatgaaattcatttaaacagttgacaaactgtcattcaacaattagctccaggaaataacagttatttcatcataaaacagtcccttcaaacacacaattgttctgctgaagagttgtcatcaacaatccaatgctcacctattcagttgctctgtggtcagtgtggctgcatagcagtggattccatgaaaggagtcattttagtgatgagctgccagtccattcccaggccaggctgtcgctggccatccattcagtcgattcagtcataggcgaatctgttctgcccgaggcttgtggtcaagcaaaaattcagccctgaaatcaggcacatctgttcgttggactaaacccacaggttagttcagtcaaagcaggcaacccccttgtgggcactgaccctgccactggggtcatggcggttgtggcagctggggaggtttggccccaacagccctcctgtgcctgcttccctgtgtgtcggggtcctccagggagctgacccagaggtggaggccacggaggcagggtctctggggactgtcggggggtacagagggagaaggctctgcaagagctccctggcaatacccccttgtgtaattgctttgtgtgcgacagggaggaagtttcaataaagcaacaacaagcttcaaggaattc

SEQ ID NO: 48 - protein, 262 aa, Homo sapiens
MDPRLSTVRQTCCCFNVRIATTALAIYHVIMSVLLFIEHSVEVAHGKASCKLSQMGYLRIADLISSFLLITMLFIISLSLLIGVVKNREKYLLPFLSLQIMDYLLCLLTLLGSYIELPAYLKLASRSRASSSKFPLMTLQLLDFCLSILTLCSSYMEVPTYLNFKSMNHMNYLPSQEDMPHNQFIKMMIIFSIAFITVLIFKVYMFKCVWRCYRLIKCMNSVEEKRNSKMLQKVVLPSYEEALSLPSKTPEGGPAPPPYSEV

SEQ ID NO: 49 - DNA, 1638 bp, Homo sapiens
agcggcagcgcggtcagtggcggcgctgaagagaccggttgccgccatgatagaacagcagaagcgtaagggcccagagttgccgctggttccagtcaagcggcagcggcatgagttgctgttgggagcggggtctggcccaggagccgggcagcagcaggcgacgccgggagccttgctgcaagcgggacctccaagatgttcctcccttcaagccccaatcatgctgctctctggacatgaaggggaagtctactgctgcaagttccaccccaacggatccaccttagcatctgcaggatttgaccgactgatattactgtggaatgtctatggtgactgtgataactatgccacactgaagggacacagtggagcagtgatggaattgcattacaacacagatggcagtatgcttttctcagcatccacagataaaaccgtggctgtgtgggatagtgaaacaggtgagagggttaaaaggctaaagggacatacttcctttgtgaattcctgttatccagccaggagaggccctcagcttgtctgcactggcagtgacgatggcacagttaagctttgggacatccggaagaaagcagccatccagacatttcagaacacgtaccaggtgttagctgtgaccttcaatgacacaagtgatcagattatttctggtggaatagacaatgatatcaaggtctgggacctgcgccagaacaagctaacctacaccatgagaggccatgcagattcagtgactggcctgagtttaagttctgaaggctcttatcttttgtccaatgcaatggacaatacagttcgtgtctgggatgtccggccatttgcccccaaagagagatgtgtaaagatatttcaaggaaatgtgcacaactttgaaaagaaccttctgagatgttcttggtcacctgatggaagcaaaatagcagctggctcagccgacaggtttgtttatgtgtgggataccacaagcaggagaatattgtataagctgcccggccatgctggctccatcaatgaagtggctttccaccctgatgagcccatcattatctcagcatcgagtgacaagagactgtatatgggagagattcagtgaagatatggactggaagactccaaggccgcttgtctttgagacctcagactgcataagtgatgccaaatgttggatgtccaggctagcaccctcccttcagatgaccattgctagcaagaaacaggaggcggtggccatattccaaaaaccacttctgtcccatttcaccaggatgactaaggcaagctccctgtggcctctaaaaaccacctgccagatttcagggactgtttttttttttctttttcttttttcctgttttctaatgcaggcccaatgtgacaaatttgttggttgggattttttttttttttttgtaactggcttgtatgatattttctttctgtatttctctatatcattttgtattaaaagccaaatagatgcctttttacaagagccatgtggattggatttattgctgtcttttttttgaggcttgattgctataaatcagaatagagcatgatgtggccacagaatacaattcatttaaacttccaaaaaaaaaaaaaaaa

SEQ ID NO: 50 - protein, 357 aa, Homo sapiens
MIEQQKRKGPELPLVPVKRQRHELLLGAGSGPGAGQQQATPGALLQAGPPRCSSLQAPIMLLSGHEGEVYCCKFHPNGSTLASAGFDRLILLWNVYGDCDNYATLKGHSGAVMELHYNTDGSMLFSASTDKTVAVWDSETGERVKRLKGHTSFVNSCYPARRGPQLVCTGSDDGTVKLWDIRKKAAIQTFQNTYQVLAVTFNDTSDQIISGGIDNDIKVWDLRQNKLTYTMRGHADSVTGLSLSSEGSYLLSNAMDNTVRVWDVRPFAPKERCVKIFQGNVHNFEKNLLRCSWSPDGSKIAAGSADRFVYVWDTTSRRILYKLPGHAGSINEVAFHPDEPIIISASSDKRLYMGEIQ

SEQ ID NO: 51 - DNA, 1602 bp, Homo sapiens
cttgtgggtggaaacgcgctggctgactggggtcggcgtttagttcagcgcagcgactcggggacctggagctgacgcctagacacttgtattagctttaatagaagagaaatggaggagccatagaatattaaggatgaattcaggaaggcctgagaccatggaaaacttgcctgctctctacactattttccaaggagaggttgctatggtgacagactatggggcctttatcaaaatcccaggctgtcggaagcaaggtctggtccatcgaactcatatgtcatcctgtcgggtggataagccctctgagatagtagatgttggagataaagtgtgggtgaagcttattggccgagagatgaaaaatgatagaataaaagtatccctctccatgaaggttgtcaatcaagggactgggaaagaccttgatcccaacaatgttatcattgagcaagaagagaggcggaggcgatccttccaggattacactgggcagaagatcacccttgaggctgtcttgaacactacctgcaagaagtgtggctgtaaaggccactttgcaaaagattgtttcatgcaaccaggtgggactaaatactctctgatacctgatgaggaagaggaaaaggaagaggcaaagtcagcagagtttgagaagcctgaccctacaaggaatccttctagaaaaagaaagaaggagaagaagaaaaagaaacatagagataggaagtcatctgactctgacagctcagactctgagagtgatacaggcaagagggcaaggcacacatcaaaagacagcaaggcagcaaagaagaagaaaaagaagaagaagcacaagaagaagcacaaggagtgagagtataaagagtgtagggggtggttgagagtaagaaaccaggagccttgtgccttgagactcctggaaagactcaatagtgagaatatagcctcccaccccattaacttcgctcccatgggagatggcttcccctcatgcaacaggcaggtttgggagttagaggtcaaaagcagctgcctgaatgagttgttgtttccttatcactcctggtccctttgcaagtgaaccctgcagctcacccattcattcacccaacttccttcattcagcaggaggccctattaccctctccagctgccactgccagagctggattcctgtaaaggagtccaggctagagccacagagactgttgtggaggtgagttcggctgtagttagagtgattggacccttcctattggtctgtcctgggccaactggtgggtgatctctgctgcatccaacatgggagcagagactggcagcaggaggggggaacatggtgagaagtggtgctcacttttcccattcctcctaacatagttctactatgctagaagtggcatccagcggccacagctagaaaacagtctgcagtgtgacttaacttgtgtattgcattccagcagaccactgaaccagacagcgaagccaagatcattgttctactttgtatttactactgtgtgaatcagttgattctacttcaggtccttgcttaaattcctgtcactaaatggaaatgtgtttggtttt

SEQ ID NO: 52 - protein, 241 aa, Homo sapiens
MNSGRPETMENLPALYTIFQGEVAMVTDYGAFIKIPGCRKQGLVHRTHMSSCRVDKPSEIVDVGDKVWVKLIGREMKNDRIKVSLSMKVVNQGTGKDLDPNNVIIEQEERRRRSFQDYTGQKITLEAVLNTTCKKCGCKGHFAKDCFMQPGGTKYSLIPDEEEEKEEAKSAEFEKPDPTRNPSRKRKKEKKKKKHRDRKSSDSDSSDSESDTGKRARHTSKDSKAAKKKKKKKKHKKKHKE

SEQ ID NO: 53 - DNA, 1097 bp, Homo sapiens
gccgtcggagcccttgcacgcctgctctcttgtagcttctctcagcctagcccagcatcactatggtggacgctttcctgggcacctggaagctagtggacagcaagaatttcgatgactacatgaagtcactcggtgtgggttttgctaccaggcaggtggccagcatgaccaagcctaccacaatcatcgaaaagaatggggacattctcaccctaaaaacacacagcaccttcaagaacacagagatcagctttaagttgggggtggagttcgatgagacaacagcagatgacaggaaggtcaagtccattgtgacactggatggagggaaacttgttcacctgcagaaatgggacgggcaagagaccacacttgtgcgggagctaattgatggaaaactcatcctgacactcacccacggcactgcagtttgcactcgcacttatgagaaagaggcatgacctgactgcactgttgctgactactactctgccaatcggctacccctcgactcagcaccacattgcctcatttcttcctctgcattttgtacaaatccacgaattcttctggggtcaggtgccactgaccgggatccagttccagttcccatggtgtatgtggttttttttttttttttttaactgcactcatagggtgctctgaggtcaataaagcagagccaaggccacccagttgcctttttgcctttggtaacataactctgggagtcttggtttatcctgtgtgtcagagagtgggcagaaataacggcctgaaggttactgaggaagaagcactggatgggagactgaaatggacagtctcggagcctgttaatcagctgatcaccttacacatttaataataaaagagctgtacctacacgttgcctttacactgccccccctccatggtcaaatgacctagttcagtcagtgatggggcttccccaggtttggctattgaactgtcacttcaggcccatcctacactgaaagctcttgggtctggctgttctctgtgaaatgctgtagtctctccctttccagaattcaggttcagggcacagaacccaggcttgtaccatggtg

SEQ ID NO: 54 - protein, 133 aa, Homo sapiens [sequence omitted]

SEQ ID NO: 55 - DNA, 2011 bp, Homo sapiens
cgagcgccgccggaaagcgtcgagcggcttcggtaggtggggcggggccggggcggggccggggccggggaggggccaggcccggcacccggatcccgaggtccgcgccccgcgcccggcgccgggcgcccgaagccgggagccgccgccatgggggcctgcctgggagcctgctccctgctcagctgcgcgtcctgcctctgcggctctgccccctgcatcctgtgcagctgctgccccgccagccgcaactccaccgtgagccgcctcatcttcacgttcttcctcttcctgggggtgctggtgtccatcattatgctgagcccgggcgtggagagtcagctctacaagctgccctgggtgtgtgaggagggggccgggatccccaccgtcctgcagggccacatcgactgtggctccctgcttggctaccgcgctgtctaccgcatgtgcttcgccacggcggccttcttcttctttttcaccctgctcatgctctgcgtgagcagcagccgggacccccgggctgccatccagaatgggttttggttctttaagttcctgatcctggtgggcctcaccgtgggtgccttctacattcctgacggctccttcaccaacatctggttctacttcggcgtcgtgggctccttcctcttcatcctcatccagctggtgctgctcatcgactttgcgcactcctggaaccagcggtggctgggcaaggccgaggagtgcgattcccgtgcctggtacgcaggcctcttcttcttcactctcctcttctacttgctgtcgatcgcggccgtggcgctgatgttcatgtactacactgagcccagcggctgccacgagggcaaggtcttcatcagcctcaacctcaccttctgtgtctgcgtgtccatcgctgctgtcctgcccaaggtccaggacgcccagcccaactcgggtctgctgcaggcctcggtcatcaccctctacaccatgtttgtcacctggtcagccctatccagtatccctgaacagaaatgcaacccccatttgccaacccagctgggcaacgagacagttgtggcaggccccgagggctatgagacccagtggtgggatgccccgagcattgtgggcctcatcatcttcctcctgtgcaccctcttcatcagtctgcgctcctcagaccaccggcaggtgaacagcctgatgcagaccgaggagtgcccacctatgctagacgccacacagcagcagcagcaggtggcagcctgtgagggccgggcctttgacaacgagcaggacggcgtcacctacagctactccttcttccacttctgcctggtgctggcctcactgcacgtcatgatgacgctcaccaactggtacaagcccggtgagacccggaagatgatcagcacgtggaccgccgtgtgggtgaagatctgtgccagctgggcagggctgctcctctacctgtggaccctggtagccccactcctcctgcgcaaccgcgacttcagctgaggcagcctcacagcctgccatctggtgcctcctgccacctggtgcctctcggctcagtgacagccaacctgccccctccccacaccaatcagccaggctgagcccccacccctgccccagctccaggacctgcccctgagccgggccttctagtcgtagtgccttcagggtccgaggagcatcaggctcctgcagagccccatccccccgccacacccacacggtggagctgcctcttccttcccctcctccctgttgcccatactcagcatctcggatgaaagggctcccttgtcctcaggctccacgggagcggggctgctggagagagcggggaactcccaccacagtggggcatccggcactgaagccctggtgttcctggtcacgtcccccaggggaccctgcccacttcctggacttcgtgccttactgagtctctaagactttttctaataaacaagccagtgcgtgtaccaaaaaaaaaaaaaaa

SEQ ID NO: 56 - protein, 455 aa, Homo sapiens
MGACLGACSLLSCASCLCGSAPCILCSCCPASRNSTVSRLIFTFFLFLGVLVSIIMLSPGVESQLYKLPWVCEEGAGIPTVLQGHIDCGSLLGYRAVYRMCFATAAFFFFFTLLMLCVSSSRDPRAAIQNGFWFFKFLILVGLTVGAFYIPDGSFTNIWFYFGVVGSFLFILIQLVLLIDFAHSWNQRWLGKAEECDSRAWYAGLFFFTLLFYLLSIAAVALMFMYYTEPSGCHEGKVFISLNLTFCVCVSIAAVLPKVQDAQPNSGLLQASVITLYTMFVTWSALSSIPEQKCNPHLPTQLGNETVVAGPEGYETQWWDAPSIVGLIIFLLCTLFISLRSSDHRQVNSLMQTEECPPMLDATQQQQQVAACEGRAFDNEQDGVTYSYSFFHFCLVLASLHVMMTLTNWYKPGETRKMISTWTAVWVKICASWAGLLLYLWTLVAPLLLRNRDFS

SEQ ID NO: 57 - DNA, 1466 bp, Homo sapiens
atgtcagagaagagctttcttggaatgggtgtgctgccagaacacaggtatcatgaaaaccactccaaaaagccaaaatgggaaaggaaaaatattcttgtcaacattgtcatcattggacacatagattcaggcaagtccaccactactggccatctgatctccaaatgtggtggagttgataaaagaatggtagaaaaacttgtgtcttcttttggtcacagacgaggctgctgagatgggaaaaggctcctttaaaataagcctgggtcttgcacacactgaaagctcagcaagagtgtgatgtcaccattgacgtcaccatctccccatggaaagttgagaccagcgagtactacatgactaacattgatgccccaagacacagagactttatcgaaaatgtcattacaggcacatcttaggctgactgtgctgtcctgattgttgctgctggtgttggtgaatttgaagctggtgtctccaagaatgagcagactcatgagtatgcccttctaacttacaccctgggtgtgaaacaactaattgttggtgttaaaatggattccaccgagccaccctacagccagaaaagacacaaggaagtcattaagaaaatcagcactcacattaagaaaattgactacaacccctatcccctgaatagtagcatttgtgccaatttctgtttggaactgtgacagcatgctggtgccaagggttcacatgcctgggttaaagggatggaaagtcacccgtaatgatggcaatgacagtggaaccatgctgcctgaagctctgaattacatcctgccaccagctcatccaactgacaagtccttgcgtctgcctctccaggatgtctacaacattggtgatattggtactgtctctatgggctgggcggagactggtgttctcaagcccggcacagtagtcacctttgctccagtcaatgttacaactgaagggaagtctgttgaaatgcatcatgaagctttgagtgaagctcttcctggggacaatgtgggcttcgatgtcaagaatgtgtctgtcaaagatgttcgttgtggcaatgttgctggtgacagcataaatgacccacctgtggaagcagttgacttcactgctcaggtgattatcctgaaccacccaggccatatcagtactgattgtggccctgtgctgaattgtcagacagctcacattgcttgtaagtttgctgagctgaagaaaaagactgattgctgttctggtaagaagctggaagatttaaattcttaaaatcaggtgatgcttccaccatggatatggtttctagcaaccccatgtgtgttgagagcttttctgacgagctcccctgagtccttttgccgtttgttggtttcatcaaagcagtggacaagaagggtgctggagctggcaaggtcaccaagcctgcccagaaagctcggaaggctaaatga

SEQ ID NO: 58 - DNA, 777 bp, Homo sapiens
atggcagtcttccacctgggctccaactgccagacccccccagagcttcacacaagctatcgctgactgccggtgcatgttggaaatgggccacagggctgggcatgatatgagctgcctggacattggagggggcttccccggaatggagggctccgggcccaagtttgaggagttggcgagagtgatcagtgctgccctggcccaggacctccctgaggagcgtggtgtcaaggtcatcgcagagcctggctgcttctatgtggagtctgtctgcatggccgctgtcaacatcattgccaagagggctgtgctggagcccggaggcagccggaagctggtgtattatctcaaagatggccactatggctccttccgcctctgctaccgagagcctgtcccaagggttcccatcgtggtgaaggagttctgctcagagccgcccctcttcccctgcaccctctatgtcccatgtgcgatgcctttgacaggctcttcttggaggatgtgcggctgcccgagctggatgtaggcgattggctggtcttcccctccatgggtgcctacatgtcctccatgagctccagcttcaatggcttcctgcctgccaccatctgctacaccatgggcccccagctcagggaggtggagaattgcaaagagatccccaggccctctagccactggctggccctactcctgcttcagacgcccactgtcccagctctgcctccaggccccagctctgctgctgtgtgtgcagcctcagggctgtag

SEQ ID NO: 59 - DNA, 2319 bp, Homo sapiens
gtggagtttgaattgggtggcggttgactgtagagccgctctctctcactggcacagcgaggttttgctcagcccttgtctcgggaccgcagcctccgccgagcgccatggctcctaggaagggcagtagtcgggtggccaagaccaactccttacggaggcggaagctcgcctcctttctgaaagacttcgaccgtgaagtggaaatacgaatcaagcaaattgagtcagacaggcagaacctcctcaaggaggtggataacctctacaacatcgagatcctgcggctccccaaggctctgcgcgagatgaactggcttgactacttcgcccttggaggaaacaaacaggccctggaagaggcggcaacagctgacctggatatcaccgaaataaacaaactaacagcagaagctattcagacacccctgaaatctgccaaaacacgaaaggtaatacaggtagatgaaatgatagtggaagaggaagaagaagaagaaaatgaacgtaagaatcttcaaactgcaagagtcaaaaggtgtcctccatccaagaagagaactcagtccatacaaggaaaaggaaaagggaaaaggtcaagccgtgctaacactgttaccccagccgtgggccgattggaggtgtccatggtcaaaccaactccaggcctgacacccaggtttgactcaagggtcttcaagacccctggcctgcgtactccagcagcaggagagcggatttacaacatctcagggaatggcagccctcttgctgacagcaaagagatcttcctcactgtgccagtgggcggcggagagagcctgcgattattggccagtgacttgcagaggcacagtattgcccagctggatccagaggccttgggaaacattaagaagctctccaaccgtctcgcccaaatctgcagcagcatacggacccacaaatgagacaccaaagttgacaggatggacttttaatgggcacttctgggaccctgaagagacttcttcccttcaggcttattgtttgagtgtgaagttccagagcaaggagccatgttcctctaagggaattcaggaattcagacgtgctagtcccacaccagttaggtagagctgtctgttcaccctcccatcccagctgatcccagtcactgcttgctggggccatgccatggaagcttcccatcagtctcccagctgaatcctccctgctctctgagctgctgccttttgcctcctgcaactcaacatcctcttcaccctgccctgcctgcagttgagggggcgaagaagaaccctgtgttctcaggaagactgcctccaccaccgctacccagagaacctctgcatctggcatttctgctctctatgcttgagaccgggaggtttaggctcagataagtgagctctgggccatgagagggtaggtccagaaggtggggggaactgtacagatcagcagagcaggacagttggcagcagtgacctcagtagggaacatgtccgtctaccctctcgcactcatgacacctccccctaccagccctcctcttcctcctcctcctcctcctgtgggaggtggtcagtgggacttagggatctttcacctgctgtgcccagtagttctgaagtctgcttgtggagcagtgttttatgtttatccctgtttactgaagaccaaatactggtttggagacaacttccatgtcttgctcttctacctccctagttagtggaaatttggataagggaactgtagggcccagattctggaggttttatgtcattggccacagaataactgtctctaagctatccatggtccagtggtccctgccaagtctgtagacttcagagagcacttctctcttatggggttcatgggaacaggggtgggtgtgacttgcttggtggcctcattccatgtgtgcctgtgcctggggcatggactttgttaagcagagtcagcagtgaggtcctcattctccagccagcctctctgccctggagaatcatgtgctatgttctaagaatttgagaactagagtcctcatccccaggcttgaaggcacatggctttctcatgtagggctctctgtggtatttgttattattttgcaacaagaccattttagtaaaacagtcctgttcaagttgtattcttttaagttcttttattctcctttccctgagatttttgtatatattgttctgagtaatggtatctttgagctgattgttctaatcagagctggtacctactttcaataaattctggttttgtgttttcttttgtaaaaaaaaaaaaaaaaaa

SEQ ID NO: 60 - protein, 280 aa, Homo sapiens
MAPRKGSSRVAKTNSLRRRKLASFLKDFDREVEIRIKQIESDRQNLLKEVDNLYNIEILRLPKALREMNWLDYFALGGNKQALEEAATADLDITEINKLTAEAIQTPLKSAKTRKVIQVDEMIVEEEEEEENERKNLQTARVKRCPPSKKRTQSIQGKGKGKRSSRANTVTPAVGRLEVSMVKPTPGLTPRFDSRVFKTPGLRTPAAGERIYNISGNGSPLADSKEIFLTVPVGGGESLRLLASDLQRHSIAQLDPEALGNIKKLSNRLAQICSSIRTHK

SEQ ID NO: 61 - DNA, 2082 bp, Homo sapiens
ggctctggggtctgggggcattgctcagcggtgctaggctggcgcggcttgagccgccgccggactgacagctcggtctgcggaccatggagacctgcgccggtccacacccgctgcgcctcttcctctgccggatgcagctctgtctcgcgctgcttttgggaccctggcggcctgggaccgccgaggaagttatcctcctggattccaaagcctcccaggccgagctgggctggactgcactgccaagtaatgggtgggaggagatcagcggcgtggatgaacacgaccgtcccatccgcacgtaccaagtgtgcaatgtgctggagcccaaccaggacaactggctgcagactggctggataagccgtggccgcgggcagcgcatcttcgtggaactgcagttcacactccgtgactgcagcagcatccctggcgccgcgggtacctgcaaggagaccttcaacgtctactacctggaaactgaggccgacctgggccgtgggcgtccccgcctaggcggcagccggccccgcaaaatcgacacgatcgcggcggacgagagcttcacgcagggcgacctgggtgagcgcaagatgaagctgaacacagaggtgcgcgagatcggaccgctcagccggcggggtttccacctggcctttcaggacgtgggcgcatgcgtggcgcttgtctcggtgcgcgtctactacaagcagtgccgcgccaccgtgcggggcctggccacgttcccagccaccgcagccgagagcgccttctccacactggtggaagtggccggaacgtgcgtggcgcactcggaaggggagcctggcagccccccacgcatgcactgcggcgccgacggcgagtggctggtgcctgtgggccgctgcagctgcagcgcgggattccaggagcgtggtgacttctgcgaaggtatccagttggctgggggccgtggggtgggagtgtagagcgtaggtggcaattgagagagagtgtgccctagaggaaagaggcgggtgtggggtcggggggcggtggagaagccttggactctggagcccaaggagagccctgaagtcttgtggagtttccagtgagtccagtcagggccaatgagtgaacttactagatgaaattgactggctaaggaggcattagggatctatatcttaggcaccttgcacaggccttctcgtttatttattttcatggcaataaaggaagtcattgtttttttttttttttaaaataaggagtctctcttgctctgttgcccaggctggagtgcactggcttgatcttggctaactgcaacttccacctcctgggttcaagcaattctcctgcctcagcctcctgagtagctgggattataggcgtgcaccaccatgcccagctaatttttgtatttttagtagagacggggtttcaccatgttggccaggctggtctcaaactcctgacctcaagtgatccacctacctaggccttccagagtgctgggattataggcgtgagccaccgtgcctggcctaaaggaagtcattcttatctctatttcacagatgaagaaacagagcctcagagagattagtacctcacttgcaaagttaggaaatggggagctaggatttgaattcaggcttgcccaactcacattctatgacatcatgaggtctcctcagtgcataaggaagaactctacagcagcccaatcttcaggctagtgggattggttgcattacagagaggaatctcccagtcacggaccaaatacttgcaagttagaggctggcaggggggatttttatgctggagagagggattgggaagttgcactagatgattacgaagatcacatcccactctctgaactacaatcactgtgctccctgggggagatccttcatgttgagggttttgctgggttctcaggctagtgggggcattaggaacagacctctcattctctctcttgcctgtggctttggatacagagggtgatgatggggttattaatgtgtgtacttaatatagaaagatcaaggtatgctttttctaaaaaaaaaaaaaaaa

SEQ ID NO: 62 - protein, 295 aa, Homo sapiens
METCAGPHPLRLFLCRMQLCLALLLGPWRPGTAEEVILLDSKASQAELGWTALPSNGWEEISGVDEHDRPIRTYQVCNVLEPNQDNWLQTGWISRGRGQRIFVELQFTLRDCSSIPGAAGTCKETFNVYYLETEADLGRGRPRLGGSRPRKIDTIAADESFTQGDLGERKMKLNTEVREIGPLSRRGFHLAFQDVGACVALVSVRVYYKQCRATVRGLATFPATAAESAFSTLVEVAGTCVAHSEGEPGSPPRMHCGADGEWLVPVGRCSCSAGFQERGDFCEGIQLAGGRGVGV

SEQ ID NO: 63 - DNA, 2072 bp, Homo sapiens
atgctctgtgctgcggatgccctggtgaaccacgctgtctctgccagagtccatacctctttgaacgccgagtcaactgccaccaaccagaaccgcaaaatgttggctgtctaccaggggcatgagcagttgatggaaaattacaagaggctggccagtgatctcctggagtggattcagcaaaacagcccccctgactggagaaccccataccccaaaagaccttccaggagatgtagcagaagtctttcatgactactggtgcatccacaagctgtccaaagtgcaggagagaggccagctggagctcaccttcaacacgctgcagaccaagctgcacctaagcaaccagcctgccttcatgggctctgagggtaagatggtcttgaacatcaacaacagtgggcagcacctggagtaggccaagaattgacatgaggagttgctgctgaatgatattcacaggctggagcagctcaaccacctggcagagaagttccagaagacctccatccatgaggcctggaccgatgagaaggaagccaggcttaagcagcgggactatgagacagccaccctatcagacatcaaagcccttatccacaaccatgaagccttcgagagtgatctggccatacaccaggactttgtggagctgatcaaggctctgagagacactgcccaggaactcaacgagctggattactgtgactcccacagttgtcaatgcccagtgccagaagatttacaaggagtgggaaaccctgtactctctgacccacagtcacagggaagccctggagaaaatgaagaagcagctggaggccactgatcatctgtacctggagtatgccaagtgggcagagccttctacaactggatggagagtgccgtggaggagctccaggacatgttcctcatctacaatactgagaagattgagggcctgatctcagcccacagccaaaagttgaccctgccagataatgatagggagaaagaggctatcctggccacccacaaggaagcccagaggatcacagatagcaaacataccaagctgtcaggcagcaacccctacaccactgtcacctcccccgaccccacacagttcatccactcccagtgggcaaaggtgcagcagttggtgtcaaagcaggattatgcacttctggaggagcagagcaagcagcagtccaacgagcacctccaccaccagttctccagccaggccaatgtcatggggccctggatccagaccaagatggaggaaagtgggtgcagctccatcaaaatgaaggggaacccagaggaccagctaaacctgaagcaatatgagcaaaacatcatggaccacaagctgaacctggacctgctgacgcagagcaccagctcctccaggaggtcttcatcttcaacaacaagcatatcagctacatggtggaacacatccgcacggctgggagcagctgctcaccaccattggctgcaccatcagtgaggtcaagaaccagatcctcacctgcaatacccagggcattggccaggagcagatgcaagagtttcaggtgtccttcagccacactgacaagagccatggcagggtgctggggctgaaggagttcaaggcctgcttcatcagcttgggctacaatgtggaggataacagcagagcaatgctgagttcaactgcaccgggagtgtggttgaccccaaccatagcagccttgtggcctcccaagccttcatcaacttcaggtcttgggagacaaccaacgtagacacagccaggtcgttacctccttcaaggtcatggcaggggacaagaacttcatcacagccgaggagctgcagggagaggtgtctctgaccaggtcaagtactgcattgcccacctgaccccacaacaggtccccagtgccatgcctggtgcccttgtctacaaatccttctctatagctccatacaacaagagtgactatgaggctcctggtgagactcgtatcaaacacccttcctcgtggcctctggtaggggctgggagagccctttgcccccttcccatggtgtag

SEQ ID NO: 64 - DNA, 2581 bp, Homo sapiens
gggaagcgcgcggccgggcgggcggccatggcgcggcacgctgggaggtagcgcggcggctgcaggagcgcacagtcggccatggcccggcggcggcgccgcgcctgcatcgctctgttcctggtgctgctcttcgccttcggcaccctcatgggtctgcgcacgctcaaggctccggacggactcccggcgctgggcccgggcctggagctggcgccctttgagcgacgcccagagggggcccccgcgcccgctgccagggccccggcagcccctgccgcgccgcccccgccgccgccgccgccccgcaccgcggaccctggcggctcccctgggccggcacccgcggaggccgagcccgcccccgtgcagagcctgcgcgtctactcggacctgcacgccttctactactcgtggtacgggagcccgcggcgcgagggccactacattcactgggaccacgtcatggtgccgcactgggaccccaagatctcggccagctacccccgcggccgccacagccccccagacgacttgggctccagcttctacccggagctggggccctacagctcccgggaccccgaagtgctgcgggagcatatgacccagctcaaggaagccgccatcggcgtcctggtcctgtcctggtacccacctggcatggctgatgataacggggagccctcagatgacctggtgcccgccattctggacaccgcccatcagtacagcatccaggtggccttccacatccaaccctacaagggccgggatgacatcactgtacatgacaacatcaagtacatcattgacacaactggaaagctgtgaagaacttttgtgatgccaacaacctcatgttcatccccagtgtggggcctggctacatagacaccagcattcggccctggaacaaccacaatacgcgcaacagggtcaatggcaagtactatgagacggccctgcaggcggccctgacagtgaggcccgagatcgtttccattacctccttcaatgagtggcacgagggcacccagattgagaaggccattcccaagaagacacccacccgcctgtatttggactacctgcctcaccagcccagcctgtacctggagctgacacgccgctgggcggagcacttcatcaaagagaaggagcagtggctcatgtgaggggcctgtaaatgggcgtgaggtgctgatgtccttgccttgctggaagatgtcaccatgtggggttcagctgaggttgtagccactcactcgttcccaggtcagaggtcagcagatgggtgtttctgggtgggccgtcaggcatgggcctgtgcaacacagagcccgttcctcaggcgagtggtgctgaggtgctctgtggtgatgggaacggcagaggctggcaggtgactgaacttagcccagggcagctccacatcctgggaacactttcatgtaaccccttctagttttgaactctgcagcaggctggtgctgtgtagtggccacccagtcaccacccttggaagggtgtcagggtctgggctcgcatgcaccctgctcccttctgccagcctgcatcctctcctcaggcctccttcccacatcatctgtcttctctaagttagggaaccatatttgagactttcaaaaagggaacttctaggtttaagctcctcccagtagattcctgaacccaattatcaggaaatcatcctgagcactcacaggttcatttaacactcactcatcaagcaccttcctatgtgctaggtgctggggaaaacttgaccaaggaagagttcctgtcctgaagcttccaggacccagctttccttttctggtgtggccttgtagctagtgcctgggcacaggtgtttttctttttgcagttttacctagtgctgggagttcagttctttttcctctagaaaaatacctctgtgctccagagcctaatttttcccagatgcatatttagctctagggagaggactaggaggaaatccccctccctttagctgcctgaactgactgaggcccactcactagagccatgttcagtgctactgtgattagtagtaattaaatatgaactggtattctcaagtaagcattccttttgctctctttaagacctcacagattctgaccttagattctgtgacaaactgatacaggagctgggctggctatggctttaccacaacaagtaggtttgcttaagaaattactaaacaatggctgggcgtggtggctcactcctgtaatcccagcactttgggaggccgagatgggcggatcacgaggtcaggagatcgagaccatcctggctaacagggtgaaaccacgtctctactaaaaatacaaaaaaattagccaggcgtagtggtgggcgcctgtagtcccagctacttgggaggctgaggcaggagaatggcgtgaacccgggaggcggagcttgcagtgagccgagatcacgccactgcactccagcctgggcgacagagcgagactccgtctcaaaaaaaaaaaagttactaaacaaggctgggcgtggtggctcacacctgtaatcccag

SEQ ID NO: 65 - protein, 250 aa, Homo sapiens
MARRRRRACIALFLVLLFAFGTLMGLRTLKAPDGLPALGPGLELAPFERRPEGAPAPAARAPAAPAAPPPPPPPPRTADPGGSPGPAPAEAEPAPVQSLRVYSDLHAFYYSWYGSPRREGHYIHWDHVMVPHWDPKISASYPRGRHSPPDDLGSSFYPELGPYSSRDPEVLREHMTQLKEAAIGVLVLSWYPPGMADDNGEPSDDLVPAILDTAHQYSIQVAFHIQPYKGRDDITVHDNIKYIIDTTGKL

SEQ ID NO: 66 - DNA, 2399 bp, Homo sapiens
agtctaaagcctggctcccttccggcctggcgcgctacggttcccgcaggcgctccgcttcagcaccgcgggcgtggacagctccggggcgcgaggctctgggactcatctgcaggaagtgaacctggcaggaggcttgcttcaggtttttaggaaccatttttgcaattggagatgtttgtgaggaaaaaaatctctgttgaggggggtactgtgtgtctctgaagtggcctctgtgttgcgtctcaggcgtcctggtcctgtcctggtacccacctggcatggctgatgataacggggagccctcagatgacctggtgcccgccattctggacaccgcccatcagtacagcatccaggtatggctcccatggtgcattttaccgctataagaacagcatgggcaagagcctcccactcttttatatctacgactcatacctgacgtcccctgaggcctgggcccacctcctgacaccaaacgggccccattcgatccgcaacacgccctacgatggggtcttcatagcgctgctggtggaggagggccacacccacgatatcctggccgccggatttgacggcatgtacacctactttgcctccaatggtttctcctttggttcttcccatcagaactggaaagctgtgaagaacttttgtgatgccaacaacctcatgttcatccccagtgtggggcctggctacatagacaccagcattcggccctggaacaaccacaatacgcgcaacagggtcaatggcaagtactatgagacggccctgcaggcggccctgacagtgaggcccgagatcgtttccattacctccttcaatgagtggcacgagggcacccagattgagaaggccattcccaagaagacacccacccgcctgtatttggactacctgcctcaccagcccagcctgtacctggagctgacacgccgctgggcggagcacttcatcaaagagaaggagcagtggctcatgtgaggggcctgtaaatgggcgtgaggtgctgatgtccttgccttgctggaagatgtcaccatgtggggttcagctgaggttgtagccactcactcgttcccaggtcagaggtcagcagatgggtgtttctgggtgggccgtcaggcatgggcctgtgcaacacagagcccgttcctcaggcgagtggtgctgaggtgctctgtggtgatgggaacggcagaggctggcaggtgactgaacttagcccagggcagctccacatcctgggaacactttcatgtaaccccttctagttttgaactctgcagcaggctggtgctgtgtagtggccacccagtcaccacccttggaagggtgtcagggtctgggctcgcatgcaccctgctcccttctgccagcctgcatcctctcctcaggcctccttcccacatcatctgtcttctctaagttagggaaccatatttgagactttcaaaaagggaacttctaggtttaagctcctcccagtagattcctgaacccaattatcaggaaatcatcctgagcactcacaggttcatttaacactcactcatcaagcaccttcctatgtgctaggtgctggggaaaacttgaccaaggaagagttcctgtcctgaagcttccaggacccagctttccttttctggtgtggccttgtagctagtgcctgggcacaggtgtttttctttttgcagttttacctagtgctgggagttcagttctttttcctctagaaaaatacctctgtgctccagagcctaatttttcccagatgcatatttagctctagggagaggactaggaggaaatccccctccctttagctgcctgaactgactgaggcccactcactagagccatgttcagtgctactgtgattagtagtaattaaatatgaactggtattctcaagtaagcattccttttgctctctttaagacctcacagattctgaccttagattctgtgacaaactgatacaggagctgggctggctatggctttaccacaacaagtaggtttgcttaagaaattactaaacaatggctgggcgtggtggctcactcctgtaatcccagcactttgggaggccgagatgggcggatcacgaggtcaggagatcgagaccatcctggctaacagggtgaaaccacgtctctactaaaaatacaaaaaaattagccaggcgtagtggtgggcgcctgtagtcccagctacttgggaggctgaggcaggagaatggcgtgaacccgggaggcggagcttgcagtgagccgagatcacgccactgcactccagcctgggcgacagagcgagactccgtctcaaaaaaaaaaaagttactaaacaaggctgggcgtggtggctcacacctgtaatcccag

SEQ ID NO: 67 - protein, 235 aa, Homo sapiens
MITGSPQMTWCPPFWTPPISTASRYGSHGAFYRYKNSMGKSLPLFYIYDSYLTSPEAWAHLLTPNGPHSIRNTPYDGVFIALLVEEGHTHDILAAGFDGMYTYFASNGFSFGSSHQNWKAVKNFCDANNLMFIPSVGPGYIDTSIRPWNNHNTRNRVNGKYYETALQAALTVRPEIVSITSFNEWHEGTQIEKAIPKKTPTRLYLDYLPHQPSLYLELTRRWAEHFIKEKEQWLM

SEQ ID NO: 68 - DNA, 1871 bp, Homo sapiens
cgggcctgggcggatgtctccggcgcgtcggtgcagggggatgagggccgcggtggctgccagcgtggggttgagcgaggggcctgctggctcccggagcggtcgcctcttccgcccgccgagtcccgctccggcggcccccggcgcccggctgttgcggctcccggggagcggggccgtgcaggccgcgagcccggagcgcgccggctggaccgaggcgctgcgggccgccgtggccgagctgcgcgccggcgccgtggtggccgtccccaccgatacgctgtacggcctggcctgcgcggcgagctgctcggcggctctgcgcgctgtgtaccgcctcaagggtcgcagcgaggccaagcctctggccgtatgcctcggccgcgtggccgacgtctacagatactgccgtgtgagagtacctgaggggctcctgaaagacctactgccaggaccagtgaccctggtgatggaacgctcggaggagctcaacaaggacctaaacccttttacgcctcttgtaggcattcggattcctgatcatgcttttatgcaagacttggctcagatgtttgagggtccgcttgctctcactagtgccaacctcagctcccaggccagttctctgaatgtcgaggagttccaggatctctggcctcagttgtccttggttattgatgggggacaaattggggatggccagagccccgagtgtcgccttggctcaactgtggttgatttgtctgtgcccggaaagtttggcatcattcgtccaggctgtgccctggaaagtactacagccatcctccaacagaagtacggactgctcccctcacatgcgtcctacctgtgaaactctgggaagcaggaaggcccaagacctggtgctggatactatgtgtctgtccactgacgactgtcaaggcctcatttgcagaggccaccggagctagggcactagcctgacttttaaggcagtgtgtctttctgagcactgtagaccaagcccttggagctgctggtttagccttgcacctggggaaaggatgtatttatttgtattttcatatatcagccaaaagctgaatggaaaagttaagaacattcctaggtggccttattctaataagtttcttctgtctgttttgtttttcaattgaaaagtaattaaataacagatttagaatctagtgagagcctcctctctggtgggtggtggcatttaaggttcaaaccagccagaagtgctggtgctgtttaaaaagtctcaggtggctgcgtgtggtggctcatgcctgtaatcccaacattctgggaggcccaggcgggagaactgcttgagcccaggagttcagaatcagcctgggcaacatagcaatactccgtctcataaaaattaataaataaaaagtctcaggtgaccaaaggctcctgaagctagaaccaggtttggataaagattgaagagccacaggccactcttccctctgagccattgggcctagtggtgtcatgtattgtaattgctcgcagggagagcagtctttttggtgtaatagtgggatgtctgcttagttggcaggggttcagtccaaatggaagaatattgggaaataaacctccactatcctttatagccagggacttttttcttatttattcataaaataaattatagttaattatacccataacacctttatttaaatccagtgttctccgcagccttttgtctatttatatgtgtaccaagtgttaaacataattattattgggcatttgaactttgtttttctttaaagaaatgctgctattaaacatatttgtaaatggtttaaaaaaaaaaaaaaaaaaaaaaaaaaaaaaaaaaa

SEQ ID NO: 69 - protein, 279 aa, Homo sapiens
MSPARRCRGMRAAVAASVGLSEGPAGSRSGRLFRPPSPAPAAPGARLLRLPGSGAVQAASPERAGWTEALRAAVAELRAGAVVAVPTDTLYGLACAASCSAALRAVYRLKGRSEAKPLAVCLGRVADVYRYCRVRVPEGLLKDLLPGPVTLVMERSEELNKDLNPFTPLVGIRIPDHAFMQDLAQMFEGPLALTSANLSSQASSLNVEEFQDLWPQLSLVIDGGQIGDGQSPECRLGSTVVDLSVPGKFGIIRPGCALESTTAILQQKYGLLPSHASYL

SEQ ID NO: 70 - DNA, 822 bp, Homo sapiens
aaggagaccggtggggacggggcggggcgcagccttgcgaagccctaacgcagcgctggggaggggggcggccgaaaggggggcggtggtcgggccgcgcaagcggagatggaatggggcccgggctcagactggtcacggggggaggctgccggcgtggaccgcgggaaggcggggctggggctcggcgggaggccacccccacagccgccccgggaggagcgcgcccagcagctgctggacgcggtggagcagcggcagcggcagctcctggacaccatcgcagcctgcgaggagatgttacggcagctgggccgccggcgcccggagccggctggtggcgggaacgtctcagccaaacctggagcgcccccccagccggctgtctccgccagaggcggctttccaaaggatgctggcgatggagctgcggagccctgaccatccccgagcagaataccctgacttctctccctccccagggccggtggctggactctgaacaactcccttcagtaaaggggccagtcttcactggcagtggctggtacttggctctcagcctggagtggcagctctgctagcagctgggttcactcccacttcatcctggctgaaagcagtgctgtgctttgaaatgcagccaatgaatacccagtctgattacccagatttgggcagaccagcagtgctcgccagagtggtctggcctgctatgggggatccaggtggtgttacatgtccatttcatgttttgggggcttttagccccacaaaacaccttcagtagagccttgattaaaaggaaacctgcagactctc

SEQ ID NO: 71 - protein, 156 aa, Homo sapiens
MGPGLRLVTGGGCRRGPREGGAGARREATPTAAPGGARPAAAGRGGAAAAAAPGHHRSLRGDVTAAGPPAPGAGWWRERLSQTWSAPPAGCLRQRRLSKGCWRWSCGALTIPEQNTLTSLPPQGRWLDSEQLPSVKGPVFTGSGWYLALSLEWQLC

SEQ ID NO: 72 - DNA, 7986 bp, Homo sapiens
ggaagtgacgttaggggaaggtgggggcaatcatggtgccgctggggaggggagaagctgctgctgccgccgttgccgggagccgcggagacaagtcattacgttttcatttctcacaactgggctgagcacaactgaaccatgggggaacacagtccagacaacaacatcatctactttgaggcagaggaagatgagctgacccccgatgataaaatgctcaggtttgtggataaaaacggactggtgccttcctcatctggaactgtttatgataggaccactgttcttattgagcaggaccctggcactttggaggatgaagatgacgacggacagtgcggagaacacttgccttttctagtagggggtgaagagggctttcacctgatagatcatgaagcaatgtcccagggttatgtgcagcacattatctcaccagatcagattcatttgacaataaaccctggttccacacccatgccaagaaatattgaaggtgcaaccctcactctgcagtcggaatgtccggaaacaaaacgtaaagaagtaaagcggtaccaatgtacctttgagggctgtccccgcacctacagcacagcaggcaacctgcgaacccaccagaagactcaccgaggagagtacacctttgtctgtaatcaggagggctgtggcaaagccttccttacctcttacagcctcaggatccacgtgcgagtgcacacgaaggagaagccatttgagtgtgacgtgcagggctgtgagaaggcattcaacacactgtacaggctgaaagcacatcagaggcttcacacagggaaaacgtttaactgtgaatctgaaggctgcagcaaatacttcaccacactcagtgatctgaggaagcacattcgaactcatacaggggaaaagccatttcggtgcgatcacgatggctgtggaaaagcatttgcagcaagccaccaccttaaaactcacgttcgtacacatactggtgaaagacccttcttctgccccagtaatggctgtgagaaaacattcagcactcaatacagtctcaaaagtcacatgaaaggtcatgataacaaaggacactcatacaatgcacttccacaacacaatggatcagaggatacaaatcactcactttgtctaagtgacttgagccttctgtccacagattctgaattgcgagaaaattccagtacgacccagggccaggacctcagcacaatttcaccagcaatcatctttgaatcaatgttccagaattcagatgatacggcaattcaggaagatcctcaacagacagcttccttgactgaaagttttaatggtgatgcagagtcagtcagtgatgttccgccatccacaggaaattcagcatctttatctcttccacttgtactgcaacctggcctctccgagccaccccagcctctactacctgcctcagctccgtctgctcctccgcctgctccctccctaggacctggctcccagcaagctgcatttggcaacccccctgctctcttacaacctccagaagtgcctgttccccacagcacacagtttgctgctaatcatcaagagtttcttccgcacccccaggcaccgcagcccattgtaccaggactttctgttgttgctggggcttctgcatcagcagcggcagtggcatcagctgtggcagcaccagccccaccacaaagtactactgagcccctgccagccatggtccagactctgcccctgggtgccaactctgtcctaactaataatcccacaataaccatcaccccaactcccaacacagctatcctgcagtccagcctagtcatgggagaacagaacttacaatggatattaaatggtgccaccagttctccacaaaaccaagaacaaattcagcaagcatctaaagttgagaaggtgttttttaccactgcagtaccagtagccagtagcccagggagctctgtccagcagattggcctcagtgttcctgtgatcatcatcaaacaagaagaggcatgtcagtgtcagtgtgcatgccgggactctgcaaaggagcgggcatccagcaggagaaagggctgctcctccccaccccctccagagccgagcccccaggctcctgatgggcccagcctgcagctcccagcgcagactttctcttcagcccctgttcccgggtcatcatcctctaccttgccctcctcctgtgagcaaagccgacaagcagagactccttcagaccctcagacagaaacattaagtgccatggatgtgtcagagtttctatccctccagagcctggacaccccgtccaatctgattcccattgaagcactactgcagggggaggaggagatgggcctcaccagcagcttctccaagtgaagggcccatgtgtgctcacctctgggaaaagcgggtgagcaggaggcatgaggtacaatgcctgccatcatgggtcagaaatttgaaggatgaagaaatctactgtttgaaatcctcacctttcagacgtattttctttattcacatcccaggagcatccattttaaggaactattctttggaaaaaaacaaaaaacaaaaaaaacaacaaaaaaagctaagttataagtgaactgtttggctgcactgtatgtcacttttgcttgttgtcatgtgaacttggaaactaaggttactcgtgtgcataaaaattctaaatgaaagggtgtggtttccatcaatctgatgctgcccatcgcttgcactggggtctttgtggatcgggcaggagttttcagtgtgttgggtgttgctccttcctatgtgtcttttgaatctgaggctgacatttgcttggaaggccagacccttgctccatcagagagggcagtggcaaaggccagtgaggcagctgtgagttggacagggttcaggtgagatggtgttgtcatttgtgcttagtgttggtggtgctcagggtggataacacgggtcgttctgcagcccgcttcagcacaaataggcagcttaaggcctggctcacaggctgtggggttgatctggctctgcagaggccctaggcagcttgttgactgctgtctgttgatgacgtgtgtgcaaagcaggctctagcaacatgatcactgtccttgccttcctggttctttctctcggttggttgccagggcttgcagatcgcagtgaattttccttggggaacatcgctgttttgtcctagagtgaacttgtggcttatggccagtgctgtttggtggtctgccttctttttaatggtattttcttcctcagagcagaagggctgcattttgcttatcagaagaaggtgcagatttaagggaattcatatgaggtggcatgtaattggcaggccaggtgtcctggttccaggttccagccaggctttgggttgccccctccatctctgcccccctctggattttgcatacagcctcatacagtgcaaacaaggatgtgacttgctcagcttagtcatgtgatttatttaaaaaaaaaaaaaaaagaaacacaaaacgatgatcttctactcagggtatagcaaaacaaaaaaattccctttccaccaaaaagcctgaaatgttgcaataagttatctcatttggaatgtttcattaagttgtgttataggaaaaaattgtgtgtgtgtgttatagaattatatccatatgtctgcctttggctccaagtcattgcctcttaaaataaaagatacaatccatactagcatgaaaagtttccctcaacaggctatattaacatagtcatgagtgctgaccaaactcaccgagctcagaggccaggcatggcctgaggtgcagaataggcctctgcctcccaagagccctttccttgccctgagcaaggagtggtgttccacaaacaaggctgctcttctaagccaacagtgtcaggcaggaagcagccataattttgccttgcattttcattccctaatgtaaagggatctgcattggtcactctcctgttctctgagccattgctcagggccagccaagatattattgagaacagataatttaccttggagccagaggccctccctgcctttagcaaggatgttcagggacagacaaagagggcagtggtggtgaatgttgttactgccatgaggagaaatggcagtaagaaatcttaactacaagcagccaatttctcattccaggaccctagccagaataattgacttctttttttttttgagacagagttttgcttttgttgccctggctggagtgcagtggcgcaatcttggctcaccgcaacctccacttcccaggttcaagcaattctgcctcagcctcccgagtagctgggattacaggcatgcgccaccacgcctggctaattttgtatttttagtagagacggggtttctccatgttggtcaggctggtctcgaactcccaacgtcaggtgatcctcccgcctcagtctcccaaagtgctgggattacaggtgtgagccaccatgcctggtctagggaattgacttctttttgaccttctgcactcccttccccaaaaggattgtggcttctgttgaccattgacctcagcagaagttgataaggcaggaggtttccagtcctcctggaaaaccaactgctgagcatgagttgtccttggctgtctctgggcctcgcacccatgggaagttttgaggtagggcccttgctgtttacaacttctgagagagtagtgatgggaccccaaagtaagcttgtatcagagggcagtaatgaccttcccatatccccatcctgtggtcacctgggatttgggttccctggggcggaagtgggaaataggagcccagggaaggacatctgaagcacccacagtttaaatagcgactcttcttggttagccagggctgtgctcatgttgggccctacccaggtcagtggccttttcactctcaaagatcgggggtgacgaagcagcatcttaaacagtgtttaggctgacagatttttccagttgaagaagctgaagtatctgccttttgagggtgactctagattacaagagagactatcagatccaatcagcttttgaaaaatcaggaatgtgcttaaaatgccagtgagtggttgtgaagatcaggtttatttcccaggataggcagtctttctttccctccttttccagttctcttttcctacctgtccttccataagcctggtctctagtgccgaggaccttggagaagagagggcccctagctaagctggagccagaaagaaccttcatggtgagtgtggtttcccaaacttgggaaatgaacctagggtgaggttagggaggatttgtagaattctagcaggtaaaaatcaagcctttttcccctcccatagtaaacttaaccattttcaccctgtacgttatcttctagctcctactaacatctccaattagacaaccgcttcaaagggtgcttagcaccagggattggggttcatggacttaggaggtggtaaggaaactggctggcaccaccaaactgccttagtgaacttggcccttcccaggcaggtaggttgggcattgagggaaggtggcccagtctttgctggcagggtctggccagtctcatgggggcaccaccagtttggtgacagaagtggtgtcatttattgaattccacctccgtttagaaggagatcatggtacaaagcccaggaggggccttaagatgtgaagatctctctgagtaaaaggcaaggggcttctcttcttcacctctgggatagttggtagatcggagagttttattttcagggtcaaggctgtggactgatggggatattggagggtgggtgggttttcctgagagactttgtataatgctgaatgtgtccagagggacaagtttgcagaacctcatattggtatattaaagaaataataaaataaaaaagcactttaggttattttatctttaacccgattgctgcaatttcttttgtgtgtatatatacatatatatactttccacaaagttttattttttgctcagaataaaaagttaaattgaggtgtgaaaagaaaagcacttaccttggtgcaatatgtgtagcttgatggtcgttgtcccatgtggccctggcctggcagcgtttttccgctcaatcagccctgtgctgtgagactgtccatagggaaacactattatgcattctcagcaaccgctcaatctatgcaagccttccctgtgtgccccagggcgccccctcaggctctctgaagaactgctgtgggtcctgttttctgctgactgttgaggccctttttcatcacttcttggtctctcgccatcttttccctcttcaccattacaaaatgatgcctgaaaggaaggaacagattgttcctaggtagaaacctggcaccttctagacttttatatttgtaatcacatccattgtccttaaagacttttccagagtgattgaaaccattgatttgtggaactgcaacaatatttctcaagagtttacaattgtcttacaccaccaatcagaaatatgtttggggaggcatgggtggcagggggcaacatgagccatttccatactgctccccatactacctgtgttggttccttaagcaaaaaggcctccagccttcattaaatcctataaacaaacattacatcccatgaatcattatcaactttcttcctttactccacctcccccattttatcttcaattctcaggctatagaatagacaagttttagaatatacttcagccaaagcagaaggattttcatagatccaatatgcaaatagttctgctgtgacatagatcagaaattgtctgttccttaatatttgggggtggaggcaacaaaactgaagcatatttctgattggttagccattttggcctgtttcctcttgcatgttttttagggagagagggaaacagtcctgtatttcttctgatgccctttggggaagccgacgaccactgggcatttctcactgttactcctgttcaagagagggcttctcagtctgcactgaaaaatgcaaattaaactggatctttatgtcaatgtgtacatagtacaagcttttttactggaattgaggtttaaaaccacacactgcccttttggtggtgtgcctgttgggccaaaaattgggtgataatgtagtgtcactttctcagctcaatgcagtttctactttttcttatgggaaaatttttcataaaacctttttgcaccaaaacccaggggtgttttttgcaatatccttgttatcctcgtagtgtgccaagtcagaggctttctcttgcccttttcctgctgtgttctcaggcctcccaagggctatttgactcaacagtctacatccttcgttgtgttttggagaatgtgggggtgggggtcagagttcaaggtgtctgttcccttttcctgtgaactctttctagtccctatttggggagggtggctggaaacagatttttgctgaatttctggctcagatcttctagccaggaaaggcaagagcccccaagagcccttttttttgacatacactaatcattggccggggtcttggtgacaacttttaaaatcccaaatagttttatttggattatgtaaaagtaagtgtgaaacatgggaacaacggacttccactgagcgatgtgaaaacgttacaggttcagtacttccaaaggaagaaacctccaaacccaaaaaagaataaatatgaatttgtatttttgaagaatgtgaaataatggtgtttgcttaattgctcattttgtataaacttaatattgtactttaaaatatctgctaaaaagtgaaaatttaactttttggaattgaaaaagcaatattaaatactaatgaaatcctaattaaatgcttatttaaatctggtaaaaaaaaaaaaaaa

SEQ ID NO: 73 - protein, 753 aa, Homo sapiens
MGEHSPDNNIIYFEAEEDELTPDDKMLRFVDKNGLVPSSSGTVYDRTTVLIEQDPGTLEDEDDDGQCGEHLPFLVGGEEGFHLIDHEAMSQGYVQHIISPDQIHLTINPGSTPMPRNIEGATLTLQSECPETKRKEVKRYQCTFEGCPRTYSTAGNLRTHQKTHRGEYTFVCNQEGCGKAFLTSYSLRIHVRVHTKEKPFECDVQGCEKAFNTLYRLKAHQRLHTGKTFNCESEGCSKYFTTLSDLRKHIRTHTGEKPFRCDHDGCGKAFAASHHLKTHVRTHTGERPFFCPSNGCEKTFSTQYSLKSHMKGHDNKGHSYNALPQHNGSEDTNHSLCLSDLSLLSTDSELRENSSTTQGQDLSTISPAIIFESMFQNSDDTAIQEDPQQTASLTESFNGDAESVSDVPPSTGNSASLSLPLVLQPGLSEPPQPLLPASAPSAPPPAPSLGPGSQQAAFGNPPALLQPPEVPVPHSTQFAANHQEFLPHPQAPQPIVPGLSVVAGASASAAAVASAVAAPAPPQSTTEPLPAMVQTLPLGANSVLTNNPTITITPTPNTAILQSSLVMGEQNLQWILNGATSSPQNQEQIQQASKVEKVFFTTAVPVASSPGSSVQQIGLSVPVIIIKQEEACQCQCACRDSAKERASSRRKGCSSPPPPEPSPQAPDGPSLQLPAQTFSSAPVPGSSSSTLPSSCEQSRQAETPSDPQTETLSAMDVSEFLSLQSLDTPSNLIPIEALLQGEEEMGLTSSFSK

SEQ ID NO: 74 - DNA, 4469 bp, Homo sapiens
aaatgtagtcactgtcccggaacctggggcagcggagtcccgtgcgccctgtggtgacagctcaggagggtgtgtgcgctcagcaggggccagcatggaccagtctgtggcaatccaggagacgctggctgagggggaatactgcgtcatcgcggtgcaaggtgtgctgtgtgagggggacagccggcagagccgcctcctgggactcgtgcgctaccgcctggagcacggcggccaggaacacgctctcttcctctatacgcaccggaggatggccattaccggggacgatgtctctctggaccagatagtgccagtctcgcgggattttacgctggaagaagtgtccccagatggtgaactctacatccttggctcagatgtgaccgtccagctggacacagcagagcttagcctcgtattccaactgccctttggttcacaaaccaggatgttcctccacgaagttgccagggcctgtccaggcttcgattctgcgacccgggatcctgaattcctgtggctgtctcggtataggtgcgcagagctggagctggagatgccaacgccgcgcggttgtaactcggccctagttacctggccagggtacgcgacaattggcggaggtggttctaactttgatggtttgagaccaaatgggaagggagtgcctatggaccaaagctccaggggtcaagataaaccagaaagcttgcaaccaagacagaataaatccaagtccgaaattactgacatggttcgctcctccactatcacagtgtcggacaaggctcatattttatccatgcagaagtttggactgcgagatacaattgtgaaatcacatctactacagaaagaagaggattacacctatatccagaacttcaggttttttgcgggaacatacaatgtaaatgggcagtcccccaaagaatgcctccggctgtggctgagcaatggtatccaggccccagatgtctattgtgtagggttccaggagcttgatctgagtaaggaagcttttttctttcacgataccccaaaggaggaagagtggttcaaagctgtgtcagagggtcttcatccagatgccaaatatgcaaaggtgaagcttatccgactggttgggattatgctgctgttatatgtcaaacaggagcatgcagcttatatctcagaagtggaagccgagactgtggggacaggaatcatggggaggatgggcaacaagggaggcgtggcgatcaggttccagttccacaacaccagcatctgcgttgtgaattctcacttggcagcccacattgaagagtatgagaggaggaaccaggactataaggacatttgttctcgaatgcagttttgtcagcctgacccaagccttccccctctcaccatcagcaaccatgatgtgatcttgtggctgggggacctcaactacaggatagaagagctggatgtggaaaaagtgaaaaagctcatcgaagagaaggactttcaaatgctgtatgcatatgatcagctgaaaattcaggtggccgcaaagactgtctttgaaggcttcacagagggtgagctcacattccagcctacttacaagtatgatacgggctctgacgactgggataccagtgagaagtgccgtgctcctgcctggtgtgatcggattctctggaaagggaagaacatcactcagctgagttaccagagccacatggccctgaagaccagtgaccacaagcctgtcagctcagtgtttgacatcggggtgagggtcgtaaatgacgagctttaccggaagacactggaggaaattgttcgctccctggataagatggaaaatgccaacattccttctgtgtccctgtccaagcgagagttctgttttcagaatgtgaagtacatgcaattgaaagtagaatcctttacaattcataatggacaagtaccctgtcattttgaattcatcaacaagcctgatgaagagtcttactgtaagcagtggctgaatgccaaccccagcagaggcttcctcctgccagattctgatgttgagattgacttggagctcttcgtaaataagatgacagctacaaagctcaactcgggtgaagacaaaattgaggacattctggttctgcacttggacaggggaaaggattactttttgtctgtgtctgggaactacctgcccagctgttttgggtctcccattcatacactgtgttacatgagagagccaatcttggacctaccacttgaaaccattagtgagctgactctgatgccagtatggactggagatgatgggagccagttggatagccccatggaaatccccaaagagctctggatgatggttgattacctgtaccgaaatgctgtccagcaggaagatctgtttcagcaaccaggcctgaggtcagaatttgaacatatcagggactgcttggatactggaatgattgataacctctctgccagcaatcattctgtagccgaagccctgctgcttttcctggagagccttccagagcctgtcatctgttacagcacctaccataactgcttggagtgttctggcaactacacagcaagcaaacaggtcatttctactctccccatattccacaaaaatgtcttccactacttgatggcgtttttgcgagaactgctgaaaaattcagcaaaaaatcatttggatgagaatattctagctagcatatttggcagcttattgcttcgaaacccagctggtcaccaaaagcttgatatgacagagaagaagaaggctcaagaatttattcaccagttcctctgcaacccactctgagcctctctctcctcctattttacttgaggctgccaattaccagccccacctgtttcagctcaagagatgccttaagataattatgtgaggccacttggtagcaagaatggcagctatttcctgagcctagtaccccaattaagcccaccattggttagcacactcagcgctgtgagtcgtgaagacacgggagaaaatccaccataataaaactgacattcaattttcaactttagttatttaacacagatttttttattttttatttttttttattttgagacggagttttgctctgtcgcgcagggtggagtgcggtggcacgatctcggctcactgcaacctctgcctcctgggtgcaagcaattatcctgcctcagcctcccgagtagctgggactgcaggcacacactgccacgcccagctaattttttgcattttagtagagacggggtttcaccgtgttgcccaggctgttctaaaactcctgaactcaggtaatctgcctgcctcggcctccccaagtgctaggattacagatgtgagccaccacgcccggccttttttttttttttttcttttttgagatggagtttcactcttgttgcccaggctggagtgcgttggcgtggtcttggctcactgcaacctctgcctccttggttcaagcaattctcctgcctcagcctctcgagtagctgggattataggcgtccgccaccatgcctggctaatttttttgtgtgtttttagtatagacacggtttcaccatgttggccaggctggtctcgaatgcctggcctcaggtgatccacctgccttggcctcccaaagtgctgggattacaggcatgaaccaccacgcctggcctaaaatgtttttaaataactgtacttgtactcactcaccctacctccagggcatagtcagtctgggctgagatccccatgatcagatatttgatggaaagtcctgaaaggccaatgagttggatggcaagaatgcaggcagaagctgctggataaaataggctacagccacctcagatgctttcagtgctctgtctgaggatgtgtatatgcatatgcaaactcgacccccgttcctgcccagataatggctcaataactctgaggctggttgctcagcctctgagggcaatacaggcatttaaaaaattaaaatgaccaggcacagtggctcacgcctgtaatctcggcactttgggagactgaggtgggagcatcacttgagaccaggagtttgggaccaggctgggcaacacagggagaccccctctctacaaaaacatttttaaaaaattagctgggtgtggtgatgcatgcctgtggtcccagttacttgggaggctgacgtgggtggctcacttgagcacaggagtttgaggctgcagtgacctatgaccacatcactgtacgccagcccgggtgagagagggagaccccgtctctaaaaataaaatgtaaaatcactgaaaaaatgagtgttcggtgaaacaagtgggattttctgggccagcaagtcttccaaactgtatatgatgcatcctgtctccatgtgtaatatattttaatgataaatgtatttttaacagtgaaaaaaaaaaaaaaa

SEQ ID NO: 75 - protein, 913 aa, Homo sapiens
MDQSVAIQETLAEGEYCVIAVQGVLCEGDSRQSRLLGLVRYRLEHGGQEHALFLYTHRRMAITGDDVSLDQIVPVSRDFTLEEVSPDGELYILGSDVTVQLDTAELSLVFQLPFGSQTRMFLHEVARACPGFDSATRDPEFLWLSRYRCAELELEMPTPRGCNSALVTWPGYATIGGGGSNFDGLRPNGKGVPMDQSSRGQDKPESLQPRQNKSKSEITDMVRSSTITVSDKAHILSMQKFGLRDTIVKSHLLQKEEDYTYIQNFRFFAGTYNVNGQSPKECLRLWLSNGIQAPDVYCVGFQELDLSKEAFFFHDTPKEEEWFKAVSEGLHPDAKYAKVKLIRLVGIMLLLYVKQEHAAYISEVEAETVGTGIMGRMGNKGGVAIRFQFHNTSICVVNSHLAAHIEEYERRNQDYKDICSRMQFCQPDPSLPPLTISNHDVILWLGDLNYRIEELDVEKVKKLIEEKDFQMLYAYDQLKIQVAAKTVFEGFTEGELTFQPTYKYDTGSDDWDTSEKCRAPAWCDRILWKGKNITQLSYQSHMALKTSDHKPVSSVFDIGVRVVNDELYRKTLEEIVRSLDKMENANIPSVSLSKREFCFQNVKYMQLKVESFTIHNGQVPCHFEFINKPDEESYCKQWLNANPSRGFLLPDSDVEIDLELFVNKMTATKLNSGEDKIEDILVLHLDRGKDYFLSVSGNYLPSCFGSPIHTLCYMREPILDLPLETISELTLMPVWTGDDGSQLDSPMEIPKELWMMVDYLYRNAVQQEDLFQQPGLRSEFEHIRDCLDTGMIDNLSASNHSVAEALLLFLESLPEPVICYSTYHNCLECSGNYTASKQVISTLPIFHKNVFHYLMAFLRELLKNSAKNHLDENILASIFGSLLLRNPAGHQKLDMTEKKKAQEFIHQFLCNPL

SEQ ID NO: 76 - DNA, 2855 bp, Homo sapiens
ttccggcactcgcggaactttggtgcagcctgatgcgcaacgtggggactcaggcgcgctgggcggcaggagttgcttccggccgtgttggtggtctgaattgagaagccgcgactaagggaagatggagacaatactggagcagcagcggcgctatcatgaggagaaggaacggctcatggacgtcatggctaaagagatgctcaccaagaagtccacgctccgggaccagatcaattctgatcaccgcactcgggccatgcaagataggtatatggaggtcagtgggaacctgagggatttgtatgatgataaggatggattacgaaaggaggagctcaatgccatttcaggacccaatgagtttgctgaattctataatagactcaagcaaataaaggaattccaccggaagcacccaaatgagatctgtgtgccaatgtcagtggaatttgaggaactcctgaaggctcgagagaatccaagtgaagaggcacaaaacttggtggagttcacagatgaagagggatatggtcgttatctcgatctccatgactgttacctcaagtacattaacctgaaggcatctgagaagctggattatatcacatacctgtccatctttgaccaattatttgacattcctaaagaaaggaagaatgcagagtataagagatacctagagatgctgcttgagtaccttcaggattacacagatagagtgaagcctctccaagatcagaatgaactttttgggaagattcaggctgagtttgagaagaaatgggagaatgggacctttcctggatggccgaaagagacaagcagtgccctgacccatgctggagcccatcttgacctctctgcattctcctcctgggaggagttggcttctctgggtttggacagattgaaatctgctctcttagctttaggcttgaaatgtggcgggaccctagaagagcgagcccagagactattcagtaccaaaggaaagtccctggagtcacttgatacctctttgtttgccaaaaatcccaagtcaaagggcaccaagcgagacactgaaaggaacaaagacattgcttttctagaagcccagatctatgaatatgtagagattctcggggaacagcgacatctcactcatgaaaatgtacagcgcaagcaagccaggacaggagaagagcgagaagaagaggaagaagagcagatcagtgagagtgagagtgaagatgaagagaacgagatcatttacaaccccaaaaacctgccacttggctgggatggcaaacctattccctactggctgtataagcttcatggcctaaatatcaactacaactgtgagatttgtggaaactacacctaccgagggcccaaagccttccagcgacactttgctgaatggcgtcatgctcatggcatgaggtgtttgggcatcccaaacactgctcactttgctaatgtgacacagattgaagatgctgtctccttgtgggccaaactgaaattgcagaaggcttcagaacgatggcagcctgacactgaggaagaatatgaagactcaagtgggaatgttgtgaataagaagacatacgaggatctgaaaagacaaggactgctctagtgttcagggatgtagctcagcttttgggctagcccaggcttccctaagatctgctttttctatttctcccaaccaaatcctcttaaagaccctttgctatgtagtctcatggtctagcatgcatcttgtagaaacaaggcatgctggcagattgcagggttgagatgtgttttatctgttttatattttaaaagattctgccagaaaataaaaccagaccttgttctaaagcccagggttatggaccaactcagtgcttcaggtcttaacgcctccatacctcttcctcaccaactttactagtagctgagatttaatgggcacctattatgctacatatcatgttaggtaaatctgacctgacctctttccccaccctcctttgttgctgcttccctgaatgagtattaccccaggatgaggtctgccatcagcttagttagccattgatgcaaatactagggaaagactaggaggatgagccagggttgctactaaggactaagtgtcgcaccaaggtttgccttttgtatttgcataaagaaaggagttggagctgggtgcagtggcttgtgcctgtagtcccagctacttgggaggctgaggcaggagggttgcttgagactagcctaggtaacatagtgagaccctgtctcattaaaaaaaaaaaaaaggcatggtggcacgcactgtagtcccagctactcaggagactgaggctagaagatcctttgaacctaggagtttgagaccagcctgggcgatatagtgaggccccatctcaaaaaaaaaaaaaggggggggggggggagttgggctgtgttggaatgggcctgcagcccaacaaacaagggaactaggaccgacagtgacttcaccagcttgctaggtcagaatgagagactggtgggtctgtctacctgtttcttctacaagatccctatttgactgtaaaagtagctaatactcacatgttctccaatcccaggtagccatggtagagttgggtagagttgagcagctgccccaggatccaaatgtggtgtctgaaatggaaagaactaaggcaaccaggaaggcactgatctgccttataagcacagtcatctgaaagtcaggcctgctgcaggacaggatcccccagagaccccatttgcctctcaacactcagaccttcaactgttttttaataaatctactttttaaaaaaaaaaaaaaaaaaaaa

SEQ ID NO: 77 - protein, 501 aa, Homo sapiens
METILEQQRRYHEEKERLMDVMAKEMLTKKSTLRDQINSDHRTRAMQDRYMEVSGNLRDLYDDKDGLRKEELNAISGPNEFAEFYNRLKQIKEFHRKHPNEICVPMSVEFEELLKARENPSEEAQNLVEFTDEEGYGRYLDLHDCYLKYINLKASEKLDYITYLSIFDQLFDIPKERKNAEYKRYLEMLLEYLQDYTDRVKPLQDQNELFGKIQAEFEKKWENGTFPGWPKETSSALTHAGAHLDLSAFSSWEELASLGLDRLKSALLALGLKCGGTLEERAQRLFSTKGKSLESLDTSLFAKNPKSKGTKRDTERNKDIAFLEAQIYEYVEILGEQRHLTHENVQRKQARTGEEREEEEEEQISESESEDEENEIIYNPKNLPLGWDGKPIPYWLYKLHGLNINYNCEICGNYTYRGPKAFQRHFAEWRHAHGMRCLGIPNTAHFANVTQIEDAVSLWAKLKLQKASERWQPDTEEEYEDSSGNVVNKKTYEDLKRQGLL

SEQ ID NO: 78 - DNA, 1738 bp, Homo sapiens
ggcgggcccgcgctcacttcctcggggaggggttggggccgcgctcccactcgcccacacggtccgtctgcagtcggcagcctcgccggcagctcgctcggcccccgcttggcccggcccgcaggtaggagccgccgagggacgcggcgcccggttcccggccccgcctgcgccgcgcgctccccgctcccgccgcccgcttcgagggttctctccccttgccaccatgagcgagtcatttgactgtgcaaaatgcaacgagtccctgtatggacgcaagtacatccagacagacagcggcccctactgtgtgccctgctatgacaatacctttgccaacacctgtgctgagtgccagcagcttatcgggcatgactcgagggagctgttctatgaagaccgccatttccacgagggctgcttccgctgctgccgctgccagcgctcactagccgatgaacccttcacctgccaggacagtgagctgctctgcaatgactgctactgcagtgcgttttcctcgcagtgctccgcttgtggggagactgtcatgcctgggtcccggaagctggaatatggaggccagacatggcatgagcactgcttcctgtgcagtggctgtgaacagccactgggctcccgttcttttgtgcccgacaagggtgctcactactgcgtgccctgctatgagaacaagtttgctcctcgctgcgcccgctgcagcaagacgctgacacagggtggagtgacataccgtgatcagccgtggcatcgagaatgtctggtctgtaccggatgccagacgcccctggcagggcagcagttcacctcccgggatgaagatccctactgtgtggcctgttttggagaactctttgcacctaagtgcagcagctgcaagcgccccatcgtaggactcggtggaggcaagtatgtgtcctttgaagaccgacactggcaccacaactgcttctcctgcgcccgctgctctacctccctggtgggccagggcttcgtaccggatggagaccaagtgctctgccagggctgtagccaggcagggccctaagccagggctcctggacccaggctttcccataccacgggcccaggactgtggctccttttctaaaccacctctgggactcagctccccccgccaaaaaaaatgggtctccttctgggctccaggattgtctccccactccagcatccccaaactggtactccctgacccaggcccccaatcctgggctcttacagagcctccatgagtcaagccccctccccacacctggactccagaattcaccctctcccctgcagtctgggttcccagactgagtcctctccccaaatcagggctctagacccgagccctccaaacctggactctgggacttaggcccccttaaatctagacttctctttataggtttcaggtctcctatgggtgcctgggaagtccttgaaagtggactgttctcaggcttgacctgccccaccccatccccgcggttgaggctgtgggggcagcagatcaggagcccactgataaggggccctagggtacagggtgctgcccagcaggtcgccaccgagtgtcttctcattttatttcagctccattttgcccatagatgggcagaggggtgagattggctcatcccccttccagattctgcaataaagcggtgtgaggaaaaaaaaaaaaaaaaaaaaaaaaaaaaaaaaaaaa

SEQ ID NO: 79 - protein, 280 aa, Homo sapiens
MSESFDCAKCNESLYGRKYIQTDSGPYCVPCYDNTFANTCAECQQLIGHDSRELFYEDRHFHEGCFRCCRCQRSLADEPFTCQDSELLCNDCYCSAFSSQCSACGETVMPGSRKLEYGGQTWHEHCFLCSGCEQPLGSRSFVPDKGAHYCVPCYENKFAPRCARCSKTLTQGGVTYRDQPWHRECLVCTGCQTPLAGQQFTSRDEDPYCVACFGELFAPKCSSCKRPIVGLGGGKYVSFEDRHWHHNCFSCARCSTSLVGQGFVPDGDQVLCQGCSQAGP

SEQ ID NO: 80 - DNA, 1838 bp, Homo sapiens
agagcgggatcttcagggcagcgggcaaccccttggcccaggaagcctggaacgcaaggaccggagggcgtgggctgggacgcccctaccttggtctttcagggaaaggccttggaaagcagtcgttgcgccagacagcccagggaagagcggcagcctgaggacctagggccacctgctgttccctgggattcatgtccttctggggaggagggaggacccaggacaatggctgctgttcatgatctggagatggagagcatgaatctgaatatggggagagagatgaaagaagagctggaggaagaggagaaaatgagagaggatgggggaggtaaagatcgggccaagagtaaaaaggtccacaggattgtctcaaaatggatgctgcccgaaaagtcccgaggaacatacttggagagagctaactgcttcccgcctcccgtgttcatcatctccatcagcctggccgagctggcagtgtttatttactatgctgtgtggaagcctcagaaacagtggatcacgttggacacaggcatcttggagagtccctttatctacagtcctgagaagagggaggaagcctggaggtttatctcatacatgctggtacatgctggagttcagcacatcttggggaatctttgtatgcagcttgttttgggtattcccttggaaatggtccacaaaggcctccgtgtggggctggtgtacctggcaggagtgattgcagggtcccttgccagctccatctttgacccactcagatatcttgtgggagcttcaggaggagtctatgctctgatgggaggctattttatgaatgttctggtgaattttcaagaaatgattcctgcctttggaattttcagactgctgatcatcatcctgataattgtgttggacatgggatttgctctctatagaaggttctttgttcctgaagatgggtctccggtgtcttttgcagctcacattgcaggtggatttgctggaatgtccattggctacacggtgtttagctgctttgataaagcactgctgaaagatccaaggttttggatagcaattgctgcatatttagcttgtgtcttatttgctgtgtttttcaacattttcctatctccagcaaactgacctgcccctattgtaagtcaattaataaaaagagccatctggaggaaataaaaaaaaaaggaagactctatgaagaaacagagaagtctcagaaaaggctaacaattttatatagaggacaaaacagcattaaactcatcagttgcaaagattgcctataaaaggaccttaggatttaaggaaggggcttcttaatgtagaaagggaagaagaagagagaaaagaagggtagtaaaaactagagattggggccaggcgcagtggctcacgcctgtaatcccagcactttgggaggctgaggcgggtgaaatcacctgaggtcatgagttcaagaccagcctgaccaatatggtgaaaccctgtctctactaaagaaaatacaaaaattagccgggcgtggtggcgtgtgcctgtagtcccagctacttgcgaggctgaggcaggagaattgcttgaacctgggaggcgaaggttgcagtgagccgagattgcgccactgcactccagcctgggtgatagagcgacactcggtctcaaaaaacaaaacaaaacaaaacaaaattagagattgggtctttcccaggcatatggtattctataaaacagacttactctccttggaggatatattttggagaatgcttcataaaatctatgaatactgtacaatgctgataataaaaactttttatacctga

SEQ ID NO: 81 - protein, 303 aa, Homo sapiens
MAAVHDLEMESMNLNMGREMKEELEEEEKMREDGGGKDRAKSKKVHRIVSKWMLPEKSRGTYLERANCFPPPVFIISISLAELAVFIYYAVWKPQKQWITLDTGILESPFIYSPEKREEAWRFISYMLVHAGVQHILGNLCMQLVLGIPLEMVHKGLRVGLVYLAGVIAGSLASSIFDPLRYLVGASGGVYALMGGYFMNVLVNFQEMIPAFGIFRLLIIILIIVLDMGFALYRRFFVPEDGSPVSFAAHIAGGFAGMSIGYTVFSCFDKALLKDPRFWIAIAAYLACVLFAVFFNIFLSPAN

SEQ ID NO: 82 - DNA, 2580 bp, Homo sapiens
ataaggtatgaaagatgtggcctgcagagagccggcactatctctactgctgctgctgctgctactgctgctgttgctaccgctgcctctgctgccaccgccactactgctgccagcggagccgctaggagtgagcatcccctctccgggatacccagctccgcggcgtctcccgcgcgccctggccccacacggacctgccagccccagggaacaaaagcggagcccgctcgccctctactgcagccggaggatgagtcgagagggctgagcggagagtgtggtcctcggcggctggagctatttccttggcttctctccatgacgattcctgactcgtggccccggcaatcttgggaagacatcatccagcttcttcagtccagaccctgggcaccccccttttgccaggatcgtccccacccagcctggacacattgactgaactgttttctaggacactgcactcagcaagacatggtggtgagccctgactctcagtcttcatgattgaagaactcttttgtacaacacaaagcactcaaaaagagtgaatgaaatgtgcagctcagagtgtcatttctgaagggaggagtctttctcttggagaagagtcctcaatgagcctggccgaggcccgggatctgtgtgaagtggactaaggattaagtaggatgtcaactgagacagaacttcaagtagctgtgaaaaccagcgccaagaaagactccagaaagaaaggtcaggatcgcagtgaagccactttgataaagaggtttaaaggtgaaggggtccggtacaaagccaaattgatcgggattgatgaagtttccgcagctcggggagacaagttatgtcaagattccatgatgaaactcaagggcgttgttgctggcgctcgttccaaaggagaacacaaacagaaaatctttttaaccatctcctttggaggaatcaaaatctttgatgagaagacaggggcccttcagcatcatcatgctgttcatgaaatatcctacattgcaaaggacattacagatcaccgggcctttggatatgtttgtgggaaggaagggaatcacagatttgtggccataaaaacagcccaggcggctgaacctgttattctggacttgagagatctctttcaactcatttatgaattgaagcaaagagaagaattagaaaaaaaggcacaaaaggataagcagtgtgaacaagctgtgtaccagacaatattggaagaggatgttgaagatcctgtgtaccagtacattgtgtttgaggctggacacgagccaatccgtgatcccgaaacggaagaaaacatttatcaggttcccaccagccaaaagaaggaaggtgtttatgatgtgccaaaaagtcaacctgtaagtgctgtgacccaattagaactttttggggacatgtccacaccccctgatataacctctccccccactcctgcaactccaggtgatgcctttatcccatcttcatctcagacccttccagcgagtgcagatgtgtttagttctgtacctttcggcactgctgctgtaccctcaggttacgttgcaatgggcgctgtcctcccgtccttctggggtcagcagcccctcgtccaacagcagatggtcatgggtgcccagccaccagtcgctcaggtgatgccgggggctcagcccatcgcatggggccagccgggtctctttcctgccactcagcagccctggccaactgtggccgggcagtttccgccagccgccttcatgcccacacaaactgttatgcctttgccagctgccatgttccaaggtcccctcaccccccttgccaccgtcccaggcacgagtgactccaccaggtcaagtccacagaccgacaagcccaggcagaaaatgggcaaagaaacgtttaaggatttccagatggcccagcctccgcccgtgccctcccgcaaacccgaccagccctccctcacctgtacctcagaggccttctccagttacttcaacaaagtcggggtggcacaggatacagacgactgtgatgactttgacatctcccagttgaatttgacccctgtgacttctaccacaccatcgaccaactcacctccaaccccagcccctagacagagctctccatccaaatcatctgcatcccatgccagtgatcctaccacagatgacatctttgaagagggctttgaaagtcccagcaaaagcgaagagcaagaagctcctgatggatcacaggcctcatccaacagtgatccatttggtgagcccagtggggagcccagtggtgataatataagtccacaggccggtagctagatagcgcaggtctgggagccagagcctctgtacgcgcagatcaacagacctaagaaatagcatcgatgcgagctcgtggtgggtgctcaagactggcatggacatcagcatcacgacaggctctcttgtattctttcacctcttcccacaagaaattcatgattgcccaatggaactcgctcagaagagggaactaagcatttttggcaaccaatggcagatatctatggcagcacac

SEQ ID NO: 83 - protein, 555 aa, Homo sapiens
MSTETELQVAVKTSAKKDSRKKGQDRSEATLIKRFKGEGVRYKAKLIGIDEVSAARGDKLCQDSMMKLKGVVAGARSKGEHKQKIFLTISFGGIKIFDEKTGALQHHHAVHEISYIAKDITDHRAFGYVCGKEGNHRFVAIKTAQAAEPVILDLRDLFQLIYELKQREELEKKAQKDKQCEQAVYQTILEEDVEDPVYQYIVFEAGHEPIRDPETEENIYQVPTSQKKEGVYDVPKSQPVSAVTQLELFGDMSTPPDITSPPTPATPGDAFIPSSSQTLPASADVFSSVPFGTAAVPSGYVAMGAVLPSFWGQQPLVQQQMVMGAQPPVAQVMPGAQPIAWGQPGLFPATQQPWPTVAGQFPPAAFMPTQTVMPLPAAMFQGPLTPLATVPGTSDSTRSSPQTDKPRQKMGKETFKDFQMAQPPPVPSRKPDQPSLTCTSEAFSSYFNKVGVAQDTDDCDDFDISQLNLTPVTSTTPSTNSPPTPAPRQSSPSKSSASHASDPTTDDIFEEGFESPSKSEEQEAPDGSQASSNSDPFGEPSGEPSGDNISPQAGS

SEQ ID NO: 84 - DNA, 3426 bp, Homo sapiens
gcgtgctgtgcggcgcggtctcagggaaggtggggctatggcagctgctagggaccctccggaagtatcgctgcgagaagccacccagcgaaaattgcggaggttttccgagctaagaggcaaacttgtagcacgtggagaattctgggacatagttgcaataacagcggctgatgaaaaacaggaacttgcttacaaccaacagctgtcagaaaagctgaaaagaaaggagttaccccttggagttcaatatcacgtttttgtggatcctgctggagccaaaattggaaatggaggatcaacactttgtgcccttcaatgtttggaaaagctatatggagataaatggaattcttttaccatcttattaattcactctggtggctacagtcaacgacttccaaatgcaagtgctctgggaaaaattttcactgctttacctcttggtaaccccatttatcagatgctagaattaaaactagccatgtacattgatttccccttaaatatgaatcctggaattctggttacctgtgcagatgatattgaactttatagtattggagaatttgagtttattaggtttgacaaacctggctttactgctttagctcatccttctagtttgacgataggtaccacacatggagtatttgtcttagatccttttgatgatttaaaacatagagaccttgaatacaggtcttgccatcgtttccttcataagcccagcatagaaaagatgtatcagtttaatgctgtgtgtagacctggaaatttttgtcaacaggactttgctgggggtgacattgccgatcttaaattagactctgactatgtctacacagatagcctattttatatggatcataaatcagcaaaaatgttacttgctttttatgaaaaaataggcacactgagctgtgaaatagatgcctatggtgactttctgcaggctttgggacctggagcaactgtggagtacaccagaaacacatcaaatgtcattaaagaagagtcagagttggtagaaatgaggcagagaatatttcatcttcttaaaggaacatcactaaatgttgttgttcttaataactccaaattttatcacattggaacaaccgaagaatatttgttttactttacctcagataacagtttaaagtcagagctcggcttacagtccataacttttagtatctttccagatataccagaatgctctggcaaaacatcctgtatcattcaaagcatactggattcaagatgttctgtggcacctggctcagttgtggagtattccagattggggcctgatgtttcagttggggaaaactgcattattagtggttcttacatcctaacaaaagctgccctccccgcacattcttttgtatgttccttaagcttaaagatgaatagatgcttaaagtatgcaactatggcatttggagtgcaagacaacttgaaaaagagtgtgaaaacattgtcagatataaagttacttcaattctttggagtctgtttcctgtcatgcttagatgtttggaatcttaaagttacagaggaactgttctctggtaacaagacatgtctgagtttgtggactgcacgcattttcccagtttgttcttctttgagtgactcagttataacatccctaaagatgttaaatgctgttaagaacaagtcagcattcagcctgaatagctataagttgctgtccattgaagaaatgcttatctacaaagatgtagaagatatgataacttacagggaacaaatttttctagaaatcagtttaaaaagcagtttgatgtagagatattttaaatattgtacactttgcctttttgagtaacattccagagataggtattttttgtaggctgtttcactgaactcagttaatgaaaactgtattaacataattgttgtagcataatattaatagtgcaaaagtacatataagtcattttgatgaaaaatattccaagactaagttgagaaaagagatactattttggatgtgtatcagtatttttgtttttaataatgattgatttgtggagcattgttttttcacataattagttttaaaggtaattttctaagcatacctttggaatttttccatcttttttgaggcttttggtccagtgaagttctaagtattcactggcacttctctcctcaactgtaattctatttttaataataaaaatggcatactgtagggtcttcagagtagtgtaggaatactgtagaaatactttttcagaaacgaatccatagctgacaaattcactcagtgcccaatatattgtgattattttcgttgataaagaactagatacaaagacctctgaaattgatgataaaatttgtatctcattaattttatcaaaatgaaactaaaagtacatatgtattatacacttgaacatgtgtttgtatatctttaaaattttcctttatgttccattccataggaaaacacacatatgcacacaaaactcagttatctgtggggaaagtggtagtaataattgagattcatcaataatcatataatttcactatagacattacttgcattatctcctatcagtccttctaacaaaacttcaattaccagatgaactgactttagttttcatcttattttttgtccacatgctggtgatgctgagaaacaataattggcccaaatgcagacatcaagaagcaggcaggaaaatggaaaaactgagataatacacaggtgataaacagtttcgagaaaataaaaattggctagaatctcaagttatgtgtttctatattggtataagcatataagtgaaaagtcttataagtgtaatagagaaaagatttgtcagtgtgtttttttaaatgaaataactagtctgtgctactttatgtcaatataaaaattggtaaactagaagtaacttgtccacaaccctcagttatgatacttatgtgcgtgtttttttttccaaagtttttcccaaggagaagatacaaatatatggtagctattgtttaaaaatgattgatttacttgcagatttttcagaggatgttatgtctttgtcattcattaaatgttcaaaattgtagttttaccaaatctgaagtgccatcagttataagaatcaccattattttatgttccattaagaaaaacacaataaaacatgacactgctttttttgttacttgaaattttcatatttattggagagctcttttagatgtttttaaatacagatttttatttaaccctcttgcatatacatataaaataacaaaaaaataaaatattgagatatcatcaagaaatttctacagcttcacattcaaactcttcagcactttcagagctattgatatgcatatgtccacctagtaccatcttct

SEQ ID NO: 85 - protein, 594 aa, Homo sapiens
MAAARDPPEVSLREATQRKLRRFSELRGKLVARGEFWDIVAITAADEKQELAYNQQLSEKLKRKELPLGVQYHVFVDPAGAKIGNGGSTLCALQCLEKLYGDKWNSFTILLIHSGGYSQRLPNASALGKIFTALPLGNPIYQMLELKLAMYIDFPLNMNPGILVTCADDIELYSIGEFEFIRFDKPGFTALAHPSSLTIGTTHGVFVLDPFDDLKHRDLEYRSCHRFLHKPSIEKMYQFNAVCRPGNFCQQDFAGGDIADLKLDSDYVYTDSLFYMDHKSAKMLLAFYEKIGTLSCEIDAYGDFLQALGPGATVEYTRNTSNVIKEESELVEMRQRIFHLLKGTSLNVVVLNNSKFYHIGTTEEYLFYFTSDNSLKSELGLQSITFSIFPDIPECSGKTSCIIQSILDSRCSVAPGSVVEYSRLGPDVSVGENCIISGSYILTKAALPAHSFVCSLSLKMNRCLKYATMAFGVQDNLKKSVKTLSDIKLLQFFGVCFLSCLDVWNLKVTEELFSGNKTCLSLWTARIFPVCSSLSDSVITSLKMLNAVKNKSAFSLNSYKLLSIEEMLIYKDVEDMITYREQIFLEISLKSSLM

SEQ ID NO: 86 - DNA, 7165 bp, Homo sapiens
aacagggaagctgtggataccaacggagggtgggagcccgggaggctgcgggtagcccgggcgcccaggggcggcggcggcccagcccaggtgcccgcgcacaggggacctcggtgcggagccacccctcgagcgcgactgtcgcagcgccagcgcgcacggggccccacgcacccaccctccgcacctgccgcggggtccaaaagggatcctgcaaaaatgagccattctcaccccgctgggttacttgctgcatataatagccttatggataaacacctggctgggtattttaacaatacaaggataaggcgtcatctcttaagatcaggactgatcacaagaagtggaagaatactttctgaaaaagaatataaactaaatatgatgaagcgggatcatcaaaaatatatccgggaatgcttagcccaggcaatttttcataaagttcttgatatggagcgttaccatcagcttgaaataaaaaagaaattggagaccttagctaggaaggagcgaatccagaggtttaagggagagcacacaagaaggtctgttgaaaataacatgccaatcctgtctccccacccaccagttggcccaaagagtaatcgtggccatagtgttctggttgatgaaggacattccagtccgttagcactgacagcccctcgaccatatactgctccaggaaatatgcagcctccaattcgattacagcctcttcccagtaatcctgcagtagaaactgttccaaaggtaacttcaaggtccagatcaaaaacctcattgctggaaaatgaagctctgtttcccattgggggcaagaaggcagtgatgaagttcaggaactccataggcaattcacagagaatgaattcatatcaacttccaaacattaacagttacatgatgcctattcctcctccacttcccccaactgggaaaatcacaagagaaaatagatctgaaacatggagaaggagaagatttcgtccaaccactgctccaaatggcttagaacctcttttgacaaaggattcaagaaggattcataaaacatccttacatagtaatgcagctattacaatgatctatttggggaaaaatgtgcacctatcttctgataatcctgacttccgggatgaaattaaagtttatcagcagcactgtggtggggaaaacctttgtgtctacaaaggcaaactacttgaaaaagagacctttcagtttatttccaaaaggcatcatggtttccccttcagtctcacctttttcctgaatgggatgcaggtgaacaggttaagctcctgttgtgaatacaagcatcggaaaggttccaggcttggaggcaaacgaggctactttgggtttgtgtgtgttgagagatcatctccttgctacaagtgcattattgcaatgggccttgacaaaaaaccgtctttgccgaaatctaggaaagaaaagagcactgagaaaggagaggaactgaagaaggctgaggggaaagtgaggaaagagagagagtatgtgataccaaaaagaaatgagatcaaggagaacaaaacctctgtttcagccaaattttcagctcaagaaataaaaacagggctcaaagaagtggtaactgctgtggaggaaatgacaagtaaaggaaaaccaggacaagaagtcttggaagacgaccaggaaaatactttaaaatatgagtatgaagaagactttgaagtagatgaggagaaacaaggtgaaaaatctaatgaagaaggacaggctgatgttcaaatgaatggaataccgcagtcacctttggatgataaaaaagataatttagaccctgaaaaagagagtgaaacctcatcacagaaggcaccagatgcccgtgacaatgtgaaagatgagaatgatggatgctctgagagtgaactggaagaggataaacaagatatgaaaactgcttcatcaacctcatccagaagtcacccttattctagtgacagtgaggatgaatctgcagtgggggacagggaagcccacactgacagcagcacagatgaaagtgccagaaggtcatcttctcaggaactgagtgaaaatgataagccaagaaagtctcaccttccaattgaggaatccttagaaattgaaattgaagaccaagaaataacaaaagcagatgtggagaccaagccgatgccaatagacgaaagctttgagaatgttcttaaagaaggaacggagaaaggaacccaagagattgcagagggtttatctgagaagtccgggaaacatgtttctgcagaagaaaaggaaaaggataagagtaagctttgggaagaaagcactgctcaggtgaaggacaaaaaggcaggtctccctgggttggaggaaggtggaaaggattcattgccattagcctatgtcctggctcttggtgcaccaacaatgaatttcatggtggatgaaacagcagcaatcaactcaaacaaggaatcccagcaattggtgcaaaaaacgtatacactggagaagaaagaagcaatggaggaagatgaagcgccccagcacagagatgctgacatagtacagggaaaaggggaggcagcactgtggggagaagcaggagctgttcatgaggctcccttgagggcgtggaagccaacagcagagcagccagaattggcagaagagtttacagaaaaaagggagatccctccaggcatagaaaggggggcagagggagcagcagaagcagaaggggtcagaaggctgggtgaaggggggtcagaccccataggacaagcagcagcaaaagatgctgtgggtctgagtaaagatgaggctcctgaaaagcaagccttgatgctcacagtgcttgagacagacaaagcagcttctgaaggggaacagggtttagagaaggcagtgcttgcaaatgaagcagcagccctgaacttggagcatcttcatgaagtagcagccctgagagaggcagcgacatcggaggagggagaggctgagggtggggtggctgtgagtgatgtcggagaaagtgaagaggaagcatccatagacctagaggacacaggacccatggaggacacagcatcaaagagagaggacggttctgaagaggcaattcttgggggagaggaaccagccaaagagagaaaagaggttatgagaacagaaacacgcttgagccccttcacaggagaggcagaggcaagccggatgcaggtttcggagggcagccctgaggaaggaagccttgcaaaggaagccttcctttgcaaggaagatgtggaaggggaagagatggtgactgaggcagaagctaatagggaagatgataggaaagaaattttacccaaggaattagatttagcaagagagcgaaggaaagctgagaggccaaaaacatctctgaggaaaactgactctgagagagaagaggtgacaagggcaaatgcactcaaggatgaagatgcttttaaagaagagcaaaaacttaaagcggaagaaggggaaacagagacagaagtaagagctgaggaagagacaaaagctcccccaaatgaaatgggatctgatgctgagaacgaagcacctgtggaggcttctgagttgtctgacaatccagggcttctaggagaagattcactaaaagagacagtggttcccatatttgaagcaacgcctggatttgaaaagtcgctggaaaacataacagctctgaggaaagaaggaggaggggaaagactgagtgaagccagagacacagagcacaaagacagagaagagctgtccagcagggagaatagggccctgaaggaagggcaccgccaagatggagagggggccttagcagctcctgaagctgagccagcaggaaaggtgcaggcccctgaggggctgatcccagccacaggccaggcagaggagctagcagccaaagatcacgactcctgcgcaggactggaggggagagctgaagggcaaggaggagtggatgtcgtgctaaggacccaggaagctgttgctgaggaagatcccataatggcagaaaagttcagggaggaagcggtggatgaggacccagaggaggaagaggacaaagagtgcactctggagacagaagcgatgcaggacaggaactcggaaggggacggggacatggaaggagaaggaaacacacaaaagaatgagggcatgggaggaggaagggttgtggctgtggaagttctacacggaggtggtgaaacggcagaaacagccgcagaggagagggaggtgttggcaggttcggagacagccgaggagaaaacaatagcaaataaagcctcctccttttcagatgttgctgaggaagaaacctggcaccaacaggatgagttagtaggaaaaacagcagctgcagggaaggtggtggtagaggaattagcacggagtggggaggaagtgccagcagcagaggagatgacagtgacatatacaacagaggctggggtgggcactccaggagccctggagcggaagacctcagggctaggacaggagcaagaggaagggtcagagggccaggaggcagccactgggagtggcgatgggaggcaggagacaggagcagctgaaaaattccgattaggattatcacgggagggagagagggaattgagtccggagagtctacaggcgatggcaacacttccagtgaagcctgatttcactgaaacccgagagaagcaacagcatatggtgcaaggagaaagcgagactgcagatgtttcccccaacaacatgcaggtctaggagacttgctggcagacggataatttaaagatgtcttctgaagatgtaaagagtggagaaagattcacgcaagcatctcaccaggattcttgattttctctctctcctctttagttgctggttgcgcttgtctgagatgattcccaatctgtcagccctggtcagtagctcagtaagcaccttgagaatagctcaagtagatctgtaggacccttcttagaagcagtggttcctcatggagaaacttgtgaggctgttacacattctacacacctaacattattttcaaacaaaaatgataattttcagatgcttgacttttaccaaagatcactggaaggcccagtcctaatgttaggggtttgtttaaagtcctttttattttacaatacagagccccagtcaattccacaatctcaatttcatacatgggaattttatttaaaaatctgtggtttggggctttaatgaattggcctgtgaaaatgagctctaaatttcctcccacgtacactcaaaactcaagattgctccaaatctctaagttcttccagcaaaagatttcttggcatgtatattcacttatacttagaaatattcattcttttaatttatgccagaataacaaagtggaaatcttatttcaaaatgctctttgtttttttgtgtgtgtttctgtagttctgctttctggggtagactagtaaaatggtagcttccagcattttgtccctggggccttctttatagggccactcaaatttaaataaaagtagtaaataatttagctaagtggaataagtataataattatagtggtaagcatagcacatcagcattatgccaacattctagactctttagttgatgtcattaaatggaaaagaaacttggattaaatgagtgtgctgctcaccttcccaagttctgttatttcaaacctgtgaactaaccttgcagttcattataaatcaacagtaacaactgcattctaaattactccctgatattattttctagttgtgtatcagcctgtctcctaggggttttcatttccctgaagacatacaagtgccccagagcgcatgtatatgtctaccatttctctatatgagaaggtaaaaaaaatttccttaagcagtgattttccagccagaatatacattagattttcatgggacgcttttataaatgactcaacccttttccccaccccagagattcagacttaattcgttttagatggatctacacatcagtatatatatatttttaacttttcacttgattcttctctgtagccaaggttgagaaccgctgttctaaatcatcatataatccatgctggccacattacactcaaggtccctagggaccaggcatattatcatagtaggtattttccattttaatgtgtaatggagccattcaatgatcaaaaatacactggaccagatagtagactggtcccttgatcagaagcatcagcacatcagcatcacctggaaattgttcccagcctttgtctcctacctactaaattagaaactcttggtgggttccagtaatccatagcttaacaagccctgcagttaatactgatgtacactgatgtccaaaaactgctgtcatggactattgattgtattgaggattagtctcagttggaaagccaactacagaggcattttgaactttctttctttgcctctctatgtctctctgtcttttcctgtcttctgatttatctgtctttctttctctagtaaatggcactcaatataaaagtggtggagtcaatcttaaacttatttttattatgattgtattgatacatgcacgaagtccctctgccctactccctattcaaggatattactcactgcacatcataaatctccatcatctgtcttaaagttttatgagtagatttcatctacattatattcaagttcatttattactgagctgtattactgtggagctctaacagtatttgtttcctgatttcaaactcaatgctacagagcactttgaatacatcacaccttataggaaagatagtaaatgtattaatcccattgaaaaattagttttgtacaatgtgctaaatagtattgcattggattacttttatatttaacacactccatcaaaacatcccataacataattttacaatctgcatgtgaatttaactgtgaaattcagtattgtgatattttgaataagtgaattctttctctgcaaatactatgttgataaaattacttgtatgttcccctgaaatggtttgtttcctgtttcttcattattaaaacataaatcaatcatatgtttacagataaaaaaa

SEQ ID NO: 87 - protein, 1530 aa, Homo sapiens
MSHSHPAGLLAAYNSLMDKHLAGYFNNTRIRRHLLRSGLITRSGRILSEKEYKLNMMKRDHQKYIRECLAQAIFHKVLDMERYHQLEIKKKLETLARKERIQRFKGEHTRRSVENNMPILSPHPPVGPKSNRGHSVLVDEGHSSPLALTAPRPYTAPGNMQPPIRLQPLPSNPAVETVPKVTSRSRSKTSLLENEALFPIGGKKAVMKFRNSIGNSQRMNSYQLPNINSYMMPIPPPLPPTGKITRENRSETWRRRRFRPTTAPNGLEPLLTKDSRRIHKTSLHSNAAITMIYLGKNVHLSSDNPDFRDEIKVYQQHCGGENLCVYKGKLLEKETFQFISKRHHGFPFSLTFFLNGMQVNRLSSCCEYKHRKGSRLGGKRGYFGFVCVERSSPCYKCIIAMGLDKKPSLPKSRKEKSTEKGEELKKAEGKVRKEREYVIPKRNEIKENKTSVSAKFSAQEIKTGLKEVVTAVEEMTSKGKPGQEVLEDDQENTLKYEYEEDFEVDEEKQGEKSNEEGQADVQMNGIPQSPLDDKKDNLDPEKESETSSQKAPDARDNVKDENDGCSESELEEDKQDMKTASSTSSRSHPYSSDSEDESAVGDREAHTDSSTDESARRSSSQELSENDKPRKSHLPIEESLEIEIEDQEITKADVETKPMPIDESFENVLKEGTEKGTQEIAEGLSEKSGKHVSAEEKEKDKSKLWEESTAQVKDKKAGLPGLEEGGKDSLPLAYVLALGAPTMNFMVDETAAINSNKESQQLVQKTYTLEKKEAMEEDEAPQHRDADIVQGKGEAALWGEAGAVHEAPLRAWKPTAEQPELAEEFTEKREIPPGIERGAEGAAEAEGVRRLGEGGSDPIGQAAAKDAVGLSKDEAPEKQALMLTVLETDKAASEGEQGLEKAVLANEAAALNLEHLHEVAALREAATSEEGEAEGGVAVSDVGESEEEASIDLEDTGPMEDTASKREDGSEEAILGGEEPAKERKEVMRTETRLSPFTGEAEASRMQVSEGSPEEGSLAKEAFLCKEDVEGEEMVTEAEANREDDRKEILPKELDLARERRKAERPKTSLRKTDSEREEVTRANALKDEDAFKEEQKLKAEEGETETEVRAEEETKAPPNEMGSDAENEAPVEASELSDNPGLLGEDSLKETVVPIFEATPGFEKSLENITALRKEGGGERLSEARDTEHKDREELSSRENRALKEGHRQDGEGALAAPEAEPAGKVQAPEGLIPATGQAEELAAKDHDSCAGLEGRAEGQGGVDVVLRTQEAVAEEDPIMAEKFREEAVDEDPEEEEDKECTLETEAMQDRNSEGDGDMEGEGNTQKNEGMGGGRVVAVEVLHGGGETAETAAEEREVLAGSETAEEKTIANKASSFSDVAEEETWHQQDELVGKTAAAGKVVVEELARSGEEVPAAEEMTVTYTTEAGVGTPGALERKTSGLGQEQEEGSEGQEAATGSGDGRQETGAAEKFRLGLSREGERELSPESLQAMATLPVKPDFTETREKQQHMVQGESETADVSPNNMQV

SEQ ID NO: 88 - DNA, 4199 bp, Homo sapiens
ggagggcagtcggcggctctcgcgccccggccactttccctgcgcgattcccggagctccctgcaggaggtgagagtccccagcgggtccggatggcgtagttttgccgcggcgcagcagctgccggagctcgccgccgccgagcgctgggcggggaaacttgccgccgctttcctccaacttgctgcgggtggatctccgctggacacaccgcctccgaggcagtttgaaaattgcaaggagggactttaagactacttctgatttgcaaagattgtctgtgctctgagcaggctgaagtgactggacgagacgcactgttggagaaataaaaatgacttcccattatgtgattgccatctttgccctgatgagctcctgtttagccactgcaggtccagagcctggtgcactgtgtgaactgtcacctgtcagtgcctcccatcctgtccaggccttgatggagagcttcactgttttgtcaggctgtgccagcagaggcacaactgggctgccacaggaggtgcatgtcctgaatctccgcactgcgggccaggggcctggccagctacagagagaggtcacacttcacctgaatcccatctcctcagtccacatccaccacaagtctgttgtgttcctgctcaactccccacaccccctggtgtggcatctgaagacagagagacttgccactggggtctccagactgtttttggtgtctgagggttctgtggtccagttttcatcagcaaacttctccttgacagcagaaacagaagaaaggaacttcccccatggaaatgaacatctgttaaattgggcccgaaaagagtatggagcagttacttcattcaccgaactcaagatagcaagaaacatttatattaaagtgggggaagatcaagtgttccctccaaagtgcaacatagggaagaattttctctcactcaattaccttgctgagtaccttcaacccaaagcagcagaagggtgtgtgatgtccagccagccccagaatgaggaagtacacatcatcgagctaatcacccccaactctaacccctacagtgctttccaggtggatataacaattgatataagaccttctcaagaggatcttgaagtggtcaaaaatctcatcctgatcttgaagtgcaaaaagtctgtcaactgggtgatcaaatcttttgatgttaagggaagcctgaaaattattgctcctaacagtattggctttggaaaagagagtgaaagatctatgacaatgaccaaatcaataagagatgacattccttcaacccaagggaatctggtgaagtgggctttggacaatggctatagtccaataacttcatacacaatggctcctgtggctaatagatttcatcttcggcttgaaaataatgcagaggagatgggagatgaggaagtccacactattcctcctgagctacggatcctgctggaccctggtgccctgcctgccctgcagaacccgcccatccggggaggggaaggccaaaatggaggccttccgtttcctttcccagatatttccaggagagtctggaatgaagagggagaagatgggctccctcggccaaaggaccctgtcattcccagcatacaactgtttcctggtctcagagagccagaagaggtgcaagggagcgtggatattgccctgtctgtcaaatgtgacaatgagaagatgatcgtggctgtagaaaaagattcttttcaggccagtggctactcggggatggacgtcaccctgttggatcctacctgcaaggccaagatgaatggcacacactttgttttggagtctcctctgaatggctgcggtactcggccccggtggtcagcccttgatggtgtggtctactataactccattgtgatacaggttccagcccttggggacagtagtggttggccagatggttatgaagatctggagtcaggtgataatggatttccgggagatatggatgaaggagatgcttccctgttcacccgacctgaaatcgtggtgtttaattgcagccttcagcaggtgaggaaccccagcagcttccaggaacagccccacggaaacatcaccttcaacatggagctatacaacactgacctctttttggtgccctcccagggcgtcttctctgtgccagagaatggacacgtttatgttgaggtatctgttactaaggctgaacaagaactgggatttgccatccaaacgtgctttatctctccatattcgaaccctgataggatgtctcattacaccattattgagaatatttgtcctaaagatgaatctgtgaaattctacagtcccaagagagtgcacttccctatcccgcaagctgacatggataagaagcgattcagctttgtcttcaagcctgtcttcaacacctcactgctctttctacagtgtgagctgacgctgtgtacgaagatggagaagcacccccagaagttgcctaagtgtgtgcctcctgacgaagcctgcacctcgctggacgcctcgataatctgggccatgatgcagaataagaagacgttcaccaagccccttgctgtgatccaccatgaagcagaatctaaagaaaaaggtccaagcatgaaggaaccaaatccaatttctccaccaattttccatggtctggacaccctaaccgtgatgggcattgcgtttgcagcctttgtgatcggagcactcctgacgggggccttgtggtacatctattctcacacaggggagacagcaggaaggcagcaagtccccacctccccgccagcctcggaaaacagcagtgctgcccacagcatcggcagcacgcagagcacgccttgctccagcagcagcacggcctagcccaacccagcccaacccggcccaacccagcccagcccagctcagctcagctactgccaagggcaggaccaatggctgagcctcgtgtccagactcagagggctggattttggttcccttgtaaagacagagtgaatttcagtataaagatcacccgttgtattcaccccacacccagggctagtataaacatgaccctgggcttctgtaccacactagaattcatgtgagaaagctaaaatggtggtcttctccaccagcccctcacaggcttgggggttttcaatgtgaaacacatgccagtttttaaaatgctgctttgtccaggtgagaacatccataatttggggccctgagttttacccagactcaaggagttggtaaagggttaatagccagatagtagaaccagtgaggagatgcggccaaagattctttatatctgaaccaagatgtaaaacaagaaatgctttgaggctttctaagcgatcctcctgtctaatttgcacctttgtctggatgcacacttctgaccttgctgccacaacctgtggggtctgatgtgtcccttgatgggtgctgccctcagggactgcaccctgacaagtgttaaggcaacattcctttcttgtgccctgggccaaaaccaatgctgatgaccttatcagcttcctgtttcttcccatacttgcatacaccactgcaaaatgtcttaatgcaaattttgtatttcttacaggcctacagaaattgaaaatgaccaaaatcaggaaccacagatttgtgcccattcctaatattttgttctgcaaattaatgtataatttgaggtgaaattcagttataaagtcaaggacgaatttgcacagtgatatatttctatgtgtatgcaagtacaagtatataatatgtcacctggcacattcattttctcagttgaagaagagaaaatttgaaaatgtccttatgcttttagagttgcaacttaagtatatttggtagggtgagtgtttccactcaaaatatgtcaacttaaaaaaaaataggccctttcataaaaaccaaactgtagcaagatgcaaatgcatggcaaatcctgtcggtctccagttggttatctgaatagtgtcaccaattccaccaagacagtgctgagattggaaaagggcactcatttggattgccttacttctcttgccttaaatatatcccatatatttaatatgtcaaaaagggcttgaggtgaatttcattaaatggaataatatgatgccactttgcagctaaaataagctcagtgatacctcct

SEQ ID NO: 89 - protein, 851 aa, Homo sapiens
MTSHYVIAIFALMSSCLATAGPEPGALCELSPVSASHPVQALMESFTVLSGCASRGTTGLPQEVHVLNLRTAGQGPGQLQREVTLHLNPISSVHIHHKSVVFLLNSPHPLVWHLKTERLATGVSRLFLVSEGSVVQFSSANFSLTAETEERNFPHGNEHLLNWARKEYGAVTSFTELKIARNIYIKVGEDQVFPPKCNIGKNFLSLNYLAEYLQPKAAEGCVMSSQPQNEEVHIIELITPNSNPYSAFQVDITIDIRPSQEDLEVVKNLILILKCKKSVNWVIKSFDVKGSLKIIAPNSIGFGKESERSMTMTKSIRDDIPSTQGNLVKWALDNGYSPITSYTMAPVANRFHLRLENNAEEMGDEEVHTIPPELRILLDPGALPALQNPPIRGGEGQNGGLPFPFPDISRRVWNEEGEDGLPRPKDPVIPSIQLFPGLREPEEVQGSVDIALSVKCDNEKMIVAVEKDSFQASGYSGMDVTLLDPTCKAKMNGTHFVLESPLNGCGTRPRWSALDGVVYYNSIVIQVPALGDSSGWPDGYEDLESGDNGFPGDMDEGDASLFTRPEIVVFNCSLQQVRNPSSFQEQPHGNITFNMELYNTDLFLVPSQGVFSVPENGHVYVEVSVTKAEQELGFAIQTCFISPYSNPDRMSHYTIIENICPKDESVKFYSPKRVHFPIPQADMDKKRFSFVFKPVFNTSLLFLQCELTLCTKMEKHPQKLPKCVPPDEACTSLDASIIWAMMQNKKTFTKPLAVIHHEAESKEKGPSMKEPNPISPPIFHGLDTLTVMGIAFAAFVIGALLTGALWYIYSHTGETAGRQQVPTSPPASENSSAAHSIGSTQSTPCSSSSTA

SEQ ID NO: 90 - DNA, 4287 bp, Homo sapiens
agagtaactgctgaaaggaggtggcgaaggaggatccggagcagctgctgccagcccgcgggcactgaagtcctcccggctgccgctcgagtagccacgggcgcgatcgggaccagaagtctcctcctccatgatcactttggaagccgggggaagactttgccctgccctgagagctggtctgcgtttcccaggcgcggcggcggcggagcagcagctgcagcagccgagtccaaataggagcggccacagccaggggcgtgagcgccccgcgcggagcgagctcgggttcccctcggaatgtccccggggcgcccggcgcgctgaccccgaagccgcctccgccttcggcgcctgctgcctccctcggccaggcttgttgttcgggactgtgagcttcctggctcctgggcagtggggaagcccccgggggcgagtgacctcagctggccacgacccagccctcccccgtgcgtatctcgcttaagatggcagcggagtcaggggaactaatcggggcttgtgagttcatgaaagatcggttatattttgctactttaaggaatagaccaaaaagcacagtaaatacccactatttctccatcgatgaggagctggtctatgaaaatttctatgcagattttggaccgctgaacttggcaatggtgtacagatattgctgcaaactaaacaagaaactaaaatcatacagtttgtcaagaaagaaaatagtgcactacacctgttttgaccaacggaaaagagcaaatgcagcatttttgataggtgcctatgcagtaatctatttaaagaagacaccagaagaagcctacagagcactcctgtctggctcaaaccccccctatcttccattcagggatgcttcctttggaaattgcacttacaatctcaccattctcgactgtttgcagggaatcagaaagggattacaacatggattttttgactttgagacatttgatgtggatgaatatgaacattatgagcgagttgaaaatggtgacttcaactggattgttccaggaaaatttttagcatttagtggaccacatcctaaaagcaaaattgagaatggttatcctcttcacgcccctgaagcctactttccttatttcaaaaagcataatgtgactgcagttgtgaggctaaacaaaaagatttatgaggcaaagcgcttcacagacgctggcttcgagcactatgacctcttcttcatagatggcagcacacccagtgacaacatcgtgcgaaggttcctgaacatctgtgagaacaccgaaggggccatcgccgttcactgcaaagctggtcttggaagaacagggacattgatagcctgttatgtaatgaaacactacaggtttacacatgctgaaataattgcttggattagaatatgccggccaggctctattataggaccccagcagcacttcctggaagaaaaacaagcatcgttgtgggtccaaggagacattttccgatccaaactgaaaaatcgaccatccagtgaaggaagtattaataaaattctttctggcctagatgatatgtctattggtggaaatctttcaaaaacacaaaacatggaacgatttggagaggataacttagaagatgatgatgtggaaatgaaaaatggtataacccagggagacaaactacgtgccttaaaaagtcagagacagccacgtacctcaccatcctgtgcatttaggtcagatgatacaaaaggacatccaagagcagtgtcccagcctttcagattaagttcatccctgcaaggatctgcagttactttgaagacatcaaaaatggcactgtccccttcagcaacggccaagaggatcaacagaacttctttgtcttcgggtgccactgtaagaagcttttccataaactcccggctagccagttctctagggaacttgaatgctgcaacagatgatccagagaacaaaaagacctcctcatcctctaaggcaggcttcacagccagcccgtttaccaacctcttgaatggcagctcccagccaactaccagaaattaccctgagctcaacaataatcagtacaacagaagcagcaacagcaacgggggcaacctgaacagccccccaggcccccacagcgccaagacagaggagcacaccaccatcctccgaccctcctacaccgggctttcttcttcttcagcgagattcctgagccgttctatcccttcccttcagtctgaatatgttcattactaaggccttgccactccagtgaaagctgttcttctcttagacacaatttcttcatctggacgagcagtggagagggaaagcaacttcttgctggaagaatatctctgccttcttaccttaaattaaaaagagcactaagataacaccttcaagagacttgaaaacagaaaactggttaatgactactataaatgcactgaaactatgtttatggagatttccatacttttaaagacagttttaatgttgaatttggtattttgaagggttatttttaatgtattttggtaatacatttattattatatttacatgtacagtgttacattatatatgtattgtgaactttaaaagactattttgataaatttataaatatataaaattatgtaaaaactacactatattttgatttagattttcctgctgtttgctaccaaaaatttgtattttaaatctgtttagttttagtatggttttgtctctaatgaataaataattccttcttattaagaagaagtaagggagaaagtttttagaaagtgatttttatgctcgcactataaatatggcaggtcagttcattcttttgggaagtcagtttagttacactgagtttatccaagtttatctctaccaagagtataatggcatgggatggcttatttaggacaattccctttcctattgtttttgttgctgagccaatttgagttagttttgcatcctggggggctttaaaatacagcatgcagtgaaagatcagaattcactgaatatttcttctgagagcatggtttcatggtttttctctatgaaatgactcaatattccaaatgtttttttttccttcctcctttcaaaagagttcttaacccaattaggatatcctgctttgggtatgaggttgttgttgcctgtaatcacacatggtttgacatcagttttaaatcaatggagagaaaaaactgaaaaagatgctgctaagtagttctctgtattaaaggagatatttttaaaacagggtacaaccccctgctgcacacgctagcatatctggaacctactatgaaaatgaaaggacccttataggtactcacagccctttcatgtaagtatgatctgatatttaggtcttcagaagcctgtaggtttcatttctatgaggaatcgaggagcgttacatcctgatatccttccaggctgcttaagaatggactgcttcgacactgaaagtgctagttaaatggattcatatgaagtgctttactcccaaccattgagttatttataatgtatttattaggggagggtaccttgagtctattatatatgcttcatcaaaacatcttgttcatgttttatgtttttaaaaaaggcatttgaatgaatgtttgactcaggtttgttaaattaaccttcagtaactgcagtaccaaaaattacactcaactgatgaaaaaaacgaattgtatgatttaggaatcaaaaactaaaataagtggaattatgtatcttttctaaagttaaaaaagtaaaatattttattatgagttattataaaaattggttaattgtataggaagatgacagtatttttttcaagttatcataaaaagtaattcagatgacatttgagaagtaggggaaagggaatcatgttgacagttttagttctgtgaacactaatttgtgtgaagctattaaaatgattgtaaagttgactactgtaaatttcccataattatgtgtgtatatgtgtcatatgtatgtacatgtatatgtctaaaaattactttacacatgtgcctacatagacacaccaagaagtggatgtatataatatagaaagtatatagcaaagtaattttactctgataataaaaattgtttgacatgtattttgttatgaatagtttatcttccaaaagatattttgctctattttaaagtgtagaagaatacactgctaataaataataaaagttttattcaatttaaaaaaaaaaaaaaaaaa

SEQ ID NO: 91 - protein, 594 aa, Homo sapiens
MAAESGELIGACEFMKDRLYFATLRNRPKSTVNTHYFSIDEELVYENFYADFGPLNLAMVYRYCCKLNKKLKSYSLSRKKIVHYTCFDQRKRANAAFLIGAYAVIYLKKTPEEAYRALLSGSNPPYLPFRDASFGNCTYNLTILDCLQGIRKGLQHGFFDFETFDVDEYEHYERVENGDFNWIVPGKFLAFSGPHPKSKIENGYPLHAPEAYFPYFKKHNVTAVVRLNKKIYEAKRFTDAGFEHYDLFFIDGSTPSDNIVRRFLNICENTEGAIAVHCKAGLGRTGTLIACYVMKHYRFTHAEIIAWIRICRPGSIIGPQQHFLEEKQASLWVQGDIFRSKLKNRPSSEGSINKILSGLDDMSIGGNLSKTQNMERFGEDNLEDDDVEMKNGITQGDKLRALKSQRQPRTSPSCAFRSDDTKGHPRAVSQPFRLSSSLQGSAVTLKTSKMALSPSATAKRINRTSLSSGATVRSFSINSRLASSLGNLNAATDDPENKKTSSSSKAGFTASPFTNLLNGSSQPTTRNYPELNNNQYNRSSNSNGGNLNSPPGPHSAKTEEHTTILRPSYTGLSSSSARFLSRSIPSLQSEYVHY

SEQ ID NO: 92 - DNA, 2453 bp, Homo sapiens
agagtaactgctgaaaggaggtggcgaaggaggatccggagcagctgctgccagcccgcgggcactgaagtcctcccggctgccgctcgagtagccacgggcgcgatcgggaccagaagtctcctcctccatgatcactttggaagccgggggaagactttgccctgccctgagagctggtctgcgtttcccaggcgcggcggcggcggagcagcagctgcagcagccgagtccaaataggagcggccacagccaggggcgtgagcgccccgcgcggagcgagctcgggttcccctcggaatgtccccggggcgcccggcgcgctgaccccgaagccgcctccgccttcggcgcctgctgcctccctcggccaggcttgttgttcgggactgtgagcttcctggctcctgggcagtggggaagcccccgggggcgagtgacctcagctggccacgacccagccctcccccgtgcgtatctcgcttaagatggcagcggagtcaggggaactaatcggggcttgtgagttcatgaaagatcggttatattttgctactttaaggaatagaccaaaaagcacagtaaatacccactatttctccatcgatgaggagctggtctatgaaaatttctatgcagattttggaccgctgaacttggcaatggtgtacagatattgctgcaaactaaacaagaaactaaaatcatacagtttgtcaagaaagaaaatagtgcactacacctgttttgaccaacggaaaagagcaaatgcagcatttttgataggtgcctatgcagtaatctatttaaagaagacaccagaagaagcctacagagcactcctgtctggctcaaaccccccctatcttccattcagggatgcttcctttggaaattgcacttacaatctcaccattctcgactgtttgcagggaatcagaaagggattacaacatggattttttgactttgagacatttgatgtggatgaatatgaacattatgagcgagttgaaaatggtgacttcaactggattgttccaggaaaatttttagcatttagtggaccacatcctaaaagcaaaattgagaatggttatcctcttcacgcccctgaagcctactttccttatttcaaaaagcataatgtgactgcagttgtgaggctaaacaaaaagatttatgaggcaaagcgcttcacagacgctggcttcgagcactatgacctcttcttcatagatggcagcacacccagtgacaacatcgtgcgaaggttcctgaacatctgtgagaacaccgaaggggccatcgccgttcactgcaaagctggtcttggaagaacagggacattgatagcctgttatgtaatgaaacactacaggtttacacatgctgaaataattgcttggattagaatatgccggccaggctctattataggaccccagcagcacttcctggaagaaaaacaagcatcgttgtgggtccaaggagacattttccgatccaaactgaaaaatcgaccatccagtgaaggaagtattaataaaattctttctggcctagatgatatgtctattggtggaaatctttcaaaaacacaaaacatggaacgatttggagaggataacttagaagatgatgatgtggaaatgaaaaatggtataacccagggagacaaactacgtgccttaaaaagtcagagacagccacgtacctcaccatcctgtgcatttaggtcagatgatacaaaaggacatccaagagcagtgtcccagcctttcagattaagttcatccctgcaaggatctgcagttactttgaagacatcaaaaatggcactgtccccttcagcaacggccaagaggatcaacagaacttctttgtcttcgggtgccactgtaagaagcttttccataaactcccggctagccagttctctagggaacttgaatgctgcaacagatgatccagagaacaaaaagacctcctcatcctctaaggcaggcttcacagccagcccgtttaccaacctcttgaatggcagctcccagccaactaccagaaattaccctgagctcaacaataatcagtacaacagaagcagcaacagcaacgggggcaacctgaacagccccccaggcccccacagcgccaagacagaggagcacaccaccatcctccgaccctcctacaccgggctttcttcttcttcagcgagattcctgagccgttctatccctgtaagtgcgcagacaccacctcctggtcctcagaaccctgaatgcaacttctgtgccttgccttcccagccgaggctgccaccaaagaaatttaatagtgccaaggaagccttctgagcgatgccttccctctgtgctgtgaaactgtctatgcactacattctgctagctcctcttcaagtaaacgccaagtcacaactgggaaaaaaa

SEQ ID NO: 93 - protein, 623 aa, Homo sapiens
MAAESGELIGACEFMKDRLYFATLRNRPKSTVNTHYFSIDEELVYENFYADFGPLNLAMVYRYCCKLNKKLKSYSLSRKKIVHYTCFDQRKRANAAFLIGAYAVIYLKKTPEEAYRALLSGSNPPYLPFRDASFGNCTYNLTILDCLQGIRKGLQHGFFDFETFDVDEYEHYERVENGDFNWIVPGKFLAFSGPHPKSKIENGYPLHAPEAYFPYFKKHNVTAVVRLNKKIYEAKRFTDAGFEHYDLFFIDGSTPSDNIVRRFLNICENTEGAIAVHCKAGLGRTGTLIACYVMKHYRFTHAEIIAWIRICRPGSIIGPQQHFLEEKQASLWVQGDIFRSKLKNRPSSEGSINKILSGLDDMSIGGNLSKTQNMERFGEDNLEDDDVEMKNGITQGDKLRALKSQRQPRTSPSCAFRSDDTKGHPRAVSQPFRLSSSLQGSAVTLKTSKMALSPSATAKRINRTSLSSGATVRSFSINSRLASSLGNLNAATDDPENKKTSSSSKAGFTASPFTNLLNGSSQPTTRNYPELNNNQYNRSSNSNGGNLNSPPGPHSAKTEEHTTILRPSYTGLSSSSARFLSRSIPVSAQTPPPGPQNPECNFCALPSQPRLPPKKFNSAKEAF

SEQ ID NO: 94 - DNA, 2544 bp, Homo sapiens
agagtaactgctgaaaggaggtggcgaaggaggatccggagcagctgctgccagcccgcgggcactgaagtcctcccggctgccgctcgagtagccacgggcgcgatcgggaccagaagtctcctcctccatgatcactttggaagccgggggaagactttgccctgccctgagagctggtctgcgtttcccaggcgcggcggcggcggagcagcagctgcagcagccgagtccaaataggagcggccacagccaggggcgtgagcgccccgcgcggagcgagctcgggttcccctcggaatgtccccggggcgcccggcgcgctgaccccgaagccgcctccgccttcggcgcctgctgcctccctcggccaggcttgttgttcgggactgtgagcttcctggctcctgggcagtggggaagcccccgggggcgagtgacctcagctggccacgacccagccctcccccgtgcgtatctcgcttaagatggcagcggagtcaggggaactaatcggggcttgtgagttcatgaaagatcggttatattttgctactttaaggaatagaccaaaaagcacagtaaatacccactatttctccatcgatgaggagctggtctatgaaaatttctatgcagattttggaccgctgaacttggcaatggtgtacagatattgctgcaaactaaacaagaaactaaaatcatacagtttgtcaagaaagaaaatagtgcactacacctgttttgaccaacggaaaagagcaaatgcagcatttttgataggtgcctatgcagtaatctatttaaagaagacaccagaagaagcctacagagcactcctgtctggctcaaaccccccctatcttccattcagggatgcttcctttggaaattgcacttacaatctcaccattctcgactgtttgcagggaatcagaaagggattacaacatggattttttgactttgagacatttgatgtggatgaatatgaacattatgagcgagttgaaaatggtgacttcaactggattgttccaggaaaatttttagcatttagtggaccacatcctaaaagcaaaattgagaatggttatcctcttcacgcccctgaagcctactttccttatttcaaaaagcataatgtgactgcagttgtgaggctaaacaaaaagatttatgaggcaaagcgcttcacagacgctggcttcgagcactatgacctcttcttcatagatggcagcacacccagtgacaacatcgtgcgaaggttcctgaacatctgtgagaacaccgaaggggccatcgccgttcactgcaaagctggtcttggaagaacagggacattgatagcctgttatgtaatgaaacactacaggtttacacatgctgaaataattgcttggattagaatatgccggccaggctctattataggaccccagcagcacttcctggaagaaaaacaagcatcgttgtgggtccaaggagacattttccgatccaaactgaaaaatcgaccatccagtgaaggaagtattaataaaattctttctggcctagatgatatgtctattggtggaaatctttcaaaaacacaaaacatggaacgatttggagaggtaagttttccctaggagattctatcttcttaaaactgatgttctgcatttgtttctcagttggacctatataacatagcagtgtcttttctctggatgccacgagtaccaagtttttagaagtagagccatccgtctatatagcaagaagcagaggaaagaaaccaattgcccttaaaaaaaaaaaagctataatttaaggagtaaattataaaggaggctactctggtaaggggtaatatttatagaaaggaaacagaaaagcaaactttctatttgaaaattaaaataaatatcaagaagaaaaattttaatgtgacaattgaggaaataatacataccacaagtggtgctttgaaagcctcaaattcatgctgatttctaaagtaagtgccaacttgaaaacatgattagggcacttttttaaaaaaaaattaaggctctactgtaaacaaaccacggtaaatagttgatatatattgtctgattaatattcataactacctggtgagttaggtaatactatctctattttataggaaggaaattgcatatcagagatgttctaacctcagtgtcaaacatggttcaatccatgtctgtctgagtccaagcttgtgtttttttatatcacaccctgttacctctgaataaaaatagaagtgatttactaagaattaggattatgagcatttttggaactagaaacaacgttgaaacaccatttgtttggttccactattgtagagacaagaaactggggtcccagaaaatttgtgatttgtgtaaagttccagggttgtttagtagtggggccactttgacaactgggcattcaattcctagtttaggtctttctaccacgttatacctgaggtgaagctaagtatctggtttatacttttatatctctaaagga

SEQ ID NO: 95 - protein, 383 aa, Homo sapiens
MAAESGELIGACEFMKDRLYFATLRNRPKSTVNTHYFSIDEELVYENFYADFGPLNLAMVYRYCCKLNKKLKSYSLSRKKIVHYTCFDQRKRANAAFLIGAYAVIYLKKTPEEAYRALLSGSNPPYLPFRDASFGNCTYNLTILDCLQGIRKGLQHGFFDFETFDVDEYEHYERVENGDFNWIVPGKFLAFSGPHPKSKIENGYPLHAPEAYFPYFKKHNVTAVVRLNKKIYEAKRFTDAGFEHYDLFFIDGSTPSDNIVRRFLNICENTEGAIAVHCKAGLGRTGTLIACYVMKHYRFTHAEIIAWIRICRPGSIIGPQQHFLEEKQASLWVQGDIFRSKLKNRPSSEGSINKILSGLDDMSIGGNLSKTQNMERFGEVSFP

SEQ ID NO: 96 - DNA, 3465 bp, Homo sapiens
gcacagggtgctctcctcttgagctcagcttctgcttttgcagccaagcattcttgctgctgctgcctgcctgcccacccgcctgggcttgcagcccgccactttactttctccagccctgataccagctgagaagtctccctgcagctgctagttcctgcccaggaccatgtgtgtggatgctgcttgggagaagcgggcacttgctcctggcactgatcccagctgagtttctcctgttgatttctggaccactgatgctgttgctgaggaggtatttcccggcatccctccccctgagacaccggctaaggaccagcctaaacgcaaggcaggacagtgtcaggatggaccgcgctgccagaagccgacgctagcgagggaggtgtgaagagttggccagaatgaccaactcctcctccacatccacctcctccaccaccggtggctcgctgctgctgctctgcgaggaagaggagtcgtgggcgggccggcgcatcccggtgtcactcctgtattcgggcctggccatcgggggcacgctggccaacggcatggtcatctatctcgtgtcgtccttccgaaagctgcagaccaccagcaacgccttcatcgtgaacggctgcgccgccgacctcagcgtctgcgccctctggatgccgcaggaggcggtgctcgggctcctgcccaccggctctgcggagccccccgcagactgggacggcgctgggggcagctaccgcctgctacggggtgggctgctgggcctcggactcacggtgtccctcctctcccactgcctcgtggccctgaaccgctacctgctcatcacccgggcgcccgccacctaccaggcgctgtaccagaggcgccacacggcgggcatgctggcgctgtcctgggcgctcgccctgggcctcgtgctgctgctcccgccctgggcaccgcggcccggcgccgcgccaccgcgagtccactacccggcgctgctggccgccgcggcgctgctggcgcagacagctctgctgctgcactgctacctgggcatcgtgcgccgcgtgcgtgtcagcgtcaagcgggtcagcgtgctcaacttccacctgctgcaccagttgcccggctgcgccgccgccgccgccgccttcccgggcgcccagcacgcgccgggccccggtggcgccgcgcacccggcgcaggcccagcccctgccgcccgcgctgcacccgcggcgggcacagcggcgtctcagcggcctgtcggtgctgctgctctgctgcgtcttcctgctggccacgcagccactggtgtgggtgagcctggccagcggcttctcgctgccggtgccctggggagtgcaggcggccagctggctcctgtgctgcgccctgtccgcgctcaatccgctgctctacacgtggaggaacgaggagttccgccgctccgtgcgctcagtcctgccgggcgtcggcgacgcggcggccgctgccgttgccgccacagccgtgcccgcagtgtcccaggcgcaactgggcacccgcgccgcgggccagcactggtaacctagccggggcccgagggaagcggagatccccggcttccgacgtccttgggcaccgtcgcctccttccctcctagggcatcccctgcctgaacgaagacttccgccgcgaagcccgatagatcgggggaaaatggggccttcgaccccagcgggctacctgaaccaaggcgtctctttaagtggggcgcccgaagtcattttggacggccacctgatttttaccctttgtttctgtgttttagaggaatcctaaagtcaaaacaccagagacttgaagaacttgcaaactggcgttttaaaataaccggttaatttatttccacacagtttgtttttgaaaaagagctttcataatgtataaccctttccactttcatcgtcttatatatgaagcgccttgagtgtgcatgaaccaaaggaaataacattgaagaaggaaaacaatatgtagaaagtattttagaaagtaacctgtctttgatgatgcttctcttaccatttagtttttgtatattaccctggggcagtgaagccctaggtgtgcccaccagtatgagttgccattaagacctcaagccctttattcttaaaagggtttttaataaagtctttctcaaatgaggtagaatcttagccagtgagaaaaaaaattattttatgctccttttttttcgcactcttaagactgaaaattggcgttgagtgttatagtgaaaattttccagtttgataattgatggtcagagccagcactggaattttgaaaacaaataaggtgattatctattttaggtaccgtttcacattttctatagcatgcacacttgttgctaccctcattttgtaaccaatttatttgccttatgaatgtgattgcagctttgaacattctgtactataatggttgctaagaagaataagtccttctgttttctctttaacatttaaaatatctcaatgcacatgatataattaaacactaataataccatgactgcatagctaatattagctgctattgcatgctcctagatgctagaacttattgggcatgtggtatactgaagcaatacccgttagacaaggatattttacttcttccagacaccagaagaaatggccttcaattatttgaaaagagacacagagacacctctggctacctagagttcttcctgtcttgacccaatttatgagaaagctcccagttgggactttatctcacaagtggaatcacagtcaagacggatcaataatatggtttggctcagcaaagccagctgtgctcttttagggtttaaacaagccacacgttagaaagcaacactgtttttatgtagttcatatatattaccatgacatttaacatcaatatcgtatatgttgaaggaggtataataaactcagtcatatatagtgaacagttcaaatgggaaagtgttctaaaacatattatttgagatttgtcatattcatctttggtttactaaatttacttagaaatatttgaaatgcaaaattgtgtgaaatcaccttatcaaattaaaatgggaagaaagtaattttaataatttttaataatcatatgtcagcattctgactacttaccacatcaaatctgggcccaaacagcctcagttaactgcataattcaggaacaaaaccagcttgctttgttgcacgcctgggcaatttcagccaggacattaggaccacttgttgtacatctgaataattatggaagttgggacatgttaaggaaaacaaatatgttcatcaccaacaatcagctgtcattttattaatctatcccttttgtgcatgcaccatttctctcttactaacagtttcatctgttcacattttccttgattcaaatattaaagttcagacaactattctga

SEQ ID NO: 97 - protein, 384 aa, Homo sapiens
MTNSSSTSTSSTTGGSLLLLCEEEESWAGRRIPVSLLYSGLAIGGTLANGMVIYLVSSFRKLQTTSNAFIVNGCAADLSVCALWMPQEAVLGLLPTGSAEPPADWDGAGGSYRLLRGGLLGLGLTVSLLSHCLVALNRYLLITRAPATYQALYQRRHTAGMLALSWALALGLVLLLPPWAPRPGAAPPRVHYPALLAAAALLAQTALLLHCYLGIVRRVRVSVKRVSVLNFHLLHQLPGCAAAAAAFPGAQHAPGPGGAAHPAQAQPLPPALHPRRAQRRLSGLSVLLLCCVFLLATQPLVWVSLASGFSLPVPWGVQAASWLLCCALSALNPLLYTWRNEEFRRSVRSVLPGVGDAAAAAVAATAVPAVSQAQLGTRAAGQHW

SEQ ID NO: 98 - DNA, 1621 bp, Homo sapiens
agctgattcccgggactaggttgcgggagaaagcctgttgcgtggaagataaggcggcgcgggaagtggacacagggtgggctggagatctaactggactctcgctcctgctggctggacatggaggatttggaggaagatgtaaggtttattgtggatgagaccttggactttggggggctgtcaccatctgacagccgtgaggaggaagacataacagtgttggtgactccagagaaaccacttcgacggggcctctcccaccgaagtgacccaaatgcagtggcacctgccccccagggtgtgaggctcagcctaggccccctcagtccagagaagctggaggagatcctcgatgaggccaaccggctggccgctcagctggagcagtgtgccctgcaggatcgggagagcgcaggcgagggcctggggcctcgccgagtgaagcccagtcctcggcgggagacctttgtgctgaaggatagtcctgtccgagacctgctgcccactgtgaactctttgacgcggagcaccccctccccaagcagcctgacgcctcgactccggagtaatgataggaaggggtcagtcagggctctccgggctacatctggaaagaggccctccaacatgaagagggagtcacccacttgcaatctgttccctgcatccaaaagcccagcatcttctcctcttacccgatcgactcccccagtccgggggagagccgggcccagtgggagagcagcagccagtgaggagaccagagcagccaagttgcgggcctgccagccgaatgccactcaccagccggagtgtgccacctggcagaggtgccctacctccggattctctgtcaactcgaaaagggcttccaagaccaagcactgcaggacacagagtgcgggaaagtggacacaaggttcctgtttcccagcgactaaatcttcctgtcatgggtgccactcgcagcaatctgcagccccccaggaaagtggcagtcccaggacctaccaggtaaagagatcaggacagcaagcaagacttcagtagcaaaccactacagtcagtacctggactcgcctctacccagcagaccctgactccagcagattctggcccagggacaggaggaagagatgccaccagggctggtctcccaggagtagagaccatgggaaatggggtggattaggattgagctggagaagacttaaactctctgggttgaaagaagattaggggaaaagaggtcaccttccagcagtgaaatgaacaaatagaagatgagaagtacaggcaagtggtttgtctttatccacccccactgttgtggtcagccccagagaattttatcttcttccttggcattggttcactggacatttccacgtgagcggcctccgtagctaacctccctgccctctgaggagccatcttcctgaatcgcattctctactggactctggcctgcttggagaggtggcagcaggcacctggtcttcagaaattgtttcctgtgaattctgtgactcctaataggccagtttgtgataagcttactctatgagtcttcatttttctaaaataaagtgaatgtatttttatattctctgtaaaa

SEQ ID NO: 99 - protein, 310 aa, Homo sapiens
MEDLEEDVRFIVDETLDFGGLSPSDSREEEDITVLVTPEKPLRRGLSHRSDPNAVAPAPQGVRLSLGPLSPEKLEEILDEANRLAAQLEQCALQDRESAGEGLGPRRVKPSPRRETFVLKDSPVRDLLPTVNSLTRSTPSPSSLTPRLRSNDRKGSVRALRATSGKRPSNMKRESPTCNLFPASKSPASSPLTRSTPPVRGRAGPSGRAAASEETRAAKLRACQPNATHQPECATWQRCPTSGFSVNSKRASKTKHCRTQSAGKWTQGSCFPATKSSCHGCHSQQSAAPQESGSPRTYQVKRSGQQARLQ

SEQ ID NO: 100 - DNA, 1828 bp, Homo sapiens
agctgattcccgggactaggttgcgggagaaagcctgttgcgtggaagataaggcggcgcgggaagtggacacagggtgggctggaggtatctaactggactctcgctcctgctggctggacatggaggatttggaggaagatgtaaggtttattgtggatgagaccttggactttggggggctgtcaccatctgacagccgtgaggaggaagacataacagtgttggtgactccagagaaaccacttcgacggggcctctcccaccgaagtgacccaaatgcagtggcacctgccccccagggtgtgaggctcagcctaggccccctcagtccagagaagctggaggagatcctcgatgaggccaaccggctggccgctcagctggagcagtgtgccctgcaggatcgggagagcgcaggcgagggcctggggcctcgccgagtgaagcccagtcctcggcgggagacctttgtgctgaaggatagtcctgtccgagacctgctgcccactgtgaactctttgacgcggagcaccccctccccaagcagcctgacgcctcgactccggagtaatgataggaaggggtcagtcagggctctccgggctacatctggaaagaggccctccaacatgaagagggagtcacccacttgcaatctgttccctgcatccaaaagcccagcatcttctcctcttacccgatcgactcccccagtccgggggagagccgggcccagtgggagagcagcagccagtgaggagaccagagcagccaagttgcgggtgagtgggagtggggagtttgtgggattgaccctgaaatttctccacccctctccaccaggcccacccacccccatcagatccgtcctggccccacagccttctaccagcaactctcaacgcctgccccggccgcagggagcagctgctaaatcttccagtcaactgcccattccctcggccatccccaggcctgccagccgaatgccactcaccagccggagtgtgccacctggcagaggtgccctacctccggattctctgtcaactcgaaaagggcttccaagaccaagcactgcaggacacagagtgcgggaaagtggacacaaggttcctgtttcccagcgactaaatcttcctgtcatgggtgccactcgcagcaatctgcagccccccaggaaagtggcagtcccaggacctaccaggtaaagagatcaggacagcaagcaagacttcagtagcaaaccactacagtcagtacctggactcgcctctacccagcagaccctgactccagcagattctggcccagggacaggaggaagagatgccaccagggctggtctcccaggagtagagaccatgggaaatggggtggattaggattgagctggagaagacttaaactctctgggttgaaagaagattaggggaaaagaggtcaccttccagcagtgaaatgaacaaatagaagatgagaagtacaggcaagtggtttgtctttatccacccccactgttgtggtcagccccagagaattttatcttcttccttggcattggttcactggacatttccacgtgagcggcctccgtagctaacctccctgccctctgaggagccatcttcctgaatcgcattctctactggactctggcctgcttggagaggtggcagcaggcacctggtcttcagaaattgtttcctgtgaattctgtgactcctaataggccagtttgtgataagcttactctatgagtcttcatttttctaaaataaagtgaatgtatttttatattctctgtaaaaaaaaaaaaaaaaaa

SEQ ID NO: 101 - protein, 363 aa, Homo sapiens
MEDLEEDVRFIVDETLDFGGLSPSDSREEEDITVLVTPEKPLRRGLSHRSDPNAVAPAPQGVRLSLGPLSPEKLEEILDEANRLAAQLEQCALQDRESAGEGLGPRRVKPSPRRETFVLKDSPVRDLLPTVNSLTRSTPSPSSLTPRLRSNDRKGSVRALRATSGKRPSNMKRESPTCNLFPASKSPASSPLTRSTPPVRGRAGPSGRAAASEETRAAKLRVSGSGEFVGLTLKFLHPSPPGPPTPIRSVLAPQPSTSNSQRLPRPQGAAAKSSSQLPIPSAIPRPASRMPLTSRSVPPGRGALPPDSLSTRKGLPRPSTAGHRVRESGHKVPVSQRLNLPVMGATRSNLQPPRKVAVPGPTR

SEQ ID NO: 102 - DNA, 1738 bp, Homo sapiens
agctgattcccgggactaggttgcgggagaaagcctgttgcgtggaagataaggcggcgcgggaagtggacacagggtgggctggaggtatctaactggactctcgctcctgctggctggacatggaggatttggaggaagatgtaaggtttattgtggatgagaccttggactttggggggctgtcaccatctgacagccgtgaggaggaagacataacagtgttggtgactccagagaaaccacttcgacggggcctctcccaccgaagtgacccaaatgcagtggcacctgccccccagggtgtgaggctcagcctaggccccctcagtccagagaagctggaggagatcctcgatgaggccaaccggctggccgctcagctggagcagtgtgccctgcaggatcgggagagcgcaggcgagggcctggggcctcgccgagtgaagcccagtcctcggcgggagacctttgtgctgaaggatagtcctgtccgagacctgctgcccactgtgaactctttgacgcggagcaccccctccccaagcagcctgacgcctcgactccggagtaatgataggaaggggtcagtcagggctctccgggctacatctggaaagaggccctccaacatgaagagggagtcacccacttgcaatctgttccctgcatccaaaagcccagcatcttctcctcttacccgatcgactcccccagtccgggggagagccgggcccagtgggagagcagcagccagcccacccacccccatcagatccgtcctggccccacagccttctaccagcaactctcaacgcctgccccggccgcagggagcagctgctaaatcttccagtcaactgcccattccctcggccatccccaggcctgccagccgaatgccactcaccagccggagtgtgccacctggcagaggtgccctacctccggattctctgtcaactcgaaaagggcttccaagaccaagcactgcaggacacagagtgcgggaaagtggacacaaggttcctgtttcccagcgactaaatcttcctgtcatgggtgccactcgcagcaatctgcagccccccaggaaagtggcagtcccaggacctaccaggtaaagagatcaggacagcaagcaagacttcagtagcaaaccactacagtcagtacctggactcgcctctacccagcagaccctgactccagcagattctggcccagggacaggaggaagagatgccaccagggctggtctcccaggagtagagaccatgggaaatggggtggattaggattgagctggagaagacttaaactctctgggttgaaagaagattaggggaaaagaggtcaccttccagcagtgaaatgaacaaatagaagatgagaagtacaggcaagtggtttgtctttatccacccccactgttgtggtcagccccagagaattttatcttcttccttggcattggttcactggacatttccacgtgagcggcctccgtagctaacctccctgccctctgaggagccatcttcctgaatcgcattctctactggactctggcctgcttggagaggtggcagcaggcacctggtcttcagaaattgtttcctgtgaattctgtgactcctaataggccagtttgtgataagcttactctatgagtcttcatttttctaaaataaagtgaatgtatttttatattctctgtaaaaaaaaaaaaaaaaaa

SEQ ID NO: 103 - protein, 333 aa, Homo sapiens
MEDLEEDVRFIVDETLDFGGLSPSDSREEEDITVLVTPEKPLRRGLSHRSDPNAVAPAPQGVRLSLGPLSPEKLEEILDEANRLAAQLEQCALQDRESAGEGLGPRRVKPSPRRETFVLKDSPVRDLLPTVNSLTRSTPSPSSLTPRLRSNDRKGSVRALRATSGKRPSNMKRESPTCNLFPASKSPASSPLTRSTPPVRGRAGPSGRAAASPPTPIRSVLAPQPSTSNSQRLPRPQGAAAKSSSQLPIPSAIPRPASRMPLTSRSVPPGRGALPPDSLSTRKGLPRPSTAGHRVRESGHKVPVSQRLNLPVMGATRSNLQPPRKVAVPGPTR

SEQ ID NO: 104 - DNA, 1722 bp, Homo sapiens
agctgattcccgggactaggttgcgggagaaagcctgttgcgtggaagataaggcggcgcgggaagtggacacagggtgggctggagatctaactggactctcgctcctgctggctggacatggaggatttggaggaagatgtaaggtttattgtggatgagaccttggactttggggggctgtcaccatctgacagccgtgaggaggaagacataacagtgttggtgactccagagaaaccacttcgacggggcctctcccaccgaagtgacccaaatgcagtggcacctgccccccagggtgtgaggctcagcctaggccccctcagtccagagaagctggaggagatcctcgatgaggccaaccggctggccgctcagctggagcagtgtgccctgcaggatcgggagagcgcaggcgagggcctggggcctcgccgagtgaagcccagtcctcggcgggagacctttgtgctgaaggatagtcctgtccgagacctgctgcccactgtgaactctttgacgcggagcaccccctccccaagcagcctgacgcctcgactccggagtaatgataggaaggggtcagtcagggctctccgggctacatctggaaagaggccctccaacatgaagagggagtcacccacttgcaatctgttccctgcatccaaaagcccagcatcttctcctcttacccgatcgactcccccagtccgggggagagccgggcccagtgggagagcagcagccagcccacccacccccatcagatccgtcctggccccacagccttctaccagcaactctcaacgcctgccccggccgcagggagcagctgctaaatcttccagtcaactgcccattccctcggccatccccaggcctgccagccgaatgccactcaccagccggagtgtgccacctggcagaggtgccctacctccggattctctgtcaactcgaaaagggcttccaagaccaagcactgcaggacacagagtgcgggaaagtggacacaaggttcctgtttcccagcgactaaatcttcctgtcatgggtgccactcgcagcaatctgcagccccccaggaaagtggcagtcccaggacctaccaggtaaagagatcaggacagcaagcaagacttcagtagcaaaccactacagtcagtacctggactcgcctctacccagcagaccctgactccagcagattctggcccagggacaggaggaagagatgccaccagggctggtctcccaggagtagagaccatgggaaatggggtggattaggattgagctggagaagacttaaactctctgggttgaaagaagattaggggaaaagaggtcaccttccagcagtgaaatgaacaaatagaagatgagaagtacaggcaagtggtttgtctttatccacccccactgttgtggtcagccccagagaattttatcttcttccttggcattggttcactggacatttccacgtgagcggcctccgtagctaacctccctgccctctgaggagccatcttcctgaatcgcattctctactggactctggcctgcttggagaggtggcagcaggcacctggtcttcagaaattgtttcctgtgaattctgtgactcctaataggccagtttgtgataagcttactctatgagtcttcatttttctaaaataaagtgaatgtatttttatattctctgtaaaa

SEQ ID NO: 105 - protein, 333 aa, Homo sapiens; identical to SEQ ID NO: 103

SEQ ID NO: 106 - DNA, 1372 bp, Homo sapiens
accagcagtgaaaatctagagctggagctcagcctctgggaaggcccagcatggaggcagccacagctccggaggtggccgcaggatccaagctgaaggtgaaagaagccagcccagcggatgctgaaccaccccaggcttcacctggacagggggctggcagccccactccccagctcctgccccctatagaagagcaccccaagatctggctacctcgggccctgaggcagacctacatccggaaggttggggacacagtgaacctactaatcccattccagggcaagcccaaacctcaagccatctggacacatgatggctgtgccttggacaccaggcgtgtgagtgtgcagaatggggagcaagactccatcctcttcatccgagaagcccaacgtgctgactcaggtcgctaccaactccgcgtgcagctgggtgggctggaggccaccgccaccattgacatcctggtgattgagaggccaggccctcctcagagtattaagctggtggacgtttggggcttcagcgctacactggaatggacaccgccccaagatacggggaatacagcacttctgggatacacggtgcagaaggctgacacaaaatccgggctgtggttcacggtgctggagcactatcaccgcaccagctgcatcgtctctgacctcatcatcggcaactcctatgccttccgtgtctttgctgaaaaccagtgcggactcagtgaaacagcccccatcaccacggacctcgcccacatccagaaagcagctactgtttacaagaccaaggggtttgcccaacgagacttctctgaagccccaaagtttacccagcctctggccaactgcactacagtcaccggctataatacccagctcttctgctgtgtccgcgcctctccccggcccaagatcatctggctgaagaacaagatggatatccaaggcaaccctaagtacagagccctgactcacctgggaatctgctccctagagatccgcaagccgggtccctttgatggaggcatctatacctgcaaggcggtgaaccccctaggggaggcatctgtggactgtcgggtggatgtgaaagttcctaattgaggacacctaagaaggcatcgtactctgacaaagccagtgcccagcaatgaagtgaattcatggcacaggagccagggaccatgacaacggtgccctcagcagcctggtgtcctctggccatttgctgtcatggctacaaagtgctccctcttttcagtgcctccaggaagcccgccagtggtgagactgtgtcctcaaggagcttcggcaccatgtctggtttggattcatctaaataaatatgtggttccccagtg

SEQ ID NO: 107 - protein, 354 aa, Homo sapiens
MEAATAPEVAAGSKLKVKEASPADAEPPQASPGQGAGSPTPQLLPPIEEHPKIWLPRALRQTYIRKVGDTVNLLIPFQGKPKPQAIWTHDGCALDTRRVSVQNGEQDSILFIREAQRADSGRYQLRVQLGGLEATATIDILVIERPGPPQSIKLVDVWGFSATLEWTPPQDTGNTALLGYTVQKADTKSGLWFTVLEHYHRTSCIVSDLIIGNSYAFRVFAENQCGLSETAPITTDLAHIQKAATVYKTKGFAQRDFSEAPKFTQPLANCTTVTGYNTQLFCCVRASPRPKIIWLKNKMDIQGNPKYRALTHLGICSLEIRKPGPFDGGIYTCKAVNPLGEASVDCRVDVKVPN

SEQ ID NO: 108 - DNA, 7018 bp, Homo sapiens
ggcgggcgcgccgggcggcaggtgtcggcgtcggcggcattcggcggcgatggagcggccctggggagctgcggacggcctctcgcgctggccccatggcctcggcctcctcctcctcctgcagctgctgccgccgtcgaccctcagccaggaccggctggacgcgccgccgccgcccgctgcgccgctgccgcgctggtctggccccatcggggtgagctgggggctgcgggcggccgcagccgggggcgcgtttccccgcggcggccgttggcgtcgcagcgcgccgggcgaggacgaggagtgcggccgggtccgggacttcgtcgccaagctggccaacaacacgcaccagcatgtgtttgatgatctcagaggctcagtatccttgtcctgggttggagatagcactggggtcattctagtcttgactaccttccatgtaccactggtaattatgacttttggacagtccaagctatatcgaagtgaggattatgggaagaactttaaggatattacagatctcatcaataacacctttattcggactgaatttggcatggctattggtcctgagaactctggaaaggtggtgttaacagcagaggtgtctggaggaagtcgtggaggaagaatcttcagatcatcagattttgcgaagaattttgtgcaaacagatctcccttttcatcctctcactcagatgatgtatagccctcagaattctgattatcttttagctctcagcactgaaaatggcctgtgggtgtccaagaattttgggggaaaatgggaagaaatccacaaagcagtatgtttggccaaatggggatcagacaacaccatcttctttacaacctatgcaaatggctcctgcaaagctgaccttggggctctggaattatggagaacttcagacttgggaaaaagcttcaaaactattggtgtgaaaatctactcatttggtcttgggggacgtttcctttttgcctctgtgatggctgataaggataccacaagaaggatccacgtttcaacagatcaaggggacacatggagcatggcccagctcccctccgtgggacaggaacagttctattctattctggcagcaaatgatgacatggtattcatgcatgtagatgaacctggagacactgggtttggcacaatctttacctcagatgatcgaggcattgtctattccaagtctttggaccgacatctctacactaccacaggcggagagacggactttaccaacgtgacctccctccgcggcgtctacataacaagcgtgctctccgaagataattctatccagaccatgatcacttttgaccaaggaggaaggtggacgcacctgaggaagcctgaaaacagtgaatgtgatgctacagcaaaaaacaagaatgagtgcagccttcatattcatgcttcctacagcatctcccagaaactgaatgttccaatggccccactctcagagccgaatgccgtaggcattgtcattgctcatggtagcgtgggggatgccatctcagtgatggttccagatgtgtacatctcagatgatgggggttactcctggacaaagatgctggaaggaccccactattacaccatcctggattctggaggcatcattgtggccattgagcacagcagccgtcctatcaatgtgattaagttctccacagacgaaggtcaatgctggcaaacctacacgttcaccagggaccccatctatttcactggcctagcttcagaacctggagctaggtccatgaatatcagcatttggggcttcacagaatctttcctgaccagccagtgggtctcctacaccattgattttaaagatatccttgaaaggaactgtgaagagaaggactataccatatggctggcacactccacagaccctgaagattatgaagatggctgcattttgggctacaaagaacagtttctgcggctacgcaagtcatccgtgtgtcagaatggtcgagactatgttgtgaccaagcagccctccatctgcctctgttccctggaggactttctctgtgattttggctactaccgtccagaaaatgactccaagtgtgtggaacagccagaactgaagggccacgacctggagttttgtctgtacggaagagaagaacacctaacaacaaatgggtaccggaaaattccaggggacaaatgccagggtggggtaaatccagttcgagaagtaaaagacttgaaaaagaaatgcacaagcaactttttgagtccggaaaaacagaattccaagtcaaattctgttccaattatcctggccatcgtgggattgatgctggtcacagtcgtagcaggagtgctcattgtgaagaaatatgtctgtgggggaaggttcctggtgcatcgatactctgtgctgcagcagcatgcagaggccaatggtgtggatggtgtggatgctttggacacagcctcccacactaataaaagtggttatcatgatgactcagatgaggacctcttggaatagctcttcagaggagctggacccagcatggatggtggaaccacagtacctcttacactccctgtggctccaacttcaggaaataaatttcccattgcgagggacccagctctgtttctgctgcttccatcaaagccaaaaggacctacactaaagaaatgcagggtgggggtggggaaccctgagcacttttttacaattggctctgagaaaaagggagacattttaaattctttaacttcttatttctcgtcctgtctctttgcaaagtatgggcttttttgtttttgttttttaagggaaacgaaatggaattcgaagggaccttttcactaaccccacttctgtgtgttctgcatggcgcctgccccagggcatctgccaactccagtatcagctctcacagtgtacttggtaccatccctgggctctgctggcgagacgaaacagctgtagagatgaaaacaggctgcagaggctggcacagcctggccggcttttctccatctggggacagtcctactccaagaacactgcacaccagctcctcacacagatcccacttactctttttttttttttcagagaccacagaccacagtgatttttcttttcccttgtttaattaggcaatacccttgttaattgccctttggcaactaacttaaccatgtgcttcccacacagtacatcaggaaaacttacagggcaatatttttaacttggggcaggaagaagggagcagcagagaattgactagatatagcacctattaaaagagaactcttgcttcttctgagatttttcaagctgtgctttgtgtgtgtgccagtagacttacgcaaggacagggtacaaacttagctggaagtctgcccaggctgaatgatctcttccctagagttgattgtcgggtacacagtgtgaacccccgaagacggaacctcacagtcttccatgttcccttcttaactgtcgtgtggctcgttgctaaatcatgacaatggctgcctatctgctgcttcttaggttgctgttgtacatggaaccaggactagagattttttcagatttatagacttaaaaaattagaattttattaccaggctttccttctcaccccttttttctgactttgccaagtaatttgttgacacgaaaattttggaggaaccaattgaaaacacacttccagtctagatgatgctttgtgtgatacattaagttcttattttggattaaaagaagttttccatttgatacttctctaaattaaataaattatagaatgtagttgggtggattttggggtggccatatagtaatggaaagctgcaataattagttttaatacagcttgaatatttgctatatagaaatatagtatggaaagtttttggtcttaatgtagctactgtgcgggtcacagtttctcccaatgattatgactgggacattctttggtagataccatttgctactagtttattttgtggctagaaagtcagttttgtgtgtttttttttttttttatttgaagtgccaaattaactttagtcagaatgtgagcagatggctaagttctctcctccccagaatggattaacagctgcgtggaaagtgggggagagagtggatggagacttttagagatgttaaaactgcagtagaatgaaatgagtcagggagcttcagttagaaaataaagttgaggcagtttttgtgaagataatatggttagggctggagtgcactagtctttttgcttattcattttgcatggttttaaaattaaaaataattccgaagatacaccagctcacaaatgaaaacgtcagcctctgccccaccctccctcctgcccaaagtgaatttggtactcagaaaagaactgtttataccactcacctttctcccagcatgtactcactgtgggcagatgcaccaatacatggtaatcctcttactcattttaagacgtaggaaactcaatattcttctctaaccatatacgatagggctcttcgcttttaatgatatctgggatttctgtggaacttggcaaattttcagagcaccttcactcacataatgtcatttgaacctcacaatgttcttgggatggagtcagttgttcagggtccccgtgtgtgtgataagcagtgctggctggctgtcttcagaactcttggaaatctttacacatgcgagtgctaaccactttgagcaaggctgccttcttgtagatgacttgctgttctttatgacagggatcagtggcatttgtttcctagcagtatttagcacctttttgccaccttggtgaacagaaaattgtattttcctgtctttcatggctgaaaacaaaagtaatgggaattttaaatacgtttgcagaaactgcccctcccctcattgagggtcactgctcaagagtgcaggagtggactctccactgatgggtctccctccccatcctggtttccaccccgggctggctagctctgttggtttgaagactgacagccagcctggctcattctcattattggctagttagctttctttatcaacctgctcactcacaaatgtgtgccctcagccagagagtaagaaagcccaaatctgttacagcttctaaaaaaatagatttctaatttgtcctactcatgttaggagcattatctttgaaggtaaaacatagtgtatcattgtgtaaactcccaggcttgatgtagcagaagagatcatttctggaggcttcagcaatggaatttagcattataagagagattggacaaaccagtccaaagtggtccgagttcttaaatccaggtagggaactcactcttctttcttctctggacctaattgggcattgggctttagtgagaccacagaccaggcccgtctctcctgtaggcttttaattcaatggcaactctatttcaaagaataaaagcctttggagagttgcggcagttctgggggcgggctcaggagagtccatagatcagccgtaactggaacgtagaatctacgtctgcctctgaatggacttcccacctcctctctcttgctctgatgcttgcctctgggcctctccatgcccaaggtggtctttcatccttgacaggctggtaatgtgctggccacctccagctcctgcatcgagtctgtaaaccagagctggttctcatggccttcgtcacgataccaggatacggaggggagcccagggccatccatacccaccccagggtaacggggctggcctggcattagtcattatttagtttccaggccaaccatccagatagagattccctctttcctttgagcagtgctctcaagagctccgtgcctgtccacaatgacctagagtgcatcctgctcattgtcagtgtagcccctcgcccctatattcatccaggatacttggaagtgctaaaataggaagggattcggctttcaactttgctaccatcttccctgaagcaggaaaatgaacatggacttaaatgttctttgaaaaaaccaaagttttaagatttgctgtgtgatgaagtgacagggagggccggagtcagcaggtgccagactttctgttctgtctgccatgggtttgtccagctcaggtagctctaggagcaccatcctgccctagcagagcccaggccttgccctcatgaagcatcattgaaatagcaggagcatgttgatttcttggttaggttgcattataataacaagagtcagaacattaattcgaaacaacttgcagtatgcatttcttcacaccagtacattcttaagtgtacttgtttataaggaataacataaactaatctgtacctttatatatatgtgtgtgtacatatatacatatataaactgtatagtgtacatggtaatgatttattgctatgccccagatccttaatgtagttctcatcctccgcatgccctcagccacaagcgggtgactgactgttccctgatgatttggcccacctcctgtgtttggacctctagggaggagggttttggtcatactctccttatcctcgtgcacagaaatgctcagggtccccatgtgcctgttgttcagccctctctcttgttccctttctgagcatgtggtccttccccaggctgtgggacagctgccttcccacgaaagtgtaaagcagtattaagatcattactgcatgtgccctaaaaacccaagttttctattcccttaggacagaaaattgcatgtgaggtgggataatcgagtttcagtgacccacgtcagttacacattaaagccagaccccatgataaaattccacaaaatggaaataaaactcaaatttctttagcattgtgtaaataaatctgaatgtgtttaactttgtactggtaattttctgtatatttggaatatttgggttaaaaataaaacagactggactttgttacctgacctac

SEQ ID NO: 109 - protein, 831 aa, Homo sapiens
MERPWGAADGLSRWPHGLGLLLLLQLLPPSTLSQDRLDAPPPPAAPLPRWSGPIGVSWGLRAAAAGGAFPRGGRWRRSAPGEDEECGRVRDFVAKLANNTHQHVFDDLRGSVSLSWVGDSTGVILVLTTFHVPLVIMTFGQSKLYRSEDYGKNFKDITDLINNTFIRTEFGMAIGPENSGKVVLTAEVSGGSRGGRIFRSSDFAKNFVQTDLPFHPLTQMMYSPQNSDYLLALSTENGLWVSKNFGGKWEEIHKAVCLAKWGSDNTIFFTTYANGSCKADLGALELWRTSDLGKSFKTIGVKIYSFGLGGRFLFASVMADKDTTRRIHVSTDQGDTWSMAQLPSVGQEQFYSILAANDDMVFMHVDEPGDTGFGTIFTSDDRGIVYSKSLDRHLYTTTGGETDFTNVTSLRGVYITSVLSEDNSIQTMITFDQGGRWTHLRKPENSECDATAKNKNECSLHIHASYSISQKLNVPMAPLSEPNAVGIVIAHGSVGDAISVMVPDVYISDDGGYSWTKMLEGPHYYTILDSGGIIVAIEHSSRPINVIKFSTDEGQCWQTYTFTRDPIYFTGLASEPGARSMNISIWGFTESFLTSQWVSYTIDFKDILERNCEEKDYTIWLAHSTDPEDYEDGCILGYKEQFLRLRKSSVCQNGRDYVVTKQPSICLCSLEDFLCDFGYYRPENDSKCVEQPELKGHDLEFCLYGREEHLTTNGYRKIPGDKCQGGVNPVREVKDLKKKCTSNFLSPEKQNSKSNSVPIILAIVGLMLVTVVAGVLIVKKYVCGGRFLVHRYSVLQQHAEANGVDGVDALDTASHTNKSGYHDDSDEDLLE

SEQ ID NO: 110 - DNA, 1023 bp, Homo sapiens
gttggctgccggtgagttgggtgccggtggagtcgtgttggtcctcagaatccccgcgtagccgctgcctcctcctaccctcgccatgtttcttacccggtctgagtacgacaggggcgtgaatactttttctcccgaaggaagattatttcaagtggaatatgccattgaggctatcaagcttggttctacagccattgggatccagacatcagagggtgtgtgcctagctgtggagaagagaattacttccccactgatggagcccagcagcattgagaaaattgtagagattgatgctcacataggttgtgccatgagtgggctaattgctgatgctaagactttaattgataaagccagagtggagacacagaaccactggttcacctacaatgagacaatgacagtggagagtgtgacccaagctgtgtccaatctggctttgcagtttggagaagaagatgcagatccaggtgccatgtctcgtccctttggagtagcattattatttggaggagttgatgagaaaggaccccagctgtttcatatggacccatctgggacctttgtacagtgtgatgctcgagcaattggctctgcttcagagggtgcccagagctccttgcaagaagtttaccacaagtctatgactttgaaagaagccatcaagtcttcactcatcatcctcaaacaagtaatggaggagaagctgaatgcaacaaacattgagctagccacagtgcagcctggccagaatttccacatgttcacaaaggaagaacttgaagaggttatcaaggacatttaaggaatcctgatcctcagaacttctctgggacaatttcagttctaataatgtccttaaattttatttccagctcctgttccttggaaaatctccattgtatgtgcattttttaaatgatgtctgtacataaaggcagttctgaaataaagaaaattttaaaataaaaaaaaaaaaaaaaaaaaaaaaaaaaaaaaaaaaaaaaaaaaaaaaaa

SEQ ID NO: 111 - protein, 241 aa, Homo sapiens
MFLTRSEYDRGVNTFSPEGRLFQVEYAIEAIKLGSTAIGIQTSEGVCLAVEKRITSPLMEPSSIEKIVEIDAHIGCAMSGLIADAKTLIDKARVETQNHWFTYNETMTVESVTQAVSNLALQFGEEDADPGAMSRPFGVALLFGGVDEKGPQLFHMDPSGTFVQCDARAIGSASEGAQSSLQEVYHKSMTLKEAIKSSLIILKQVMEEKLNATNIELATVQPGQNFHMFTKEELEEVIKDI

SEQ ID NO: 112 - DNA, 2318 bp, Homo sapiens
gcgtccgcggcggtgatggcggtgcgtgaacgcgcggcggcagcaatggccgctctggagcggcgggtgccgagtctcgatgacttcgcgggacagagctggagctcgtgggtggagcgggccgacctgcccgcggctgacggggctgagctggaggagagtagcaaaaacacgaagaagttggatgccatgaccctcattaaagaagacatgtccatcttcgggcactgccctgcccatgatgacttctacttggttgtgtgtaaccactgcagccaagtggtgaagcctcaagctttccagaagcactgcgaaagaagacatgggcccctcagcaagctttatggccgggccccacccccacctccagcccctgccagctctcagaaatgccatgtagtgaatgggcagggcccagcttgtagggccccaggttccacgaaaacctcctccagggagaagggccaggggtcccggagccgtggccaccagcctcctgagaagacccagaaggacaacctctgccagccagggggcctcaccaaggactcccctggaaaacctcccatggctcccccttctaaagaacctcctggcagagagaacatcgagatcatccccagtgaggggtccagtcactgggctgaaggcagccctcctgaaaaggagcccagtgggaccaggctgccccctaaaacccaccggaagatggctcggaaggagtgcgacctcaacaggcagtgtggggtaataaatccagagaccaaaaagatctgtacccgcctgttgacctgcaagatccactcagtacaccagcgccgggaagtccagggccgggccaaggactttgacgtgctggtggcagagctgaaggccaactcccgcaaaggggagtctcccaaggagaagagcccagggcgcaaggagcaagttctcgagcgcccctcccaggagctcccctcctcagtccaggttgtagcagcggtggctgctcccagcagcaccttctctgttcgtgccaagcagacctacccatactgtgcactgcccaggtcccgggcctcctccgagagtgaattggatgatgaaggcccctgtggtggtgatggggacccaggcctgttccccttccccatgccccggggtgggacccaggcctccagcgaagagagtgaggaggaggggacatctgacgacctccacccaccccctgactgccattatgcaacccggcccccacggccacaggcgttctgcacctttgggagccggctggtgagcccaggatgctatgtgtttagccgccggctggaccggttctgctcagcactcagctccatgctggaacggcacctcagcacacacatgtggaagaagatcccaccggcagctgaacctccagctcaccttgtcaactccccgttatctgctcccctgagcccatcctctacaggcacctgcccccgccttccaggtccaaccctgagacctgcctgcccagcctccatgccccccaccaaggacaaccttgtccccagctaccctgcaggctcccccagcgtggcggctgcctgtagccaggcagagtgcatgggcgggagccaggctatcacctcaccactgcctgccaacacgccatccccgtccttcagcaagctgccgccttccaaggccagcaagtcatccaaaggcaaggacggggtggaggtggaggccccttctcgaaagcggaagttatcccctggccctaccactcttaaacggacctgcatcctggagcccactggaaaagggaaaccctctggctgtaggggcctctcggccaaaactaaaacagccctgagcatggggcttaatgggacaatggggccaagagtgaagcgggcagggcccctggactgtcgtggctcccctcatcagctccccacaccagtcaaggcttctcagctggagaaccggggagcagctggacacccagccaaggccctgccaaccaactgcctctctgaggaggaggtggccaagaagcggaaaaacctggccacttattgccggccagtgaaggccaagcactgtcaggctggtgcccctgctgatgtggcctgctctgtgcgccgcaagaagccaggcccggccctggcctttgaggagaagtgctctacactgaagtcaaaagcccattaacgagaaagtgcctgcccactgcaacggagccgccagcacctcctcccctccagatccgggccccaggctgctgccgctttttataactttatattatttttttttaagaaaaaaagctctttaaaatacctcaa

SEQ ID NO: 113 - protein, 722 aa, Homo sapiens
MAVRERAAAAMAALERRVPSLDDFAGQSWSSWVERADLPAADGAELEESSKNTKKLDAMTLIKEDMSIFGHCPAHDDFYLVVCNHCSQVVKPQAFQKHCERRHGPLSKLYGRAPPPPPAPASSQKCHVVNGQGPACRAPGSTKTSSREKGQGSRSRGHQPPEKTQKDNLCQPGGLTKDSPGKPPMAPPSKEPPGRENIEIIPSEGSSHWAEGSPPEKEPSGTRLPPKTHRKMARKECDLNRQCGVINPETKKICTRLLTCKIHSVHQRREVQGRAKDFDVLVAELKANSRKGESPKEKSPGRKEQVLERPSQELPSSVQVVAAVAAPSSTFSVRAKQTYPYCALPRSRASSESELDDEGPCGGDGDPGLFPFPMPRGGTQASSEESEEEGTSDDLHPPPDCHYATRPPRPQAFCTFGSRLVSPGCYVFSRRLDRFCSALSSMLERHLSTHMWKKIPPAAEPPAHLVNSPLSAPLSPSSTGTCPRLPGPTLRPACPASMPPTKDNLVPSYPAGSPSVAAACSQAECMGGSQAITSPLPANTPSPSFSKLPPSKASKSSKGKDGVEVEAPSRKRKLSPGPTTLKRTCILEPTGKGKPSGCRGLSAKTKTALSMGLNGTMGPRVKRAGPLDCRGSPHQLPTPVKASQLENRGAAGHPAKALPTNCLSEEEVAKKRKNLATYCRPVKAKHCQAGAPADVACSVRRKKPGPALAFEEKCSTLKSKAH

SEQ ID NO: 114 - DNA, 3321 bp, Homo sapiens
gttcgggcagctggagtgtacgggcccgcgggccacggccatgcagcccctggaggtaggtctggttcccgctccagctggggagccgagactgacccgctggctgcggagaggcagtgggatcttggcgcacctggtagctttgggcttcaccatctttctgacagcgctgtcccggccaggaaccagtcttttctcctggcaccctgtattcatggccttggcgttctgcctctgcatggctgaagccatcctactcttctcacctgaacactccctgttcttcttctgctcccgaaaagcacggatccggctccactgggcagggcagaccctagccatcctctgtgcagctctgggcctgggcttcatcatctccagcaggacccgcagtgagctgcctcatctggtgtcctggcacagctgggtgggagccctgacactgctggccactgctgtccaggcactgtgtgggctctgcctcctttgtccccgggcagccagggtctcaagggtggctcgcctcaagctctaccatctgacatgtggactggtggtctacctgatggctacagtaacggtgcttctgggcatgtactcagtatggttccaggcccagatcaaaggtgcggcctggtacctgtgcctggcactgcccgtctatccagccctggtgatcatgcaccagatttccagatcctacttgccgaggaagaaaatggaaatgtgagttcctgcgaacgctgaatctaggtgggacgcttgccttgaacatcatggttcctttggtgatctataagggatctatttaagaagtggtcaggttttcgcacttcttggctggtccagggactgcagaaaccaaagctgctattgttgaggaataattcagtgggtcaaaatggggagatgtactgggtatgagtggaaggtgatggagagcctgatcctgaagcctctacttgatgagagacagagttttgggtggtggtagtgatgtgctggtggtcatttcttgcttgtgtgcctgatgaaaaactgggttcctgtaagttatgaatggcatccagggatatttgggttacttttaagaaagcagtgtgatgtagtggagagagcccatgggtcttatttatgggatatggtcctcttaggctctgttgtacaaccttaggtacattccatatcttaagaccactgtttcttcatctgtgaaatgtttctaaacaatctctaagtcccttccttctctaatatacagcgtctgtcaggtcgatgtctcagaacactctcccagctgtggaccacgtggaccacttagcagactcagggggtagttctttactctccctttactaccctggagggacagctctgcccttgaggcccttcagaaatttgtgctgatttggtccctgtgccagggcacagggggtcaggcactgtggaaagaagggactcaggtgagggtcttctggactctaagacggtaaaggcactaaagtcactttaaagcttttggagaagcaggagggcattggcttaaccaagccgaaggctgctggctgggctgcctagcccagctaagatcttccttcagcccacctcaggatccgggcttgagggctgcagggcctgcgtgcgctccctcccccgaaatcacttctcagggcaaaggagccccaggcatctcatgctttgcccttcttagggctcaggttcttgccttagcacatagcttctgggagcttttttgaagcatttcataagggccaaggaagtggggcagggcttttctgatccaaagaaaacaaagtttctctggttacccctcttcccttgttatctaagctttcctcagttgtcatctcttcccagctctttggtccaagagggggctgagtttggtgtcagctggcaaatgagggctggactctcttccctccagagaccaccccgctccttgctgcagctgaaagtagttccccaggctgccctcggtggtgaggactggatgctagactgctgagctgtggtctgggctcagttgagaagataggatctccctagatcatggcaaggcctgacaacagctgagccaggaaagtgctgctgaggcaagtcgacatagctcacagggaactctgggaagcctggggtgtaggcgctggagctccagttcccaggagcaggggcaggtgttcctagatgttagtgttgtggatgtccttggtcttctgaagattcaggtcctcctctccgggtagcttagaagtaaggaggttggtttgattcaatagtacaagaatggggacagcaagggcagaagtgtcctctccacgtaactcattatgcccctcctgggggagattgcatctccaggacaagcatctaaaggaggcccctgctgtgcagaggggtattgttcctgtctctttcattgtcctccctcctctcaaactctccagtgtggtgtgaactcagaagaaacggttactggggctgcatggagaatttcacctgcggtgattttgatccagggactgcatctcctctttcctcatcacagccagtgctgagaggctccttctacctgccgcagggtaggagggccaggcaaagttcaccagcttgctctaagagcaagcaggcaatgccgtaaagcctgagcctgcctgaggtgctgcctcctcccaggtggtgcggggggtggtgggcgggcgggcaggcgtgctgacagccggcagtttgcgtgggctgtgccatctgatgtctattcccagccctggtaggaagggggagtcatttatattctgcaggaggaaggggccccagctgtcgcctttctgaccagcaggcctggagggcaggggcacagagcagagaggagggcactggtggtctcctgcttagcctggtctgactgcagtgtagggaataggtcaccaggaggagcccttcatcctggcaggccggattgtggagggacttccctccccctcttttccatttctccctccatcaccacctgccctcacatcctggggcagcagctggacagccattagacctcagtgccagggcactcttcctccagctgggatctcagtggctcccagctgcatgggctcctgcttgtgtgttccctcctccgccatcctctgttccccgcacctcccttattctgctcatgtctggggtattcacttggctcctcagcaaggaagcaaacgccttggaggagaagcacatggttgcccttttgtccttgctccctggctagggaaagctgctagtggtcagcctgttttgccttttttt

SEQ ID NO: 115 - protein, 229 aa, Homo sapiens
MQPLEVGLVPAPAGEPRLTRWLRRGSGILAHLVALGFTIFLTALSRPGTSLFSWHPVFMALAFCLCMAEAILLFSPEHSLFFFCSRKARIRLHWAGQTLAILCAALGLGFIISSRTRSELPHLVSWHSWVGALTLLATAVQALCGLCLLCPRAARVSRVARLKLYHLTCGLVVYLMATVTVLLGMYSVWFQAQIKGAAWYLCLALPVYPALVIMHQISRSYLPRKKMEM

SEQ ID NO: 116 - DNA, 2501 bp, Homo sapiens
acgccgctccctccgctgggatcgctgcgcctccggctccccgcaccgatccgcgccaggcctgcggacctggaggcagcgaccgcggtcggtgggctccggcgggctcagcggtcgaggcggtggcagggtgagcggagcggggccccgcaagtccccgggaggcgacggtgccgggcgcgggcccctgcgtaaggtgggcgcagtgacaggccggccggtgaggcgccgccgggagaggccgcgacggagctcccagaccggccatgggctgagacacgtcctcgccgagcagtgacccttccgtaccccaccagaacatgcccgggtgacctcctcccagatcttccttgtggccttcctcgcccactccagtgacactatgcacccccaccgtgacccgagaggcctctggctcctgctgccgtccttgtccctgctgctttttgaggtggccagagctggccgagccgtggttagctgtcctgccgcctgcttgtgcgccagcaacatcctcagctgctccaagcagcagctgcccaatgtgccccattccttgcccagttacacagcactactggacctcagtcacaacaacctgagccgcctgcgggccgagtggacccccacgcgcctgacccaactgcactccctgctgctgagccacaaccacctgaacttcatctcctctgaggccttttccccggtacccaacctgcgctacctggacctctcctccaaccagctgcgtacactggatgagttcctgttcagtgacctgcaagtactggaggtgctgctgctctacaataaccacatcatggcggtggaccggtgcgccttcgatgacatggcccagctgcagaaactctacttgagccagaaccagatctctcgcttccctctggaactggtcaaggaaggagccaagctacccaaactaacgctcctggatctctcttctaacaagctgaagaacttgccattgcctgacctgcagaagctgccggcctggatcaagaatgggctgtacctacataacaaccccctgaactgcgactgtgagctctaccagctgttttcacactggcagtatcggcagctgagctccgtgatggactttcaagaggatctgtactgcatgaactccaagaagctgcacaatgtcttcaacctgagtttcctcaactgtggcgagtacaaggagcgtgcctgggaggcccacctgggtgacaccttgatcatcaagtgtgacaccaagcagcaagggatgaccaaggtgtgggtgacaccaagtaatgaacgggtgctagatgaggtgaccaatggcacagtgagtgtgtctaaggatggcagtcttcttttccagcaggtgcaggtcgaggacggtggtgtgtatacctgctatgccatgggagagactttcaatgagacactgtctgtggaattgaaagtgcacaatttcaccttgcacggacaccatgacaccctcaacacagcctataccaccctagtgggctgtatccttagtgtggtcctggtcctcatatacctatacctcaccccttgccgctgctggtgccggggtgtagagaagccttccagccatcaaggagacagcctcagctcttccatgcttagtaccacacccaaccatgatcctatggctggtggggacaaagatgatggttttgaccggcgggtggctttcctggaacctgctggacctgggcagggtcaaaacggcaagctcaagccaggcaacaccctgccagtgcctgaggccacaggcaagggccaacggaggatgtcggatccagaatcagtcagctcggtcttctctgatacgcccattgtggtgtgagcaggatgggttggtggggagattctgccccaggagaggtaatgcacccctgaaggatatgaggggatggaagagagggctggctgcccaagggaatggattcctcctgacctcaagggaattggtcccaggtacaacagagagcaagaccccaaacagggcgtggctgccacgattttcaaatgggggtatattaatcctcaggcaaatgctacacccgtacccaaagccctgccaattctcagtgtggtagaggaagagaagcatgtctgagttggatgggaatgaggaaggagtgaggggaagaacagattccctaaactttcatgaggtcatccctagctccttaagagaaaaacatttagaaaaaaaaattttttctatctctgcccacccacacctgtgatgttgtgtgtgttgggggagcttccacaggagccacactggggaaaagctgtagtatcttctttgtttagcaagtcaaacttcacagctggggaagttgaaaacctttggaaaatgagtcaggaaaaggctgagacctcaatcggtaacaattccccaaagctgttgtaagactttgcattaaagccttcctttttcctgaaaaaaaaaaaaaaaaaaaaaaaaaaaaaaa

SEQ ID NO: 117 - protein, 493 aa, Homo sapiens
MHPHRDPRGLWLLLPSLSLLLFEVARAGRAVVSCPAACLCASNILSCSKQQLPNVPHSLPSYTALLDLSHNNLSRLRAEWTPTRLTQLHSLLLSHNHLNFISSEAFSPVPNLRYLDLSSNQLRTLDEFLFSDLQVLEVLLLYNNHIMAVDRCAFDDMAQLQKLYLSQNQISRFPLELVKEGAKLPKLTLLDLSSNKLKNLPLPDLQKLPAWIKNGLYLHNNPLNCDCELYQLFSHWQYRQLSSVMDFQEDLYCMNSKKLHNVFNLSFLNCGEYKERAWEAHLGDTLIIKCDTKQQGMTKVWVTPSNERVLDEVTNGTVSVSKDGSLLFQQVQVEDGGVYTCYAMGETFNETLSVELKVHNFTLHGHHDTLNTAYTTLVGCILSVVLVLIYLYLTPCRCWCRGVEKPSSHQGDSLSSSMLSTTPNHDPMAGGDKDDGFDRRVAFLEPAGPGQGQNGKLKPGNTLPVPEATGKGQRRMSDPESVSSVFSDTPIVV

SEQ ID NO: 118 - DNA, 2973 bp, Homo sapiens
agtgcagcgcagaagacagagggtgactaggaagacgcgcgagcggggctggccggccggcgggtgggggaggggaggcgggggaaggcggctgagtgggcctctggagtgtgtgtgtctgtgtcagtgtgtgtgtgtgtgtgtgtatgtgtgtgtctggcgcctggccagggtgatttcccataaaccacatgccccccagtcctctcttaaaaggctgtgccgagggctggccagtgaggctcggcccggggaaagtgaaagtttgcctgggtcctctcggcgccagagccgctctccgcatcccaggacagcggtgcggccctcggccggggcgcccactccgcagcagccagcgagcgagcgagcgagcgagggcggccgacgcgcccggccgggacccagctgcccgtatgaccgcgccgggcgccgccgggcgctgccctcccacgacatggctgggctccctgctgttgttggtctgtctcctggcgagcaggagtatcaccgaggaggtgtcggagtactgtagccacatgattgggagtggacacctgcagtctctgcagcggctgattgacagtcagatggagacctcgtgccaaattacatttgagtttgtagaccaggaacagttgaaagatccagtgtgctaccttaagaaggcatttctcctggtacaagacataatggaggacaccatgcgcttcagagataacacccccaatgccatcgccattgtgcagctgcaggaactctctttgaggctgaagagctgcttcaccaaggattatgaagagcatgacaaggcctgcgtccgaactttctatgagacacctctccagttgctggagaaggtcaagaatgtctttaatgaaacaaagaatctccttgacaaggactggaatattttcagcaagaactgcaacaacagctttgctgaatgctccagccaagatgtggtgaccaagcctgattgcaactgcctgtaccccaaagccatccctagcagtgacccggcctctgtctcccctcatcagcccctcgccccctccatggcccctgtggctggcttgacctgggaggactctgagggaactgagggcagctccctcttgcctggtgagcagcccctgcacacagtggatccaggcagtgccaagcagcggccacccaggagcacctgccagagctttgagccgccagagaccccagttgtcaaggacagcaccatcggtggctcaccacagcctcgcccctctgtcggggccttcaaccccgggatggaggatattcttgactctgcaatgggcactaattgggtcccagaagaagcctctggagaggccagtgagattcccgtaccccaagggacagagctttccccctccaggccaggagggggcagcatgcagacagagcccgccagacccagcaacttcctctcagcatcttctccactccctgcatcagcaaagggccaacagccggcagatgtaactggtaccgccttgcccagggtgggccccgtgaggcccactggccaggactggaatcacaccccccagaagacagaccatccatctgccctgctcagagaccccccggagccaggctctcccaggatctcatcactgcgcccccagggcctcagcaacccctccaccctctctgctcagccacagctttccagaagccactcctcgggcagcgtgctgccccttggggagctggagggcaggaggagcaccagggatcggaggagccccgcagagccagaaggaggaccagcaagtgaaggggcagccaggcccctgccccgttttaactccgttcctttgactgacacaggccatgagaggcagtccgagggatcctccagcccgcagctccaggagtctgtcttccacctgctggtgcccagtgtcatcctggtcttgctggccgtcggaggcctcttgttctacaggtggaggcggcggagccatcaagagcctcagagagcggattctcccttggagcaaccagagggcagccccctgactcaggatgacagacaggtggaactgccagtgtagagggaattctaagctggacgcacagaacagtctctccgtgggaggagacattatggggcgtccaccaccacccctccctggccatcctcctggaatgtggtctgccctccaccagagctcctgcctgccaggactggaccagagcagccaggctggggcccctctgtctcaacccgcagacccttgactgaatgagagaggccagaggatgctccccatgctgccactatttattgtgagccctggaggctcccatgtgcttgaggaaggctggtgagcccggctcaggaccctcttccctcaggggctgcaccctcctctcactcccttccatgccggaacccaggccagggacccaccggcctgtggtttgtgggaaagcagggtggacgctgaggagtgaaagaaccctgcacccagagggcctgcctggtgccaaggtatcccagcctggacaggcatggacctgtctccagagagaggagcctgaagttcgtggggcgggacagcgtcggcctgatttcccgtaaaggtgtgcagcctgagagacgggaagaggaggcctctggacctgctggtctgcactgacagcctgaagggtctacaccctcggctcacctaagtgccctgtgctggttgccaggcgcagaggggaggccagccctgccctcaggacctgcctgacctgccagtgatgccaagagggggatcaagcactggcctctgcccctcctccttccagcacctgccagagcttctccaggaggccaagcagaggctcccctcatgaaggaagccattgcactgtgaacactgtacctgcctgctgaacagcctgcccccgtccatccatgagccagcatccgtccgtcctccactctccagcctctcccca

SEQ ID NO: 119 - protein, 554 aa, Homo sapiens
MTAPGAAGRCPPTTWLGSLLLLVCLLASRSITEEVSEYCSHMIGSGHLQSLQRLIDSQMETSCQITFEFVDQEQLKDPVCYLKKAFLLVQDIMEDTMRFRDNTPNAIAIVQLQELSLRLKSCFTKDYEEHDKACVRTFYETPLQLLEKVKNVFNETKNLLDKDWNIFSKNCNNSFAECSSQDVVTKPDCNCLYPKAIPSSDPASVSPHQPLAPSMAPVAGLTWEDSEGTEGSSLLPGEQPLHTVDPGSAKQRPPRSTCQSFEPPETPVVKDSTIGGSPQPRPSVGAFNPGMEDILDSAMGTNWVPEEASGEASEIPVPQGTELSPSRPGGGSMQTEPARPSNFLSASSPLPASAKGQQPADVTGTALPRVGPVRPTGQDWNHTPQKTDHPSALLRDPPEPGSPRISSLRPQGLSNPSTLSAQPQLSRSHSSGSVLPLGELEGRRSTRDRRSPAEPEGGPASEGAARPLPRFNSVPLTDTGHERQSEGSSSPQLQESVFHLLVPSVILVLLAVGGLLFYRWRRRSHQEPQRADSPLEQPEGSPLTQDDRQVELPV

SEQ ID NO: 120 - DNA, 1743 bp, Homo sapiens
agtgcagcgcagaagacagagggtgactaggaagacgcgcgagcggggctggccggccggcgggtgggggaggggaggcgggggaaggcggctgagtgggcctctggagtgtgtgtgtctgtgtcagtgtgtgtgtgtgtgtgtgtatgtgtgtgtctggcgcctggccagggtgatttcccataaaccacatgccccccagtcctctcttaaaaggctgtgccgagggctggccagtgaggctcggcccggggaaagtgaaagtttgcctgggtcctctcggcgccagagccgctctccgcatcccaggacagcggtgcggccctcggccggggcgcccactccgcagcagccagcgagcgagcgagcgagcgagggcggccgacgcgcccggccgggacccagctgcccgtatgaccgcgccgggcgccgccgggcgctgccctcccacgacatggctgggctccctgctgttgttggtctgtctcctggcgagcaggagtatcaccgaggaggtgtcggagtactgtagccacatgattgggagtggacacctgcagtctctgcagcggctgattgacagtcagatggagacctcgtgccaaattacatttgagtttgtagaccaggaacagttgaaagatccagtgtgctaccttaagaaggcatttctcctggtacaagacataatggaggacaccatgcgcttcagagataacacccccaatgccatcgccattgtgcagctgcaggaactctctttgaggctgaagagctgcttcaccaaggattatgaagagcatgacaaggcctgcgtccgaactttctatgagacacctctccagttgctggagaaggtcaagaatgtctttaatgaaacaaagaatctccttgacaaggactggaatattttcagcaagaactgcaacaacagctttgctgaatgctccagccaagatgtggtgaccaagcctgattgcaactgcctgtaccccaaagccatccctagcagtgacccggcctctgtctcccctcatcagcccctcgccccctccatggcccctgtggctggcttgacctgggaggactctgagggaactgagggcagctccctcttgcctggtgagcagcccctgcacacagtggatccaggcagtgccaagcagcggccacccaggagcacctgccagagctttgagccgccagagaccccagttgtcaaggacagcaccatcggtggctcaccacagcctcgcccctctgtcggggccttcaaccccgggatggaggatattcttgactctgcaatgggcactaattgggtcccagaagaagcctctggagaggccagtgagattcccgtaccccaagggacagagctttccccctccaggccaggagggggcagcatgcagacagagcccgccagacccagcaacttcctctcagcatcttctccactccctgcatcagcaaagggccaacagccggcagatgtaactggccatgagaggcagtccgagggatcctccagcccgcagctccaggagtctgtcttccacctgctggtgcccagtgtcatcctggtcttgctggccgtcggaggcctcttgttctacaggtggaggcggcggagccatcaagagcctcagagagcggattctcccttggagcaaccagagggcagccccctgactcaggatgacagacaggtggaactgccagtgtagagggaattctaag

SEQ ID NO: 121 - protein, 438 aa, Homo sapiens
MTAPGAAGRCPPTTWLGSLLLLVCLLASRSITEEVSEYCSHMIGSGHLQSLQRLIDSQMETSCQITFEFVDQEQLKDPVCYLKKAFLLVQDIMEDTMRFRDNTPNAIAIVQLQELSLRLKSCFTKDYEEHDKACVRTFYETPLQLLEKVKNVFNETKNLLDKDWNIFSKNCNNSFAECSSQDVVTKPDCNCLYPKAIPSSDPASVSPHQPLAPSMAPVAGLTWEDSEGTEGSSLLPGEQPLHTVDPGSAKQRPPRSTCQSFEPPETPVVKDSTIGGSPQPRPSVGAFNPGMEDILDSAMGTNWVPEEASGEASEIPVPQGTELSPSRPGGGSMQTEPARPSNFLSASSPLPASAKGQQPADVTGHERQSEGSSSPQLQESVFHLLVPSVILVLLAVGGLLFYRWRRRSHQEPQRADSPLEQPEGSPLTQDDRQVELPV

SEQ ID NO: 122 - DNA, 2079 bp, Homo sapiens
agtgcagcgcagaagacagagggtgactaggaagacgcgcgagcggggctggccggccggcgggtgggggaggggaggcgggggaaggcggctgagtgggcctctggagtgtgtgtgtctgtgtcagtgtgtgtgtgtgtgtgtgtatgtgtgtgtctggcgcctggccagggtgatttcccataaaccacatgccccccagtcctctcttaaaaggctgtgccgagggctggccagtgaggctcggcccggggaaagtgaaagtttgcctgggtcctctcggcgccagagccgctctccgcatcccaggacagcggtgcggccctcggccggggcgcccactccgcagcagccagcgagcgagcgagcgagcgagggcggccgacgcgcccggccgggacccagctgcccgtatgaccgcgccgggcgccgccgggcgctgccctcccacgacatggctgggctccctgctgttgttggtctgtctcctggcgagcaggagtatcaccgaggaggtgtcggagtactgtagccacatgattgggagtggacacctgcagtctctgcagcggctgattgacagtcagatggagacctcgtgccaaattacatttgagtttgtagaccaggaacagttgaaagatccagtgtgctaccttaagaaggcatttctcctggtacaagacataatggaggacaccatgcgcttcagagataacacccccaatgccatcgccattgtgcagctgcaggaactctctttgaggctgaagagctgcttcaccaaggattatgaagagcatgacaaggcctgcgtccgaactttctatgagacacctctccagttgctggagaaggtcaagaatgtctttaatgaaacaaagaatctccttgacaaggactggaatattttcagcaagaactgcaacaacagctttgctgaatgctccagccaaggccatgagaggcagtccgagggatcctccagcccgcagctccaggagtctgtcttccacctgctggtgcccagtgtcatcctggtcttgctggccgtcggaggcctcttgttctacaggtggaggcggcggagccatcaagagcctcagagagcggattctcccttggagcaaccagagggcagccccctgactcaggatgacagacaggtggaactgccagtgtagagggaattctaagctggacgcacagaacagtctctccgtgggaggagacattatggggcgtccaccaccacccctccctggccatcctcctggaatgtggtctgccctccaccagagctcctgcctgccaggactggaccagagcagccaggctggggcccctctgtctcaacccgcagacccttgactgaatgagagaggccagaggatgctccccatgctgccactatttattgtgagccctggaggctcccatgtgcttgaggaaggctggtgagcccggctcaggaccctcttccctcaggggctgcaccctcctctcactcccttccatgccggaacccaggccagggacccaccggcctgtggtttgtgggaaagcagggtggacgctgaggagtgaaagaaccctgcacccagagggcctgcctggtgccaaggtatcccagcctggacaggcatggacctgtctccagagagaggagcctgaagttcgtggggcgggacagcgtcggcctgatttcccgtaaaggtgtgcagcctgagagacgggaagaggaggcctctggacctgctggtctgcactgacagcctgaagggtctacaccctcggctcacctaagtgccctgtgctggttgccaggcgcagaggggaggccagccctgccctcaggacctgcctgacctgccagtgatgccaagagggggatcaagcactggcctctgcccctcctccttccagcacctgccagagcttctccaggaggccaagcagaggctcccctcatgaaggaagccattgcactgtgaacactgtacctgcctgctgaacagcctgcccccgtccatccatgagccagcatccgtccgtcctccactctccagcctctcccca

SEQ ID NO: 123 - protein, 256 aa, Homo sapiens
MTAPGAAGRCPPTTWLGSLLLLVCLLASRSITEEVSEYCSHMIGSGHLQSLQRLIDSQMETSCQITFEFVDQEQLKDPVCYLKKAFLLVQDIMEDTMRFRDNTPNAIAIVQLQELSLRLKSCFTKDYEEHDKACVRTFYETPLQLLEKVKNVFNETKNLLDKDWNIFSKNCNNSFAECSSQGHERQSEGSSSPQLQESVFHLLVPSVILVLLAVGGLLFYRWRRRSHQEPQRADSPLEQPEGSPLTQDDRQVELPV

SEQ ID NO: 124 - DNA, 2772 bp, Homo sapiens
agtgcagcgcagaagacagagggtgactaggaagacgcgcgagcggggctggccggccggcgggtgggggaggggaggcgggggaaggcggctgagtgggcctctggagtgtgtgtgtctgtgtcagtgtgtgtgtgtgtgtgtgtatgtgtgtgtctggcgcctggccagggtgatttcccataaaccacatgccccccagtcctctcttaaaaggctgtgccgagggctggccagtgaggctcggcccggggaaagtgaaagtttgcctgggtcctctcggcgccagagccgctctccgcatcccaggacagcggtgcggccctcggccggggcgcccactccgcagcagccagcgagcgagcgagcgagcgagggcggccgacgcgcccggccgggacccagctgcccgtatgaccgcgccgggcgccgccgggcgctgccctcccacgacatggctgggctccctgctgttgttggtctgtctcctggcgagcaggagtatcaccgaggaggtgtcggagtactgtagccacatgattgggagtggacacctgcagtctctgcagcggctgattgacagtcagatggagacctcgtgccaaattacatttgagtttgtagaccaggaacagttgaaagatccagtgtgctaccttaagaaggcatttctcctggtacaagacataatggaggacaccatgcgcttcagagataacacccccaatgccatcgccattgtgcagctgcaggaactctctttgaggctgaagagctgcttcaccaaggattatgaagagcatgacaaggcctgcgtccgaactttctatgagacacctctccagttgctggagaaggtcaagaatgtctttaatgaaacaaagaatctccttgacaaggactggaatattttcagcaagaactgcaacaacagctttgctgaatgctccagccaagatgtggtgaccaagcctgattgcaactgcctgtaccccaaagccatccctagcagtgacccggcctctgtctcccctcatcagcccctcgccccctccatggcccctgtggctggcttgacctgggaggactctgagggaactgagggcagctccctcttgcctggtgagcagcccctgcacacagtggatccaggcagtgccaagcagcggccacccaggagcacctgccagagctttgagccgccagagaccccagttgtcaaggacagcaccatcggtggctcaccacagcctcgcccctctgtcggggccttcaaccccgggatggaggatattcttgactctgcaatgggcactaattgggtcccagaagaagcctctggagaggccagtgagattcccgtaccccaagggacagagctttccccctccaggccaggagggggcagcatgcagacagagcccgccagacccagcaacttcctctcagcatcttctccactccctgcatcagcaaagggccaacagccggcagatgtaactggtaccgccttgcccagggtgggccccgtgaggcccactggccaggactggaatcacaccccccagaagacagaccatccatctgccctgctcagagaccccccggagccaggctctcccaggatctcatcactgcgcccccagggcctcagcaacccctccaccctctctgctcagccacagctttccagaagccactcctcgggcagcgtgctgccccttggggagctggagggcaggaggagcaccagggatcggaggagccccgcagagccagaaggaggaccagcaagtgaaggggcagccaggcccctgccccgttttaactccgttcctttgactgacacaggccatgagaggcagtccgagggatcctccagcccgcagctccaggagtctgtcttccacctgctggtgcccagtgtcatcctggtcttgctggccgtcggaggcctcttgttctacaggtggaggcggcggagccatcaagagcctcagagagcggattctcccttggagcaaccagagggcagccccctgactcaggatgacagacaggtggaactgccagtgtagagggaattctaagacccctcaccatcctggacacactcgtttgtcaatgtccctctgaaaatgtgacgcccagccccggacacagtactccagatgttgtctgaccagctcagagagagtacagtgggactgttaccttccttgatatggacagtattcttctatttgtgcagattaagattgcattagtttttttcttaacaactgcatcatactgttgtcatatgttgagcctgtggtctattaaaacccctagttccatttcccataaacttctgtcaagccagaccatctctaccctgtacttggacaacttaacttttttaaccaaagtgcagtttatgttcacctttgttaaagccaccttgttggtttctgcccatcacctgaacctactgaagttgtgtgaaatcctaattctgtcatctccgtagccctcccagttgtgcctcctgcacattgatgagtgcctgctgttgtctttgcccatgttgttgatgtagctgtgaccctattgttcctcacccctgccccccgccaaccccagctggcccacctcttccccctcccacccaagcccacagccagcccatcaggaagccttcctggcttctccacaaccttctgactgctcttttcagtcatgctcctcctgctcttttgtatttggctaatagtatatcaatttgcactt

SEQ ID NO: 125 - protein, 554 aa, Homo sapiens; identical to SEQ ID NO: 119

SEQ ID NO: 126 - DNA, 3060 bp, Homo sapiens
gagccagcgaggagtgaagctgagcctggcctcacacgctcctagaggaccacctcctgagagagttctttcaccccctcttctttctccaagctcccctcctgctctccctccctgcccaatacaatgcattcttgagtggcagcgtctggactccaggcagccccagagaaccgaagcaagccaaagagaggactggagccaagatactggtgggggagattggatgcctggctttctttgaggacatctttggagcgagggtggctttggggtgggggcttgtgctgcagggaatacagccaggccccaagatggacacttctgggcacttccatgactcgggggtgggggacttggatgaagaccccaagtgcccctgtccatcctctggggatgagcagcagcagcagcagcagcagcaacagcagcagcagccaccaccgccagcgccaccagcagccccccagcagcccctgggaccctcgctgcagcctcagcctccgcagcttcagcagcagcagcagcagcagcagcagcagcagcagcagcagccaccgcatcccctgtctcagctcgcccaactccagagccagcccgtccaccctggcctgctgcactcctctcccaccgctttcagggcccccccttcgtccaactccaccgccatcctccacccttcctccaggcaaggcagccagctcaatctcaatgaccacttgcttggccactctccaagttccacagctacaagtgggcctggcggaggcagccggcaccgacaggccagccccctggtgcaccggcgggacagcaaccccttcacggagatcgccatgagctcctgcaagtatagcggtggggtcatgaagcccctcagccgcctcagcgcctcccggaggaacctcatcgaggccgagactgagggccaacccctccagcttttcagccctagcaaccccccggagatcgtcatctcctcccgggaggacaaccatgcccaccagaccctgctccatcaccctaatgccacccacaaccaccagcatgccggcaccaccgccagcagcaccaccttccccaaagccaacaagcggaaaaaccaaaacattggctataagctgggacacaggagggccctgtttgaaaagagaaagcgactgagtgactatgctctgatttttgggatgtttggaattgttgttatggtgatagagaccgagctctcttggggtttgtactcaaaggactccatgttttcgttggccctgaaatgccttatcagtctgtccaccatcatccttttgggcttgatcatcgcctaccacacacgtgaagtccagctcttcgtgatcgacaatggcgcggatgactggcggatagccatgacctacgagcgcatcctgtacatcagcctggagatgctggtgtgcgccatccaccccattcctggcgagtacaagttcttctggacggcacgcctggccttctcctacacaccctcccgggcggaggccgatgtggacatcatcctgtctatccccatgttcctgcgcctgtacctgatcgcccgagtcatgctgctgcacagcaagctcttcaccgatgcctcgtcccgcagcatcggggccctcaacaagatcaacttcaacacccgctttgtcatgaagacgctcatgaccatctgccctggcactgtgctgctcgtgttcagcatctctctgtggatcattgctgcctggaccgtccgtgtctgtgaaaggtaccatgaccagcaggacgtaactagtaactttctgggtgccatgtggctcatctccatcacattcctttccattggttatggggacatggtgccccacacatactgtgggaaaggtgtctgtctcctcactggcatcatgggtgcaggctgcactgcccttgtggtggccgtggtggcccgaaagctggaactcaccaaagcggagaagcacgttcataacttcatgatggacactcagctcaccaagcggatcaagaatgctgcagccaatgtccttcgggaaacatggttaatctataaacacacaaagctgctaaagaagattgaccatgccaaagtgaggaaacaccagaggaagttcctccaagctatccaccagttgaggagcgtcaagatggaacagaggaagctgagtgaccaagccaacactctggtggacctttccaagatgcagaatgtcatgtatgacttaatcacagaactcaatgaccggagcgaagacctggagaagcagattggcagcctggagtcgaagctggagcatctcaccgccagcttcaactccctgccgctgctcatcgccgacaccctgcgccagcagcagcagcagctcctgtctgccatcatcgaggcccggggtgtcagcgtggcagtgggcaccacccacaccccaatctccgatagccccattggggtcagctccacctccttcccgaccccgtacacaagttcaagcagttgctaaataaatctccccactccagaagcattacccataggtcttaagatgcaaatcaactctctcctggtcgctttgccatcaagaaacattcagaccagggaacggaaagaagagagaccgagctaattaactaactcatgttcattcagcgtgcttggtccgacatgccttgaaaccagaaatctaatctctgtttaggtgcctctacttgggagcgggaagaggagatgacaggaagcgacgcctctggcagggcccttgctgcagagttggtggagaacagaaatccacgctcaatctcaggtcttcacgcggggggtgggggtcagatgcactgaagtagccaacagcgaagccagtccagaagaggggtccgctgggagggagggttgtgtcaggcttgggggatgggctcttcgccatgggggtctttgaacacacctctctcctttccttttgtctacggaagcctctgggtgacaaaagtaaaagagagctgcccacaacttgccaaaacagatatactcgaatcagactgaaaaaaaaaaaaaaa

SEQ ID NO: 127 - protein, 731 aa, Homo sapiens
MDTSGHFHDSGVGDLDEDPKCPCPSSGDEQQQQQQQQQQQQPPPPAPPAAPQQPLGPSLQPQPPQLQQQQQQQQQQQQQQPPHPLSQLAQLQSQPVHPGLLHSSPTAFRAPPSSNSTAILHPSSRQGSQLNLNDHLLGHSPSSTATSGPGGGSRHRQASPLVHRRDSNPFTEIAMSSCKYSGGVMKPLSRLSASRRNLIEAETEGQPLQLFSPSNPPEIVISSREDNHAHQTLLHHPNATHNHQHAGTTASSTTFPKANKRKNQNIGYKLGHRRALFEKRKRLSDYALIFGMFGIVVMVIETELSWGLYSKDSMFSLALKCLISLSTIILLGLIIAYHTREVQLFVIDNGADDWRIAMTYERILYISLEMLVCAIHPIPGEYKFFWTARLAFSYTPSRAEADVDIILSIPMFLRLYLIARVMLLHSKLFTDASSRSIGALNKINFNTRFVMKTLMTICPGTVLLVFSISLWIIAAWTVRVCERYHDQQDVTSNFLGAMWLISITFLSIGYGDMVPHTYCGKGVCLLTGIMGAGCTALVVAVVARKLELTKAEKHVHNFMMDTQLTKRIKNAAANVLRETWLIYKHTKLLKKIDHAKVRKHQRKFLQAIHQLRSVKMEQRKLSDQANTLVDLSKMQNVMYDLITELNDRSEDLEKQIGSLESKLEHLTASFNSLPLLIADTLRQQQQQLLSAIIEARGVSVAVGTTHTPISDSPIGVSSTSFPTPYTSSSSC

SEQ ID NO: 128 - DNA, 1981 bp, Homo sapiens
ctgctcagtgtcaaattaacaggaaagtcagcttaaaggacactccttgcagggactgagctggcacctactccttagagcttgctgataccaggcctgccacgcgacatctgcaaggacagttgtttggtgttttgcttcaggttatagatggagagacctataaaggactccatgttttcgttggccctgaaatgccttatcagtctgtccaccatcatccttttgggcttgatcatcgcctaccacacacgtgaagtccagctcttcgtgatcgacaatggcgcggatgactggcggatagccatgacctacgagcgcatcctgtacatcagcctggagatgctggtgtgcgccatccaccccattcctggcgagtacaagttcttctggacggcacgcctggccttctcctacacaccctcccgggcggaggccgatgtggacatcatcctgtctatccccatgttcctgcgcctgtacctgatcgcccgagtcatgctgctgcacagcaagctcttcaccgatgcctcgtcccgcagcatcggggccctcaacaagatcaacttcaacacccgctttgtcatgaagacgctcatgaccatctgccctggcactgtgctgctcgtgttcagcatctctctgtggatcattgctgcctggaccgtccgtgtctgtgaaaggtaccatgaccagcaggacgtaactagtaactttctgggtgccatgtggctcatctccatcacattcctttccattggttatggggacatggtgccccacacatactgtgggaaaggtgtctgtctcctcactggcatcatgggtgcaggctgcactgcccttgtggtggccgtggtggcccgaaagctggaactcaccaaagcggagaagcacgttcataacttcatgatggacactcagctcaccaagcggatcaagaatgctgcagccaatgtccttcgggaaacatggttaatctataaacacacaaagctgctaaagaagattgaccatgccaaagtgaggaaacaccagaggaagttcctccaagctatccaccagttgaggagcgtcaagatggaacagaggaagctgagtgaccaagccaacactctggtggacctttccaagatgcagaatgtcatgtatgacttaatcacagaactcaatgaccggagcgaagacctggagaagcagattggcagcctggagtcgaagctggagcatctcaccgccagcttcaactccctgccgctgctcatcgccgacaccctgcgccagcagcagcagcagctcctgtctgccatcatcgaggcccggggtgtcagcgtggcagtgggcaccacccacaccccaatctccgatagccccattggggtcagctccacctccttcccgaccccgtacacaagttcaagcagttgctaaataaatctccccactccagaagcattacccataggtcttaagatgcaaatcaactctctcctggtcgctttgccatcaagaaacattcagaccagggaacggaaagaagagagaccgagctaattaactaactcatgttcattcagcgtgcttggtccgacatgccttgaaaccagaaatctaatctctgtttaggtgcctctacttgggagcgggaagaggagatgacaggaagcgacgcctctggcagggcccttgctgcagagttggtggagaacagaaatccacgctcaatctcaggtcttcacgcggggggtgggggtcagatgcactgaagtagccaacagcgaagccagtccagaagaggggtccgctgggagggagggttgtgtcaggcttgggggatgggctcttcgccatgggggtctttgaacacacctctctcctttccttttgtctacggaagcctctgggtgacaaaagtaaaagagagctgcccacaacttgccaaaacagatatactcgaatcagactgaaaaaaaaaaaaaaa

SEQ ID NO: 129 - protein, 426 aa, Homo sapiens
MERPIKDSMFSLALKCLISLSTIILLGLIIAYHTREVQLFVIDNGADDWRIAMTYERILYISLEMLVCAIHPIPGEYKFFWTARLAFSYTPSRAEADVDIILSIPMFLRLYLIARVMLLHSKLFTDASSRSIGALNKINFNTRFVMKTLMTICPGTVLLVFSISLWIIAAWTVRVCERYHDQQDVTSNFLGAMWLISITFLSIGYGDMVPHTYCGKGVCLLTGIMGAGCTALVVAVVARKLELTKAEKHVHNFMMDTQLTKRIKNAAANVLRETWLIYKHTKLLKKIDHAKVRKHQRKFLQAIHQLRSVKMEQRKLSDQANTLVDLSKMQNVMYDLITELNDRSEDLEKQIGSLESKLEHLTASFNSLPLLIADTLRQQQQQLLSAIIEARGVSVAVGTTHTPISDSPIGVSSTSFPTPYTSSSSC

SEQ ID NO: 130 - DNA, 2540 bp, Homo sapiens
cccacctcggccccgggctccgaagcggctcgggggcgccctttcggtcaacatcgtagtccaccccctccccatccccagcccccggggattcaggctcgccagcgcccagccagggagccggccgggaagcgcgatgggggccccagccgcctcgctcctgctcctgctcctgctgttcgcctgctgctgggcgcccggcggggccaacctctcccaggacggctactggcaggagcaggatttggagctgggaactctggctccactcgacgaggccatcagctccacagtctggagcagccctgacatgctggccagtcaagacagccagccctggacatctgatgaaacagtggtggctggtggcaccgtggtgctcaagtgccaagtgaaagatcacgaggactcatccctgcaatggtctaaccctgctcagcagactctctactttggggagaagagagcccttcgagataatcgaattcagctggttacctctacgccccacgagctcagcatcagcatcagcaatgtggccctggcagacgagggcgagtacacctgctcaatcttcactatgcctgtgcgaactgccaagtccctcgtcactgtgctaggaattccacagaagcccatcatcactggttataaatcttcattacgggaaaaagacacagccaccctaaactgtcagtcttctgggagcaagcctgcagcccggctcacctggagaaagggtgaccaagaactccacggagaaccaacccgcatacaggaagatcccaatggtaaaaccttcactgtcagcagctcggtgacattccaggttacccgggaggatgatggggcgagcatcgtgtgctctgtgaaccatgaatctctaaagggagctgacagatccacctctcaacgcattgaagttttatacacaccaactgcgatgattaggccagaccctccccatcctcgtgagggccagaagctgttgctacactgtgagggtcgcggcaatccagtcccccagcagtacctatgggagaaggagggcagtgtgccacccctgaagatgacccaggagagtgccctgatcttccctttcctcaacaagagtgacagtggcacctacggctgcacagccaccagcaacatgggcagctacaaggcctactacaccctcaatgttaatgaccccagtccggtgccctcctcctccagcacctaccacgccatcatcggtgggatcgtggctttcattgtcttcctgctgctcatcatgctcatcttcctcggccactacttgatccggcacaaaggaacctacctgacacatgaggcaaaaggctccgacgatgctccagacgcggacacggccatcatcaatgcagaaggcgggcagtcaggaggggacgacaagaaggaatatttcatctagaggcgcctgcccacttcctgcgccccccaggggccctgtggggactgctggggccgtcaccaacccggacttgtacagagcaaccgcagggccgcccctcccgcttgctccccagcccacccacccccctgtacagaatgtctgctttgggtgcggttttgtactcggtttggaatggggagggaggagggcggggggaggggagggttgccctcagccctttccgtggcttctctgcatttgggttattattatttttgtaacaatcccaaagcaaatctgtctccaggctggagaggcaggagccctggggtgagaaaagcaaaaaacaaacaaaaaacaaaaccctggagtgttaggaggagagtgaagtagaggggtgaggaagggtaaggggcagggctggtttcagctgggggctctcaccagccctcctttcagcctctacaacagagcagcttcccagacttctccaggaacccagaaacgggatggttgtcggcaaaggttgggagtggcttttcctctggtagccacacacctgagcactacggacagggaggcaggtgccaccttgacacctctcttccatagcaatgggaaagtgatgagtgcgggagtcctgaggagatgtggcctgcagacaacatgcagccatgcagggacccaggactgtaacctggggaggacgcgggtccctgcaaggaagagtagatttggagaggaaggatggaggtggactctcaccccattccccccggaaatgaacaaagccgggccctttccataggaactgcccttggagatagcagagtgtggctgcccctccttgctccagcagcagtgggagaggcactgctctggggcctgaactgcctctgcttccccccctgaggggcccctcactcttacccaagactctggaattgttgcacggcaaccactcctcccatggcattgctcagcaactacttctcccttcccggccaccctgtgcccccttcctggtcccaacgccagcccttcatccttcctccctcagcagccaggcagacataacaacaaactactaaaaggagcttcactgcaaaaaaaaaaaaaaaaa

SEQ ID NO: 131 - protein, 432 aa, Homo sapiens
MGAPAASLLLLLLLFACCWAPGGANLSQDGYWQEQDLELGTLAPLDEAISSTVWSSPDMLASQDSQPWTSDETVVAGGTVVLKCQVKDHEDSSLQWSNPAQQTLYFGEKRALRDNRIQLVTSTPHELSISISNVALADEGEYTCSIFTMPVRTAKSLVTVLGIPQKPIITGYKSSLREKDTATLNCQSSGSKPAARLTWRKGDQELHGEPTRIQEDPNGKTFTVSSSVTFQVTREDDGASIVCSVNHESLKGADRSTSQRIEVLYTPTAMIRPDPPHPREGQKLLLHCEGRGNPVPQQYLWEKEGSVPPLKMTQESALIFPFLNKSDSGTYGCTATSNMGSYKAYYTLNVNDPSPVPSSSSTYHAIIGGIVAFIVFLLLIMLIFLGHYLIRHKGTYLTHEAKGSDDAPDADTAIINAEGGQSGGDDKKEYFI

SEQ ID NO: 132 - DNA, 1317 bp, Homo sapiens
tttttcctgagtgtagtcccaaccagccaaatccaacctcaaaacaggaagacccaaggccagtgacccccataggcctgaggcttgtgcaggcagtgggcgtggggtaaggcttcctgatgccccctgtccctgcccagaacctgatggccctcattagtccttggctcttatcttggaagcacaggcgctgacagccgtcccagcccttctgtctgcgggcctgaaccaaacggtgccatggggaactgtctgcacagggcggagctctccccctcaactgagaactcaagtcagctggacttcgaagatgtatggaattcttcctatggtgtgaatgattccttcccagatggagactatggtgccaacctggaagcagctgccccctgccactcctgtaacctgctggatgactctgcactgcccttcttcatcctcaccagtgtcctgggtatcctagctagcagcactgtcctcttcatgcttttcagacctctcttccgctggcagctctgccctggctggcctgtcctggcacagctggctgtgggcagtgccctcttcagcattgtggtgcccgtcttggccccagggctaggtagcactcgcagctctgccctgtgtagcctgggctactgtgtctggtatggctcagcctttgcccaggctttgctgctagggtgccatgcctccctgggccacagactgggtgcaggccaggtcccaggcctcaccctggggctcactgtgggaatttggggagtggctgccctactgacactgcctgtcaccctggccagtggtgcttctggtggactctgcaccctgatatacagcacggagctgaaggctttgcaggccacacacactgtagcctgtcttgccatctttgtcttgttgccattgggtttgtttggagccaaggggctgaagaaggcattgggtatggggccaggcccctggatgaatatcctgtgggcctggtttattttctggtggcctcatggggtggttctaggactggatttcctggtgaggtccaagctgttgctgttgtcaacatgtctggcccagcaggctctggacctgctgctgaacctggcagaagccctggcaattttgcactgtgtggctacgcccctgctcctcgccctattctgccaccaggccacccgcaccctcttgccctctctgcccctccctgaaggatggtcttctcatctggacacccttggaagcaaatcctagttctcttcccacctgtcaacctgaattaaagtctacactgcctttgtgaaaaaaaaaaaaaaaaaa

SEQ ID NO: 133 - protein, 336 aa, Homo sapiens
MGNCLHRAELSPSTENSSQLDFEDVWNSSYGVNDSFPDGDYGANLEAAAPCHSCNLLDDSALPFFILTSVLGILASSTVLFMLFRPLFRWQLCPGWPVLAQLAVGSALFSIVVPVLAPGLGSTRSSALCSLGYCVWYGSAFAQALLLGCHASLGHRLGAGQVPGLTLGLTVGIWGVAALLTLPVTLASGASGGLCTLIYSTELKALQATHTVACLAIFVLLPLGLFGAKGLKKALGMGPGPWMNILWAWFIFWWPHGVVLGLDFLVRSKLLLLSTCLAQQALDLLLNLAEALAILHCVATPLLLALFCHQATRTLLPSLPLPEGWSSHLDTLGSKS

SEQ ID NO: 134 - DNA, 660 bp, Homo sapiens
atgttggaaattgattcctcccgtgggtccacaatactcctgaaaacccatggagagtgtgatggagaggcatcttccgggtatcctgctcctcaccactctctcgagaggtgtgacagtgaggtgaagaagcccctgaagaacttcaagctttgcctgaaaaccttcacagacttcacctgcccttatagcctcttctacagcactcggtcccaggacaatgagctgcttctccttgtcaacaaaatgggaatgtatctgctgcacattggaaatgctgcagtcactttcaatggccccaccccctgccctcgatctccttatgcttcgacccatgtcaatgtgagctgggagtctgcctctggaattgctacactctgggcaaatgggaagctggtggggaggaagggtgtgtggaaggggtactctgtgggagaagaggctaagatcatcctgggacaagagcaggattcctttgggggacattttgatgaaaatcaatcctttgttggggtgatatgggatgtgtttttgtgggatcatgtgctccctccaaaggagatgtgtgactcctgttacagcggcagcctcctgaatcggcataccctgacttatgaagataatggctatgtggtaactaagcccaaggtgtgggcttaa

SEQ ID NO: 135 - protein, 219 aa, Homo sapiens
MLEIDSSRGSTILLKTHGECDGEASSGYPAPHHSLERCDSEVKKPLKNFKLCLKTFTDFTCPYSLFYSTRSQDNELLLLVNKMGMYLLHIGNAAVTFNGPTPCPRSPYASTHVNVSWESASGIATLWANGKLVGRKGVWKGYSVGEEAKIILGQEQDSFGGHFDENQSFVGVIWDVFLWDHVLPPKEMCDSCYSGSLLNRHTLTYEDNGYVVTKPKVWA

SEQ ID NO: 136 - DNA, 1191 bp, Homo sapiens
agtctccagcatcctccacctgtctaccaccgagcatgggcctatatttgaagccttagatctctccagcacagtaagcaccaggagtccatgaagaagatggctcctgccatggaatcccctactctactgtgtgtagccttactgttcttcgctccagatggcgtgttagcagtccctcagaaacctaaggtctccttgaaccctccatggaatagaatatttaaaggagagaatgtgactcttacatgtaatgggaacaatttctttgaagtcagttccaccaaatggttccacaatggcagcctttcagaagagacaaattcaagtttgaatattgtgaatgccaaatttgaagacagtggagaatacaaatgtcagcaccaacaagttaatgagagtgaacctgtgtacctggaagtcttcagtgactggctgctccttcaggcctctgctgaggtggtgatggagggccagcccctcttcctcaggtgccatggttggaggaactgggatgtgtacaaggtgatctattataaggatggtgaagctctcaagtactggtatgagaaccacaacatctccattacaaatgccacagttgaagacagtggaacctactactgtacgggcaaagtgtggcagctggactatgagtctgagcccctcaacattactgtaataaaagctccgcgtgagaagtactggctacaattttttatcccattgttggtggtgattctgtttgctgtggacacaggattatttatctcaactcagcagcaggtcacatttctcttgaagattaagagaaccaggaaaggcttcagacttctgaacccacatcctaagccaaaccccaaaaacaactgatataattactcaagaaatatttgcaacattagtttttttccagcatcagcaattgctactcaattgtcaaacacagcttgcaatatacatagaaacgtctgtgctcaaggatttatagaaatgcttcattaaactgagtgaaactggttaagtggcatgtaatagtaagtgctcaattaacattggttgaataaatgagagaatgaatagattcatttattagcatttgtaaaagagatgttcaatttcaataaaataaatataaaaccatgtaacagaatgcttctgagtaaaaaaaaaaaaaaaaaaaaaaaaaaa

SEQ ID NO: 137 - protein, 257 aa, Homo sapiens
MAPAMESPTLLCVALLFFAPDGVLAVPQKPKVSLNPPWNRIFKGENVTLTCNGNNFFEVSSTKWFHNGSLSEETNSSLNIVNAKFEDSGEYKCQHQQVNESEPVYLEVFSDWLLLQASAEVVMEGQPLFLRCHGWRNWDVYKVIYYKDGEALKYWYENHNISITNATVEDSGTYYCTGKVWQLDYESEPLNITVIKAPREKYWLQFFIPLLVVILFAVDTGLFISTQQQVTFLLKIKRTRKGFRLLNPHPKPNPKNN

SEQ ID NO: 138 - DNA, 990 bp, Homo sapiens
atgccaaagctaaattccacttttgtgactgagttcctctttgaaggtttctccagcttcaggcggcagcacaaacttgtcttctttgttgtcttcctaactttgtacctgctgactctctctggcaatgtgattatcatgaccattattcgcctggaccatcatcttcacacccccatgtacttcttcctgtgcatgctatccatctctgagacctgctacactgtggccatcattccccatatgctttctggtctcttgaatcctcatcagcccattgccacccaaagctgtgccactcagctcttcttctatctcacctttggcatcaacaactgcttcctgctcacagtcatgggatatgaccgctatgtggccatctgcaaccccctaaggtattcagtcatcatgggtaagagggcctgtatccaactggcctctggatcactggggattggccttggcatggccattgtccaagtaacatctgtgtttggcctgccattctgtgatgcctttgtcatctcccacttcttctgtgatgtgagacacctgctgaagctggcctgcacagacaccactgtcaatgagataatcaactttgttgtcagcgtctgtgtccttgttctacctatgggcctggtctttatctcctatgtcctcatcatctccaccattcttaagattgcctcagctgaaggtcagaagaaggcctttgccacctgcgcctcccacctcacagtggtcatcatccactatggctgtgcctccatcatctacctgaagcctaagtcccagagttccctgggacaggacagactcatctcagtgacctacactcatcactcccctactgaaccctgttgtgtacagcctgaagaacaaggaggtcaaagatgctctgcacagagccgtggggcaaaaaactctgtctccttaatgaagagaggttgtgaaggcttttcctttgcgtttataaatatgtactaa

SEQ ID NO: 139 - protein, 329 aa, Homo sapiens
MPKLNSTFVTEFLFEGFSSFRRQHKLVFFVVFLTLYLLTLSGNVIIMTIIRLDHHLHTPMYFFLCMLSISETCYTVAIIPHMLSGLLNPHQPIATQSCATQLFFYLTFGINNCFLLTVMGYDRYVAICNPLRYSVIMGKRACIQLASGSLGIGLGMAIVQVTSVFGLPFCDAFVISHFFCDVRHLLKLACTDTTVNEIINFVVSVCVLVLPMGLVFISYVLIISTILKIASAEGQKKAFATCASHLTVVIIHYGCASIIYLKPKSQSSLGQDRLISVTYTHHSPTEPCCVQPEEQGGQRCSAQSRGAKNSVSLMKRGCEGFSFAFINMY

SEQ ID NO: 140 - DNA, 963 bp, Homo sapiens
atgcttttatgtttcagatttgggaaccaatccatgaaaagagagaactttactctcatcactgactttgttttccaaggtttctctagcttccatgagcagcagatcaccctttttggcgtgttccttgcactatacatcttaaccttagcaggcaatatcatcattgtgaccatcatccgaattgatcttcatcttcacacacccatgtacttcttcctgagcatgctgtccacttcagagactgtatatacattggtcattctcccaagaatgctctccagcctcgtaggtatgagccagcccatgtcattggcagggtgtgccacacagatgttcttttttgtaacctttggcatcactaactgcttcctgctcacagcaatgggatatgaccgctatgtggccatctgcaaccccctgagatacatggttattatgaacaagaggctgcgtatccaacttgtcctgggggcctgcagcattgggctgattgtagcaataacgcaagtgacatctgtattcaggttacccttctgtgctagaaaggtgccccacttcttctgtgacatccgccctgtgatgaagctctcctgcattgacaccactgtcaatgaaatcctgactttgattatcagtgtgctggtgcttgttgtacctatgggtctggttttcatttcttatgttctcattatctctacaatcctcaagattgcttcagttgagggccggaagaaggcttttgccacctgtgcatcccacctcactgtggtcattgtccactacagctgtgcctccattgcctacctcaagcccaagtcagagaacaccagagaacatgaccagctgatctcggtgacctacactgtcatcactcccctactgaaccctgtggtatacaccctgagaaataaagaggtcaaagatgctctgtgcagggctgttggtgggaagttttcctga

SEQ ID NO: 141 - protein, 320 aa, Homo sapiens
MLLCFRFGNQSMKRENFTLITDFVFQGFSSFHEQQITLFGVFLALYILTLAGNIIIVTIIRIDLHLHTPMYFFLSMLSTSETVYTLVILPRMLSSLVGMSQPMSLAGCATQMFFFVTFGITNCFLLTAMGYDRYVAICNPLRYMVIMNKRLRIQLVLGACSIGLIVAITQVTSVFRLPFCARKVPHFFCDIRPVMKLSCIDTTVNEILTLIISVLVLVVPMGLVFISYVLIISTILKIASVEGRKKAFATCASHLTVVIVHYSCASIAYLKPKSENTREHDQLISVTYTVITPLLNPVVYTLRNKEVKDALCRAVGGKFS

SEQ ID NO: 142 - DNA, 2411 bp, Homo sapiens
gtctcttaaaacccactggacgttggcacagtgctgggatgactatggagacccaaatgtctcagaatgtatgtcccagaaacctgtggctgcttcaaccattgacagttttgctgctgctggcttctgcagacagtcaagctgctcccccaaaggctgtgctgaaacttgagcccccgtggatcaacgtgctccaggaggactctgtgactctgacatgccagggggctcgcagccctgagagcgactccattcagtggttccacaatgggaatctcattcccacccacacgcagcccagctacaggttcaaggccaacaacaatgacagcggggagtacacgtgccagactggccagaccagcctcagcgaccctgtgcatctgactgtgctttccgaatggctggtgctccagacccctcacctggagttccaggagggagaaaccatcatgctgaggtgccacagctggaaggacaagcctctggtcaaggtcacattcttccagaatggaaaatcccagaaattctcccatttggatcccaccttctccatcccacaagcaaaccacagtcacagtggtgattaccactgcacaggaaacataggctacacgctgttctcatccaagcctgtgaccatcactgtccaagtgcccagcatgggcagctcttcaccaatggggatcattgtggctgtggtcattgcgactgctgtagcagccattgttgctgctgtagtggccttgatctactgcaggaaaaagcggatttcagccaattccactgatcctgtgaaggctgcccaatttgagccacctggacgtcaaatgattgccatcagaaagagacaacttgaagaaaccaacaatgactatgaaacagctgacggcggctacatgactctgaaccccagggcacctactgacgatgataaaaacatctacctgactcttcctcccaacgaccatgtcaacagtaataactaaagagtaacgttatgccatgtggtcatactctcagcttgctgagtggatgacaaaaagaggggaattgttaaaggaaaatttaaatggagactggaaaaatcctgagcaaacaaaaccacctggcccttagaaatagctttaactttgcttaaactacaaacacaagcaaaacttcacggggtcatactacatacaagcataagcaaaacttaacttggatcatttctggtaaatgcttatgttagaaataagacaaccccagccaatcacaagcagcctactaacatataattaggtgactagggactttctaagaagatacctacccccaaaaaacaattatgtaattgaaaaccaaccgattgcctttattttgcttccacattttcccaataaatacttgcctgtgacattttgccactggaacactaaacttcatgaattgcgcctcagatttttcctttaacatcttttttttttttgacagagtctcaatctgttacccaggctggagtgcagtggtgctatcttggctcactgcaaacccgcctcccaggtttaagcgattctcatgcctcagcctcccagtagctgggattagaggcatgtgccatcatacccagctaatttttgtattttttattttttttttttagtagagacagggtttcgcaatgttggccaggccgatctcgaacttctggcctctagcgatctgcccgcctcggcctcccaaagtgctgggatgaccagcatcagccccaatgtccagcctctttaacatcttctttcctatgccctctctgtggatccctactgctggtttctgccttctccatgctgagaacaaaatcacctattcactgcttatgcagtcggaagctccagaagaacaaagagcccaattaccagaaccacattaagtctccattgttttgccttgggatttgagaagagaattagagaggtgaggatctggtatttcctggactaaattccccttggggaagacgaagggatgctgcagttccaaaagagaaggactcttccagagtcatctacctgagtcccaaagctccctgtcctgaaagccacagacaatatggtcccaaatgactgactgcaccttctgtgcctcagccgttcttgacatcaagaatcttctgttccacatccacacagccaatacaattagtcaaaccactgttattaacagatgtagcaacatgagaaacgcttatgttacaggttacatgagagcaatcatgtaagtctatatgacttcagaaatgttaaaatagactaacctctaacaacaaattaaaagtgattgtttcaaggtgatgcaattattgatgacctattttatttttctataatgatcatatattacctttgtaataaaacattataaccaaaaca

SEQ ID NO: 143 - protein, 316 aa, Homo sapiens
MTMETQMSQNVCPRNLWLLQPLTVLLLLASADSQAAPPKAVLKLEPPWINVLQEDSVTLTCQGARSPESDSIQWFHNGNLIPTHTQPSYRFKANNNDSGEYTCQTGQTSLSDPVHLTVLSEWLVLQTPHLEFQEGETIMLRCHSWKDKPLVKVTFFQNGKSQKFSHLDPTFSIPQANHSHSGDYHCTGNIGYTLFSSKPVTITVQVPSMGSSSPMGIIVAVVIATAVAAIVAAVVALIYCRKKRISANSTDPVKAAQFEPPGRQMIAIRKRQLEETNNDYETADGGYMTLNPRAPTDDDKNIYLTLPPNDHVNSNN

SEQ ID NO: 144 - DNA, 2664 bp, Homo sapiens
agagccagcccggaggagctagaaccttccccgcatttctttcagcagcctgagtcagaggcgggctggcctggcgtagccgcccagcctcgcggctcatgccccgatctgcccgaaccttctcccggggtcagcgccgcgccgcgccacccggctgagtcagcccgggcgggcgagaggctctcaactgggcgggaaggtgcgggaaggtgcggaaaggttcgcgaaagttcgcggcggcgggggtcgggtgaggcgcaaaaggataaaaagcccgtggaagcggagctgagcagatccgagccgggctggctgcagagaaaccgcagggagagcctcactgctgagcgcccctcgacggcggagcggcagcagcctccgtggcctccagcatccgacaagaagcttcagccatgcaggccccacgggagctcgcggtgggcatcgacctgggcaccacctactcgtgcgtgggcgtgtttcagcagggccgcgtggagatcctggccaacgaccagggcaaccgcaccacgcccagctacgtggccttcaccgacaccgagcggctggtcggggacgcggccaagagccaggcggccctgaacccccacaacaccgtgttcgatgccaagcggctgatcgggcgcaagttcgcggacaccacggtgcagtcggacatgaagcactggcccttccgggtggtgagcgagggcggcaagcccaaggtgcgcgtatgctaccgcggggaggacaagacgttctaccccgaggagatctcgtccatggtgctgagcaagatgaaggagacggccgaggcgtacctgggccagcccgtgaagcacgcagtgatcaccgtgcccgcctatttcaatgactcgcagcgccaggccaccaaggacgcgggggccatcgcggggctcaacgtgttgcggatcatcaatgagcccacggcagctgccatcgcctatgggctggaccggcggggcgcgggagagcgcaacgtgctcatttttgacctgggtgggggcaccttcgatgtgtcggttctctccattgacgctggtgtctttgaggtgaaagccactgctggagatacccacctgggaggagaggacttcgacaaccggctcgtgaaccacttcatggaagaattccggcggaagcatgggaaggacctgagcgggaacaagcgtgccctgcgcaggctgcgcacagcctgtgagcgcgccaagcgcaccctgtcctccagcacccaggccaccctggagatagactccctgttcgagggcgtggacttctacacgtccatcactcgtgcccgctttgaggaactgtgctcagacctcttccgcagcaccctggagccggtggagaaggccctgcgggatgccaagctggacaaggcccagattcatgacgtcgtcctggtggggggctccactcgcatccccaaggtgcagaagttgctgcaggacttcttcaacggcaaggagctgaacaagagcatcaaccctgatgaggctgtggcctatggggctgctgtgcaggcggccgtgttgatgggggacaaatgtgagaaagtgcaggatctcctgctgctggatgtggctcccctgtctctggggctggagacagcaggtggggtgatgaccacgctgatccagaggaacgccactatccccaccaagcagacccagactttcaccacctactcggacaaccagcctggggtcttcatccaggtgtatgagggtgagagggccatgaccaaggacaacaacctgctggggcgttttgaactcagtggcatccctcctgccccacgtggagtcccccagatagaggtgacctttgacattgatgctaatggcatcctgagcgtgacagccactgacaggagcacaggtaaggctaacaagatcaccatcaccaatgacaagggccggctgagcaaggaggaggtggagaggatggttcatgaagccgagcagtacaaggctgaggatgaggcccagagggacagagtggctgccaaaaactcgctggaggcccatgtcttccatgtgaaaggttctttgcaagaggaaagccttagggacaagattcccgaagaggacaggcgcaaaatgcaagacaagtgtcgggaagtccttgcctggctggagcacaaccagctggcagagaaggaggagtatgagcatcagaagagggagctggagcaaatctgtcgccccatcttctccaggctctatggggggcctggtgtccctgggggcagcagttgtggcactcaagcccgccagggggaccccagcaccggccccatcattgaggaggttgattgaatggcccttcgtgataagtcagctgtgactgtcagggctatgctatgggccttctagactgtcttctatgatcctgcccttcagagatgaactttccctccaaagctagaactttcttcccaggataactgaagtcttttgactttttggggggagggcggttcatcctcttctgcttcaaataaaaagtcattaatttattaaaacttgtgtggcactttaacattgctttcacctatattttgtgtactttgttacttgcatgtatgaattttgttatgtaaaatatagttatagacctaaataaaaaaaaaaaaaa

SEQ ID NO: 145 - protein, 643 aa, Homo sapiens
MQAPRELAVGIDLGTTYSCVGVFQQGRVEILANDQGNRTTPSYVAFTDTERLVGDAAKSQAALNPHNTVFDAKRLIGRKFADTTVQSDMKHWPFRVVSEGGKPKVRVCYRGEDKTFYPEEISSMVLSKMKETAEAYLGQPVKHAVITVPAYFNDSQRQATKDAGAIAGLNVLRIINEPTAAAIAYGLDRRGAGERNVLIFDLGGGTFDVSVLSIDAGVFEVKATAGDTHLGGEDFDNRLVNHFMEEFRRKHGKDLSGNKRALRRLRTACERAKRTLSSSTQATLEIDSLFEGVDFYTSITRARFEELCSDLFRSTLEPVEKALRDAKLDKAQIHDVVLVGGSTRIPKVQKLLQDFFNGKELNKSINPDEAVAYGAAVQAAVLMGDKCEKVQDLLLLDVAPLSLGLETAGGVMTTLIQRNATIPTKQTQTFTTYSDNQPGVFIQVYEGERAMTKDNNLLGRFELSGIPPAPRGVPQIEVTFDIDANGILSVTATDRSTGKANKITITNDKGRLSKEEVERMVHEAEQYKAEDEAQRDRVAAKNSLEAHVFHVKGSLQEESLRDKIPEEDRRKMQDKCREVLAWLEHNQLAEKEEYEHQKRELEQICRPIFSRLYGGPGVPGGSSCGTQARQGDPSTGPIIEEVD

SEQ ID NO: 146 - DNA, 2406 bp, Homo sapiens
gattctgtgtgtgtcctcagatgctcagccacagacctttgagggagtaaagggggcagacccacccaccttgcctccaggctctttccttcctggtcctgttctatggtggggctcccttgccagacttcagactgagaagtcagatgaagtttcaagaaaaggaaattggtgggtgacagagatgggtggaggggctggggaaaggctgtttacttcctcctgtctagtcggtttggtccctttagggctccggatatctttggtgacttgtccactccagtgtggcatcatgtggcagctgctcctcccaactgctctgctacttctagtttcagctggcatgcggactgaagatctcccaaaggctgtggtgttcctggagcctcaatggtacagggtgctcgagaaggacagtgtgactctgaagtgccagggagcctactcccctgaggacaattccacacagtggtttcacaatgagagcctcatctcaagccaggcctcgagctacttcattgacgctgccacagtcgacgacagtggagagtacaggtgccagacaaacctctccaccctcagtgacccggtgcagctagaagtccatatcggctggctgttgctccaggcccctcggtgggtgttcaaggaggaagaccctattcacctgaggtgtcacagctggaagaacactgctctgcataaggtcacatatttacagaatggcaaaggcaggaagtattttcatcataattctgacttctacattccaaaagccacactcaaagacagcggctcctacttctgcagggggctttttgggagtaaaaatgtgtcttcagagactgtgaacatcaccatcactcaaggtttggcagtgtcaaccatctcatcattctttccacctgggtaccaagtctctttctgcttggtgatggtactcctttttgcagtggacacaggactatatttctctgtgaagacaaacattcgaagctcaacaagagactggaaggaccataaatttaaatggagaaaggaccctcaagacaaatgacccccatcccatgggggtaataagagcagtagcagcagcatctctgaacatttctctggatttgcaaccccatcatcctcaggcctctctacaagcagcaggaaacatagaactcagagccagatcccttatccaactctcgacttttccttggtctccagtggaagggaaaagcccatgatcttcaagcagggaagccccagtgagtagctgcattcctagaaattgaagtttcagagctacacaaacactttttctgtcccaaccgttccctcacagcaaagcaacaatacaggctagggatggtaatcctttaaacatacaaaaattgctcgtgttataaattacccagtttagaggggaaaaaaaaacaattattcctaaataaatggataagtagaattaatggttgaggcaggaccatacagagtgtgggaactgctggggatctagggaattcagtgggaccaatgaaagcatggctgagaaatagcaggtagtccaggatagtctaagggaggtgttcccatctgagcccagagataagggtgtcttcctagaacattagccgtagtggaattaacaggaaatcatgagggtgacgtagaattgagtcttccaggggactctatcagaactggaccatctccaagtatataacgatgagtcctcttaatgctaggagtagaaaatggtcctaggaaggggactgaggattgcggtggggggtggggtggaaaagaaagtacagaacaaaccctgtgtcactgtcccaagttgctaagtgaacagaactatctcagcatcagaatgagaaagcctgagaagaaagaaccaaccacaagcacacaggaaggaaagcgcaggaggtgaaaatgctttcttggccagggtagtaagaattagaggttaatgcagggactgtaaaaccaccttttctgcttcaatatctaattcctgtgtagctttgttcattgcatttattaaacaaatgttgtataaccaatactaaatgtactactgagcttcgctgagttaagttatgaaactttcaaatccttcatcatgtcagttccaatgaggtggggatggagaagacaattgttgcttatgaaagaaagctttagctgtctctgttttgtaagctttaagcgcaacatttcttggttccaataaagcattttacaagatcttgcatgctactcttagatagaagatgggaaaaccatggtaataaaatatgaatgataaaaaaaaaaaaaaaaaaaaaaaaaaaaaaaaaaaaaaaaaaaaaaaaaaaaaaaaaaaaaaaaaaaaaaaaaaaaaaaaaaaaaaaaaaaaaaaaaaaa

SEQ ID NO: 147 - protein, 290 aa, Homo sapiens
MGGGAGERLFTSSCLVGLVPLGLRISLVTCPLQCGIMWQLLLPTALLLLVSAGMRTEDLPKAVVFLEPQWYRVLEKDSVTLKCQGAYSPEDNSTQWFHNESLISSQASSYFIDAATVDDSGEYRCQTNLSTLSDPVQLEVHIGWLLLQAPRWVFKEEDPIHLRCHSWKNTALHKVTYLQNGKGRKYFHHNSDFYIPKATLKDSGSYFCRGLFGSKNVSSETVNITITQGLAVSTISSFFPPGYQVSFCLVMVLLFAVDTGLYFSVKTNIRSSTRDWKDHKFKWRKDPQDK

SEQ ID NO: 148 - DNA, 1515 bp, Homo sapiens
aatttgtttgccctctagggtagaatccgccaagctttgagagaaggctgtgactgctgtgctctgggcgccagctcgctccagggagtgatgggaatcctgtcattcttacctgtccttgccactgagagtgactgggctgactgcaagtccccccagccttggggtcatatgcttctgtggacagctgtgctattcctggctcctgttgctgggacacctgcagctcccccaaaggctgtgctgaaactcgagccccagtggatcaacgtgctccaagaggactctgtgactctgacatgccgggggactcacagccctgagagcgactccattccgtggttccacaatgggaatctcattcccacccacacgcagcccagctacaggttcaaggccaacaacaatgacagcggggagtacacgtgccagactggccagaccagcctcagcgaccctgtgcatctgactgtgctttctgagtggctggtgctccagacccctcacctggagttccaggagggagaaaccatcgtgctgaggtgccacagctggaaggacaagcctctggtcaaggtcacattcttccagaatggaaaatccaagaaattttcccgttcggatcccaacttctccatcccacaagcaaaccacagtcacagtggtgattaccactgcacaggaaacataggctacacgctgtactcatccaagcctgtgaccatcactgtccaagctcccagctcttcaccgatggggatcattgtggctgtggtcactgggattgctgtagcggccattgttgctgctgtagtggccttgatctactgcaggaaaaagcggatttcagccaattccactgatcctgtgaaggctgcccaatttgagatgctttcctgcacccacctggacgtcaaatgattgccatcagaaagagacaacctgaagaaaccaacaatgactatgaaacagctgacggcggctacatgactctgaaccccagggcacctactgacgatgataaaaacatctacctgactcttcctcccaacgaccatgtcaacagtaataactaaagagtaacgttatgccatgtggtcacactctcagcttgctgagtggatgacaaaaagaggggaattgttaaaggaaaatttaaatggagactggaaaaattcctgagcaaacaaaaccacctggcccttagaaatagctttaactttgcttaaactacaaacacaagcaaaacttcacggggtcatactacatacaagcataagcaaaacttaacttggatgatttctggtaaatgcttatgttagaaataagacaaccccagccaatcacaagcagcctactaacatataattaggtgactagggactttctaagaagatacctacccccaaaaaacaattatgtaattgaaaacccatcgattgcctttattttgcttccacattttcccaataaatacttgcctgtgacattttgccactggaacactaaacttca

SEQ ID NO: 149 - protein, 276 aa, Homo sapiens
MGILSFLPVLATESDWADCKSPQPWGHMLLWTAVLFLAPVAGTPAAPPKAVLKLEPQWINVLQEDSVTLTCRGTHSPESDSIPWFHNGNLIPTHTQPSYRFKANNNDSGEYTCQTGQTSLSDPVHLTVLSEWLVLQTPHLEFQEGETIVLRCHSWKDKPLVKVTFFQNGKSKKFSRSDPNFSIPQANHSHSGDYHCTGNIGYTLYSSKPVTITVQAPSSSPMGIIVAVVTGIAVAAIVAAVVALIYCRKKRISANSTDPVKAAQFEMLSCTHLDVK

SEQ ID NO: 150 - DNA, 1463 bp, Homo sapiens
aatttgtttgccctctagggtagaatccgccaagctttgagagaaggctgtgactgctgtgctctgggcgccagctcgctccagggagtgatgggaatcctgtcattcttacctgtccttgccactgagagtgactgggctgactgcaagtccccccagccttggggtcatatgcttctgtggacagctgtgctattcctggctcctgttgctgggacacctgcagctcccccaaaggctgtgctgaaactcgagccccagtggatcaacgtgctccaagaggactctgtgactctgacatgccgggggactcacagccctgagagcgactccattccgtggttccacaatgggaatctcattcccacccacacgcagcccagctacaggttcaaggccaacaacaatgacagcggggagtacacgtgccagactggccagaccagcctcagcgaccctgtgcatctgactgtgctttctgagtggctggtgctccagacccctcacctggagttccaggagggagaaaccatcgtgctgaggtgccacagctggaaggacaagcctctggtcaaggtcacattcttccagaatggaaaatccaagaaattttcccgttcggatcccaacttctccatcccacaagcaaaccacagtcacagtggtgattaccactgcacaggaaacataggctacacgctgtactcatccaagcctgtgaccatcactgtccaagctcccagctcttcaccgatggggatcattgtggctgtggtcactgggattgctgtagcggccattgttgctgctgtagtggccttgatctactgcaggaaaaagcggatttcagccacctggacgtcaaatgattgccatcagaaagagacaacctgaagaaaccaacaatgactatgaaacagctgacggcggctacatgactctgaaccccagggcacctactgacgatgataaaaacatctacctgactcttcctcccaacgaccatgtcaacagtaataactaaagagtaacgttatgccatgtggtcacactctcagcttgctgagtggatgacaaaaagaggggaattgttaaaggaaaatttaaatggagactggaaaaattcctgagcaaacaaaaccacctggcccttagaaatagctttaactttgcttaaactacaaacacaagcaaaacttcacggggtcatactacatacaagcataagcaaaacttaacttggatgatttctggtaaatgcttatgttagaaataagacaaccccagccaatcacaagcagcctactaacatataattaggtgactagggactttctaagaagatacctacccccaaaaaacaattatgtaattgaaaacccatcgattgcctttattttgcttccacattttcccaataaatacttgcctgtgacattttgccactggaacactaaacttca

SEQ ID NO: 151 - protein, 267 aa, Homo sapiens
MGILSFLPVLATESDWADCKSPQPWGHMLLWTAVLFLAPVAGTPAAPPKAVLKLEPQWINVLQEDSVTLTCRGTHSPESDSIPWFHNGNLIPTHTQPSYRFKANNNDSGEYTCQTGQTSLSDPVHLTVLSEWLVLQTPHLEFQEGETIVLRCHSWKDKPLVKVTFFQNGKSKKFSRSDPNFSIPQANHSHSGDYHCTGNIGYTLYSSKPVTITVQAPSSSPMGIIVAVVTGIAVAAIVAAVVALIYCRKKRISATWTSNDCHQKETT

SEQ ID NO: 152 - DNA, 1501 bp, Homo sapiens
aatttgtttgccctctagggtagaatccgccaagctttgagagaaggctgtgactgctgtgctctgggcgccagctcgctccagggagtgatgggaatcctgtcattcttacctgtccttgccactgagagtgactgggctgactgcaagtccccccagccttggggtcatatgcttctgtggacagctgtgctattcctggctcctgttgctgggacacctgcagctcccccaaaggctgtgctgaaactcgagccccagtggatcaacgtgctccaagaggactctgtgactctgacatgccgggggactcacagccctgagagcgactccattccgtggttccacaatgggaatctcattcccacccacacgcagcccagctacaggttcaaggccaacaacaatgacagcggggagtacacgtgccagactggccagaccagcctcagcgaccctgtgcatctgactgtgctttctgagtggctggtgctccagacccctcacctggagttccaggagggagaaaccatcgtgctgaggtgccacagctggaaggacaagcctctggtcaaggtcacattcttccagaatggaaaatccaagaaattttcccgttcggatcccaacttctccatcccacaagcaaaccacagtcacagtggtgattaccactgcacaggaaacataggctacacgctgtactcatccaagcctgtgaccatcactgtccaagctcccagctcttcaccgatggggatcattgtggctgtggtcactgggattgctgtagcggccattgttgctgctgtagtggccttgatctactgcaggaaaaagcggatttcagccaattccactgatcctgtgaaggctgcccaatttgagccacctggacgtcaaatgattgccatcagaaagagacaacctgaagaaaccaacaatgactatgaaacagctgacggcggctacatgactctgaaccccagggcacctactgacgatgataaaaacatctacctgactcttcctcccaacgaccatgtcaacagtaataactaaagagtaacgttatgccatgtggtcacactctcagcttgctgagtggatgacaaaaagaggggaattgttaaaggaaaatttaaatggagactggaaaaattcctgagcaaacaaaaccacctggcccttagaaatagctttaactttgcttaaactacaaacacaagcaaaacttcacggggtcatactacatacaagcataagcaaaacttaacttggatgatttctggtaaatgcttatgttagaaataagacaaccccagccaatcacaagcagcctactaacatataattaggtgactagggactttctaagaagatacctacccccaaaaaacaattatgtaattgaaaacccatcgattgcctttattttgcttccacattttcccaataaatacttgcctgtgacattttgccactggaacactaaacttca

SEQ ID NO: 153 - protein, 323 aa, Homo sapiens
MGILSFLPVLATESDWADCKSPQPWGHMLLWTAVLFLAPVAGTPAAPPKAVLKLEPQWINVLQEDSVTLTCRGTHSPESDSIPWFHNGNLIPTHTQPSYRFKANNNDSGEYTCQTGQTSLSDPVHLTVLSEWLVLQTPHLEFQEGETIVLRCHSWKDKPLVKVTFFQNGKSKKFSRSDPNFSIPQANHSHSGDYHCTGNIGYTLYSSKPVTITVQAPSSSPMGIIVAVVTGIAVAAIVAAVVALIYCRKKRISANSTDPVKAAQFEPPGRQMIAIRKRQPEETNNDYETADGGYMTLNPRAPTDDDKNIYLTLPPNDHVNSNN

SEQ ID NO: 154 - DNA, 2300 bp, Homo sapiens
agatgctcagccgcagacctttgggagagtaaagggggcacacccacccaccttgcctccaggctctttccttcctattcctgttctatggtggggctccattgcgagacttcagattgagaaatcagatgaagtttcaagaaaaggaaactggcaggtgacagagatgggtggagggactggggaaaggctgtttactccctcctgtctagtcggcttggtccctttagggctccggatatctttggtgacttgtccactccagtgtggcatcatgtggcagctgctcctcccaactgctctgctacttctagtttcagctggcatgcggactgaagatctcccaaaggctgtggtgttcctggagcctcaatggtacagcgtgcttgagaaggacagtgtgactctgaagtgccagggagcctactcccctgaggacaattccacacagtggtttcacaatgagaacctcatctcaagccaggcctcgagctacttcattgacgctgccacagtcaacgacagtggagagtacaggtgccagacaaacctctccaccctcagtgacccggtgcagctagaagtccatatcggctggctgttgctccaggcccctcggtgggtgttcaaggaggaagaccctattcacctgaggtgtcacagctggaagaacactgctctgcataaggtcacatatttacagaatggcaaagacaggaagtattttcatcataattctgacttccacattccaaaagccacactcaaagatagcggctcctacttctgcagggggcttgttgggagtaaaaatgtgtcttcagagactgtgaacatcaccatcactcaaggtttggcagtgtcaaccatctcatcattctctccacctgggtaccaagtctctttctgcttggtgatggtactcctttttgcagtggacacaggactatatttctctgtgaagacaaacatttgaagctcaacaagagactggaaggaccataaacttaaatggagaaaggaccctcaagacaaatgacccccatcccatgggagtaataagagcagtggcagcagcatctctgaacatttctctggatttgcaaccccatcatcctcaggcctctctacaagcagcaggaaacatagaactcagagccagatcctttatccaactctcgatttttccttggtctccagtggaagggaaaagcccatgatcttcaagcagggaagccccagtgagtagctgcattcctagaaattgaagtttcagagctacacaaacactttttctgtcccaaccattccctcacagcaaagcaacaatacaggctagggatggtaatcctttaaacatacaaaaattgctcgtattataaattacccagtttagagggaaaaaaagaaaataattattcctaaacaaatggataagtagaattaatggttgaggcaggaccctacagagtgtgggaactgctggggatctagagaattcagtgggaccaatgaaagcatggctgagaaatagcagggtagtccaggatagtctaagggaggtgttcccatctgagcccagagataagggtgtcttcctagaacattagccgtagtggaattaacaggaaatcatgagggtgacgtagaattgagtcttccaggggactctatcagaactggaccatttccaagtatataacgatgagccctctaatgctaggagtagcaaatggtcctaggaaggggactgaggattggggtgggggtggggtggaaaagaaagtacagaacaaaccctgtgtcactgtcccaagttaagctaagtgaacagaactatctcagcatcagaatgagaaagcctgagaagaaagaaccaaccacaagcacacaggaaggaaagcgcaggaggtgaaaatgctttcttggccagggtagtaagaattagaggttaatgcagggactgtaaaaccaccttttctgcttcaatgtctagttcctgtatagctttgttcattgcatttattaaacaaatgttgtataaccaatactaaatgtactactgagcttcactgagttacgctgtgaaactttcaaatccttcttcatgtcagttccaatgaggtggggatggagaagacaattgttgcttatgaaagaaagctttagctgtctctgttttgtaagctttcagtgcaacatttcttggttccaataaagcattttacaagatcttgcatgctactcttagatagaagatggcaaaaccatggtaataaaatatgaatgataaaaaaaaa

SEQ ID NO: 155 - protein, 233 aa, Homo sapiens
MWQLLLPTALLLLVSAGMRTEDLPKAVVFLEPQWYSVLEKDSVTLKCQGAYSPEDNSTQWFHNENLISSQASSYFIDAATVNDSGEYRCQTNLSTLSDPVQLEVHIGWLLLQAPRWVFKEEDPIHLRCHSWKNTALHKVTYLQNGKDRKYFHHNSDFHIPKATLKDSGSYFCRGLVGSKNVSSETVNITITQGLAVSTISSFSPPGYQVSFCLVMVLLFAVDTGLYFSVKTNI

SEQ ID NO: 156 - DNA, 1573 bp, Homo sapiens
agaatttgtttgccctctagggtagaatccgccaagctttgagagaaggctgtgactgctgtgctctgggcgccagctcgctccagggagtgatgggaatcctgtcattcttacctgtccttgccactgagagtgactgggctgactgcaagtccccccagccttggggtcatatgcttctgtggacagctgtgctattcctggctcctgttgctgggacacctgctcccccaaaggctgtgctgaaactcgagccccagtggatcaacgtgctccaggaggactctgtgactctgacatgccgggggactcacagccctgagagcgactccattcagtggttccacaatgggaatctcattcccacccacacgcagcccagctacaggttcaaggccaacaacaatgacagcggggagtacacgtgccagactggccagaccagcctcagcgaccctgtgcatctgactgtgctttctgagtggctggtgctccagacccctcacctggagttccaggagggagaaaccatcgtgctgaggtgccacagctggaaggacaagcctctggtcaaggtcacattcttccagaatggaaaatccaagaaattttcccgttcggatcccaacttctccatcccacaagcaaaccacagtcacagtggtgattaccactgcacaggaaacataggctacacgctgtactcatccaagcctgtgaccatcactgtccaagctcccagctcttcaccgatggggatcattgtggctgtggtcactgggattgctgtagcggccattgttgctgctgtagtggccttgatctactgcaggaaaaagcggatttcagccaatcccactaatcctgatgaggctgacaaagttggggctgagaacacaatcacctattcacttctcatgcacccggatgctctggaagagcctgatgaccagaaccgtatttagtctccattgtcttgcattgggatttgagaagaaaatcagagagggaagatctggtatttcctggcctaaattccccttggggaggacagggagatgctgcagttccaaaagagaaggtttcttccagagtcatctacctgagtcctgaagctccctgtcctgaaagccacagacaatatggtcccaaatgaccgactgcaccttctgtgcttcagctcttcttgacatcaaggctcttccgttccacatccacacagccaatccaattaatcaaaccactgttattaacagataatagcaacttgggaaatgcttatgttacaggttacgtgagaacaatcatgtaaatctatatgatttcagaaatgttaaaatagactaacctctaccagcacattaaaagtgattgtttctgggtgataaaattattgatgatttttattttctttatttttctataaagatcatatattacttttataataaaacattataaaaacaacattctgtttaccttttcaaggctgtattggttggagtgtagactgaactgcctggggtctgtttctcttcagtgatgagactcttaggaaggcaggaatggatag

SEQ ID NO: 157 - protein, 290 aa, Homo sapiens
MGILSFLPVLATESDWADCKSPQPWGHMLLWTAVLFLAPVAGTPAPPKAVLKLEPQWINVLQEDSVTLTCRGTHSPESDSIQWFHNGNLIPTHTQPSYRFKANNNDSGEYTCQTGQTSLSDPVHLTVLSEWLVLQTPHLEFQEGETIVLRCHSWKDKPLVKVTFFQNGKSKKFSRSDPNFSIPQANHSHSGDYHCTGNIGYTLYSSKPVTITVQAPSSSPMGIIVAVVTGIAVAAIVAAVVALIYCRKKRISANPTNPDEADKVGAENTITYSLLMHPDALEEPDDQNRI

SEQ ID NO: 158 - DNA, 1576 bp, Homo sapiens
agaatttgtttgccctctagggtagaatccgccaagctttgagagaaggctgtgactgctgtgctctgggcgccagctcgctccagggagtgatgggaatcctgtcattcttacctgtccttgccactgagagtgactgggctgactgcaagtccccccagccttggggtcatatgcttctgtggacagctgtgctattcctggctcctgttgctgggacacctgcagctcccccaaaggctgtgctgaaactcgagccccagtggatcaacgtgctccaggaggactctgtgactctgacatgccgggggactcacagccctgagagcgactccattcagtggttccacaatgggaatctcattcccacccacacgcagcccagctacaggttcaaggccaacaacaatgacagcggggagtacacgtgccagactggccagaccagcctcagcgaccctgtgcatctgactgtgctttctgagtggctggtgctccagacccctcacctggagttccaggagggagaaaccatcgtgctgaggtgccacagctggaaggacaagcctctggtcaaggtcacattcttccagaatggaaaatccaagaaattttcccgttcggatcccaacttctccatcccacaagcaaaccacagtcacagtggtgattaccactgcacaggaaacataggctacacgctgtactcatccaagcctgtgaccatcactgtccaagctcccagctcttcaccgatggggatcattgtggctgtggtcactgggattgctgtagcggccattgttgctgctgtagtggccttgatctactgcaggaaaaagcggatttcagccaatcccactaatcctgatgaggctgacaaagttggggctgagaacacaatcacctattcacttctcatgcacccggatgctctggaagagcctgatgaccagaaccgtatttagtctccattgtcttgcattgggatttgagaagaaaatcagagagggaagatctggtatttcctggcctaaattccccttggggaggacagggagatgctgcagttccaaaagagaaggtttcttccagagtcatctacctgagtcctgaagctccctgtcctgaaagccacagacaatatggtcccaaatgaccgactgcaccttctgtgcttcagctcttcttgacatcaaggctcttccgttccacatccacacagccaatccaattaatcaaaccactgttattaacagataatagcaacttgggaaatgcttatgttacaggttacgtgagaacaatcatgtaaatctatatgatttcagaaatgttaaaatagactaacctctaccagcacattaaaagtgattgtttctgggtgataaaattattgatgatttttattttctttatttttctataaagatcatatattacttttataataaaacattataaaaacaacattctgtttaccttttcaaggctgtattggttggagtgtagactgaactgcctggggtctgtttctcttcagtgatgagactcttaggaaggcaggaatggatag

SEQ ID NO: 159 - protein, 291 aa, Homo sapiens
MGILSFLPVLATESDWADCKSPQPWGHMLLWTAVLFLAPVAGTPAAPPKAVLKLEPQWINVLQEDSVTLTCRGTHSPESDSIQWFHNGNLIPTHTQPSYRFKANNNDSGEYTCQTGQTSLSDPVHLTVLSEWLVLQTPHLEFQEGETIVLRCHSWKDKPLVKVTFFQNGKSKKFSRSDPNFSIPQANHSHSGDYHCTGNIGYTLYSSKPVTITVQAPSSSPMGIIVAVVTGIAVAAIVAAVVALIYCRKKRISANPTNPDEADKVGAENTITYSLLMHPDALEEPDDQNRI

SEQ ID NO: 160 - DNA, 1630 bp, Homo sapiens
agaatttgtttgccctctagggtagaatccgccaagctttgagagaaggctgtgactgctgtgctctgggcgccagctcgctccagggagtgatgggaatcctgtcattcttacctgtccttgccactgagagtgactgggctgactgcaagtccccccagccttggggtcatatgcttctgtggacagctgtgctattcctggctcctgttgctgggacacctgctcccccaaaggctgtgctgaaactcgagccccagtggatcaacgtgctccaggaggactctgtgactctgacatgccgggggactcacagccctgagagcgactccattcagtggttccacaatgggaatctcattcccacccacacgcagcccagctacaggttcaaggccaacaacaatgacagcggggagtacacgtgccagactggccagaccagcctcagcgaccctgtgcatctgactgtgctttctgagtggctggtgctccagacccctcacctggagttccaggagggagaaaccatcgtgctgaggtgccacagctggaaggacaagcctctggtcaaggtcacattcttccagaatggaaaatccaagaaattttcccgttcggatcccaacttctccatcccacaagcaaaccacagtcacagtggtgattaccactgcacaggaaacataggctacacgctgtactcatccaagcctgtgaccatcactgtccaagctcccagctcttcaccgatggggatcattgtggctgtggtcactgggattgctgtagcggccattgttgctgctgtagtggccttgatctactgcaggaaaaagcggatttcagctctcccaggataccctgagtgcagggaaatgggagagaccctccctgagaaaccagccaatcccactaatcctgatgaggctgacaaagttggggctgagaacacaatcacctattcacttctcatgcacccggatgctctggaagagcctgatgaccagaaccgtatttagtctccattgtcttgcattgggatttgagaagaaaatcagagagggaagatctggtatttcctggcctaaattccccttggggaggacagggagatgctgcagttccaaaagagaaggtttcttccagagtcatctacctgagtcctgaagctccctgtcctgaaagccacagacaatatggtcccaaatgaccgactgcaccttctgtgcttcagctcttcttgacatcaaggctcttccgttccacatccacacagccaatccaattaatcaaaccactgttattaacagataatagcaacttgggaaatgcttatgttacaggttacgtgagaacaatcatgtaaatctatatgatttcagaaatgttaaaatagactaacctctaccagcacattaaaagtgattgtttctgggtgataaaattattgatgatttttattttctttatttttctataaagatcatatattacttttataataaaacattataaaaacaacattctgtttaccttttcaaggctgtattggttggagtgtagactgaactgcctggggtctgtttctcttcagtgatgagactcttaggaaggcaggaatggatag

SEQ ID NO: 161 - protein, 309 aa, Homo sapiens
MGILSFLPVLATESDWADCKSPQPWGHMLLWTAVLFLAPVAGTPAPPKAVLKLEPQWINVLQEDSVTLTCRGTHSPESDSIQWFHNGNLIPTHTQPSYRFKANNNDSGEYTCQTGQTSLSDPVHLTVLSEWLVLQTPHLEFQEGETIVLRCHSWKDKPLVKVTFFQNGKSKKFSRSDPNFSIPQANHSHSGDYHCTGNIGYTLYSSKPVTITVQAPSSSPMGIIVAVVTGIAVAAIVAAVVALIYCRKKRISALPGYPECREMGETLPEKPANPTNPDEADKVGAENTITYSLLMHPDALEEPDDQNRI

SEQ ID NO: 162 - DNA, 1633 bp, Homo sapiens
agaatttgtttgccctctagggtagaatccgccaagctttgagagaaggctgtgactgctgtgctctgggcgccagctcgctccagggagtgatgggaatcctgtcattcttacctgtccttgccactgagagtgactgggctgactgcaagtccccccagccttggggtcatatgcttctgtggacagctgtgctattcctggctcctgttgctgggacacctgcagctcccccaaaggctgtgctgaaactcgagccccagtggatcaacgtgctccaggaggactctgtgactctgacatgccgggggactcacagccctgagagcgactccattcagtggttccacaatgggaatctcattcccacccacacgcagcccagctacaggttcaaggccaacaacaatgacagcggggagtacacgtgccagactggccagaccagcctcagcgaccctgtgcatctgactgtgctttctgagtggctggtgctccagacccctcacctggagttccaggagggagaaaccatcgtgctgaggtgccacagctggaaggacaagcctctggtcaaggtcacattcttccagaatggaaaatccaagaaattttcccgttcggatcccaacttctccatcccacaagcaaaccacagtcacagtggtgattaccactgcacaggaaacataggctacacgctgtactcatccaagcctgtgaccatcactgtccaagctcccagctcttcaccgatggggatcattgtggctgtggtcactgggattgctgtagcggccattgttgctgctgtagtggccttgatctactgcaggaaaaagcggatttcagctctcccaggataccctgagtgcagggaaatgggagagaccctccctgagaaaccagccaatcccactaatcctgatgaggctgacaaagttggggctgagaacacaatcacctattcacttctcatgcacccggatgctctggaagagcctgatgaccagaaccgtatttagtctccattgtcttgcattgggatttgagaagaaaatcagagagggaagatctggtatttcctggcctaaattccccttggggaggacagggagatgctgcagttccaaaagagaaggtttcttccagagtcatctacctgagtcctgaagctccctgtcctgaaagccacagacaatatggtcccaaatgaccgactgcaccttctgtgcttcagctcttcttgacatcaaggctcttccgttccacatccacacagccaatccaattaatcaaaccactgttattaacagataatagcaacttgggaaatgcttatgttacaggttacgtgagaacaatcatgtaaatctatatgatttcagaaatgttaaaatagactaacctctaccagcacattaaaagtgattgtttctgggtgataaaattattgatgatttttattttctttatttttctataaagatcatatattacttttataataaaacattataaaaacaacattctgtttaccttttcaaggctgtattggttggagtgtagactgaactgcctggggtctgtttctcttcagtgatgagactcttaggaaggcaggaatggatag

SEQ ID NO: 163 - protein, 310 aa, Homo sapiens
MGILSFLPVLATESDWADCKSPQPWGHMLLWTAVLFLAPVAGTPAAPPKAVLKLEPQWINVLQEDSVTLTCRGTHSPESDSIQWFHNGNLIPTHTQPSYRFKANNNDSGEYTCQTGQTSLSDPVHLTVLSEWLVLQTPHLEFQEGETIVLRCHSWKDKPLVKVTFFQNGKSKKFSRSDPNFSIPQANHSHSGDYHCTGNIGYTLYSSKPVTITVQAPSSSPMGIIVAVVTGIAVAAIVAAVVALIYCRKKRISALPGYPECREMGETLPEKPANPTNPDEADKVGAENTITYSLLMHPDALEEPDDQNRI

SEQ ID NO: 164 - DNA, 1572 bp, Homo sapiens
ctcaatccctcgcgctcttcctttccaacttggacccggcagaatggctcccgcaaagaagggtggcaagaataaaagggccgttctgccatcaacgaggtggtgacccgagaatacaccatcaacattcacaagcacatccatggagtgggcttcaagaagtgtgcccctcgggcactcaaagagtttcggaaatttgccatgaaggagatgggaactccagatgcgcgcattgatatcaggctcaacaaagctgtctgggccaaaggaataagaatgtcccataccgaatccgtgtgcggctgtcccgaaaacgtaatgaggatgaagattcaccaaataagctctacactttggttacctatgtacctgttgccacttttgaaaatctacagtcaatgtggatgagaactaatcgctgatcgtcaaatacatcaaataaagttataaaattgccttcaaaaaaaaaaagacataggttctcgttggatatgtagaaatcgcagattgaagagtttaattatttggctaacaacagttacagaaatgtatgctacaatgtgtttgacaagtcttaagtaatcttgttgagataacaatttgtataatttaaattatctgttgaaattgtggttttcagcaaaaatagaaaaattaaggaacatttcattccagtgggcacaggagtacagtaaacagagagactagtgtggtagggaaaatatatacttttttttgtattattcaagactaagaatgttacaaaatagaagagattacaatgtacaagattgcaaacagaaggaagatgtgatcaaacaatcaaaaactaattctgtgaaaagaccaataaaaaagacttctgacaagcctaattaagataaacagagatataaagatgtctcttttatttaaccatttaacattatttttgtctaatatctaagaagtaacattgggataaccacaaatcttggtcatgttgttatagaaaattgggtaatagggaattgagtttatttccctaaagaaaggaatgctaatgaaaagcaagataattttcctggaagatcttagaaaaagtccaggaatttggaggaatcatgtacaacaaaatatatggttaaagaatgattctaaaaatgagaggataattgtaaactctgtataaggagaagttagactcttagggcctctctcctacccagggtgactatttgcaggtgactaatttttccctgtcatagtttaattctcaggagaaattgacccagccagcagctgcaggtgaattcaggtgagttgagtgagtatgaggtgaggcattatggcctccactatatcacctgcaaaccctttctcaggatgccctggcaaacatgctgcagccacacaaggaagaaaccaagaaataggaagacataagattcaggaaacaggatttcatataaaagatagagaagtcctaggacaacagctgtgcaagaggtccagagatcaaatgaccgaaaacagtgtcaaaaaaggagggacatcttgctaatggaaaaaaaaaaaaaaaaaaaaaaaaaa

SEQ ID NO: 165 - DNA, 748 bp, Homo sapiens
catgacattgcatccttcacccatcacttgtgaatttttgttttccacagctctcatttctccaaaaatgtgtttgagccacttggaaaatatgcctttaagccattcaagaactcaaggagctcagagatcatcctggaagctgtggctcttttgctcaatagttatgttgctatttctttgctccttcagttggctaatctttatttttctccaattagagactgctaaggagccctgtatggctaagtttggaccattaccctcaaaatggcaaatggcatcttctgaacctccttgcgtgaataaggtgtctgactggaagctggagatacttcagaatggcttatatttaatttatggccaagtggctcccaatgcaaactacaatgatgtagctccttttgaggtgcggctgtataaaaacaaagacatgatacaaactctaacaaacaaatctaaaatccaaaatgtaggagggacttatgaattgcatgttggggacaccatagacttgatattcaactctgagcatcaggttctaaaaaataatacatactggggtatcattttactagcaaatccccaattcatctcctagagacttgatttgatctcctcattcccttcagcacatgtagaggtgccagtgggtggattggagggagaagatattcaatttctagagtttgtctgtctacaaaaatcaacacaaacagaactcctctgcacgtgaattttcatctat

SEQ ID NO: 166 - protein, 199 aa, Homo sapiens
MTLHPSPITCEFLFSTALISPKMCLSHLENMPLSHSRTQGAQRSSWKLWLFCSIVMLLFLCSFSWLIFIFLQLETAKEPCMAKFGPLPSKWQMASSEPPCVNKVSDWKLEILQNGLYLIYGQVAPNANYNDVAPFEVRLYKNKDMIQTLTNKSKIQNVGGTYELHVGDTIDLIFNSEHQVLKNNTYWGIILLANPQFIS

SEQ ID NO: 167 - DNA, 1291 bp, Homo sapiens
atggagaaattattaacacactgccctcctaccatccaccatggccctgctgcactcctctccgggattaccgcagccttccacccaggccttgctgctgcagcctctgccagagccagctcctggtggacccatgtggaaatgggacctccagatcccatcctgggagtcactgaagcctttaagagggacatcaatagcaaaaagatgaatctgggagttgggatgataatgggaagccgtacatgctgcctagcgtgctcaaggcagaggcccagattgctgcaaaaaatgtggacaaggaatccctgccagttgggggactggctgaattttgcaaggcatctgtagaaccaaccctgggtgaaaacagcaaagtcttgaaaagtggccagtttgtcactgtgcagaccatttctggaactggggccttaaggatcggagccagttttctctaaagatattttaagttcagctgagatgtctttctaccgaaaccaagctgggtaaatcacacacccatcttcagggacgctggcatgcagctacaatgttatcggtattatgaccccaagatttgcagttttgacttcacgggcgctgtggatgacttttaaaacatactagagcaaagtgttcttctcctgcatgcctgcacccacgcccagaatagtggaaggaaatagcaacagttgtgaagaaaaggaatctctttgcgctctttgacatggcctaccaaggctttgccagtggtgatggtgataaggatgcctgggctctgcaccacttcatcgaacagggcattaatgtttgtctctgccaatcatatgccaagaacatgggcttatatggtgagcatgtaggagccttcactgtggtctgcaaagatgcagatgaagccaaaagggtagagtcacagttgaagatcttgattagtcccatgtattccaactctcccctcaatggggcccagattgcttctaccattccaaacaccccaggtttgtgaaaacaatggttgtaagaagtgaaaggcatggccgactgcatcattagcatgcggactcagctggtcttcaacctcaagaagaagggttccactcacaactggcaacacatcactgaccaaattggcatgtcttgtttcacagagctaaagcctgaacaggtggggtggctgaccaaggagttctccatctacatggcaaaggacggccgcatctctgtggcagggataacctccagcaacatgggctaccttgcccatgccattcaccaggtcaccaagtaa

SEQ ID NO: 168 - DNA, 3510 bp, Homo sapiens
tcaatcgccttttatctctggccctgggacctttgcctattttctgattgataggctttgttttgtctttacctccttctttctggggaaaacttcagttttatcgcacgttccccttttccatatcttcatcttccctctacccagattgtgaagatggaaagggtccaacccctggaagagaatgtgggaaatgcagccaggccaagattcgagaggaacaagctattgctggtggcctctgtaattcagggactggggctgctcctgtgcttcacctacatctgcctgcacttctctgctcttcaggtatcacatcggtatcctcgaattcaaagtatcaaagtacaatttaccgaatataagaaggagaaaggtttcatcctcacttcccaaaaggaggatgaaatcatgaaggtgcagaacaactcagtcatcatcaactgtgatgggttttatctcatctccctgaagggctacttctcccaggaagtcaacattagccttcattaccagaaggatgaggagcccctcttccaactgaagaaggtcaggtctgtcaactccttgatggtggcctctctgacttacaaagacaaagtctacttgaatgtgaccactgacaatacctccctggatgacttccatgtgaatggcggagaactgattcttatccatcaaaatcctggtgaattctgtgtcctttgaggggctgatggcaatatctaaaaccaggcaccagcatgaacaccaagctgggggtggacagggcatggattcttcattgcaagtgaaggagcctcccagctcagccacgtgggatgtgacaagaagcagatcctggccctcccgcccccacccctcagggatatttaaaacttattttatataccagttaatcttatttatccttatattttctaaattgcctagccgtcacaccccaagattgccttgagcctactaggcacctttgtgagaaagaaaaaatagatgcctcttcttcaagatgcattgtttctattggtcaggcaattgtcataataaacttatgtcattgaaaacggtacctgactaccatttgctggaaatttgacatgtgtgtggcattatcaaaatgaagaggagcaaggagtgaaggagtggggttatgaatctgccaaaggtggtatgaaccaacccctggaagccaaagcggcctctccaaggttaaattgattgcagtttgcatattgcctaaatttaaactttctcatttggtgggggttcaaaagaagaatcagcttgtgaaaaatcaggacttgaagagagccgtctaagaaataccacgtgctttttttctttaccattttgctttcccagcctccaaacatagttaatagaaatttcccttcaaagaactgtctggggatgtgatgctttgaaaaatctaatcagtgacttaagagagattttcttgtatacagggagagtgagataacttattgtgaagggttagctttactgtacaggatagcagggaactggacatctcagggtaaaagtcagtacggattttaatagcctggggaggaaaacacattctttgccacagacaggcaaagcaacacatgctcatcctcctgcctatgctgagatacgcactcagctccatgtcttgtacacacagaaacattgctggtttcaagaaatgaggtgatcctattatcaaattcaatctgatgtcaaatagcactaagaagttattgtgccttatgaaaaataatgatctctgtctagaaataccatagaccatatatagtctcacattgataattgaaactagaagggtctaatatcagcctatgccagggcttcaatggaatagtatccccttatgtttagttgaaatgtccccttaacttgatataatgtgttatgcttatggcgctgtggacaatctgatttttcatgtcaactttccagatgatttgtaacttctctgtgccaaaccttttataaacataaatttttgagatatgtattttaaaattgtagcacatgtttccctgacattttcaatagaggatacaacatcacagaatctttctggatgattctgtgttatcaaggaattgtactgtgctacaattatctctagaatctccagaaaggtggagggctgttcgcccttacactaaatggtctcagttggatttttttttcctgttttctatttcctcttaagtacaccttcaactatattcccatccctctattttaatctgttatgaaggaaggtaaataaaaatgctaaatagaagaaattgtaggtaaggtaagaggaatcaagttctgagtggctgccaaggcactcacagaatcataatcatggctaaatatttatggagggcctactgtggaccaggcactgggctaaatacttacatttacaagaatcattctgagacagatattcaatgatatctggcttcactactcagaagattgtgtgtgtgtttgtgtgtgtgtgtgtgtgtgtatttcactttttgttattgaccatgttctgcaaaattgcagttactcagtgagtgatatccgaaaaagtaaacgtttatgactataggtaatatttaagaaaatgcatggttcatttttaagtttggaatttttatctatatttctcacagatgtgcagtgcacatgcaggcctaagtatatgttgtgtgtgttgtttgtctttgatgtcatggtcccctctcttaggtgctcactcgctttgggtgcacctggcctgctcttcccatgttggcctctgcaaccacacagggatatttctgctatgcaccagcctcactccaccttccttccatcaaaaatatgtgtgtgtgtctcagtccctgtaagtcatgtccttcacagggagaattaacccttcgatatacatggcagagttttgtgggaaaagaattgaatgaaaagtcaggagatcagaattttaaatttgacttagccactaactagccatgtaaccttgggaaagtcatttcccatttctgggtcttgcttttctttctgttaaatgagaggaatgttaaatatctaacagtttagaatcttatgcttacagtgttatctgtgaatgcacatattaaatgtctatgttcttgttgctatgagtcaaggagtgtaaccttctcctttactatgttgaatgtatttttttctggacaagcttacatcttcctcagccatctttgtgagtccttcaagagcagttatcaattgttagttagatattttctatttagagaatgcttaagggattccaatcccgatccaaatcataatttgttcttaagtatactgggcaggtcccctattttaagtcataattttgtatttagtgctttcctggctctcagagagtattaatattgatattaataatatagttaatagtaatattgctatttacatggaaacaaataaaagatctcagaattcactaaaaaaaaaaaaaaaaaa

SEQ ID NO: 169 - protein, 183 aa, Homo sapiens
MERVQPLEENVGNAARPRFERNKLLLVASVIQGLGLLLCFTYICLHFSALQVSHRYPRIQSIKVQFTEYKKEKGFILTSQKEDEIMKVQNNSVIINCDGFYLISLKGYFSQEVNISLHYQKDEEPLFQLKKVRSVNSLMVASLTYKDKVYLNVTTDNTSLDDFHVNGGELILIHQNPGEFCVL

SEQ ID NO: 170 - DNA, 1791 bp, Homo sapiens
cccagaaattctacccaagctccctcagcaccatgtaccgagcacttcggctcctcgcgcgctcgcgtcccctcgtgcgggctccagccgcagccttagcttcggctcccggcttgggtggcgcggccgtgccctcgttttggcctccgaacgcggctcgaatggcaagccaaaattccttccggatagaatatgatacctttggtgaactaaaggtgccaaatgataagtattatggcgcccagaccgtgagatctacgatgaactttaagattggaggtgtgacagaacgcatgccaaccccagttattaaagcttttggcatcttgaagcgagcggccgctgaagtaaaccaggattatggtcttgatccaaagattgctaatgcaataatgaaggcagcagatgaggtagctgaaggtaaattaaatgatcattttcctctcgtggtatggcagactggatcaggaactcagacaaatatgaatgtaaatgaagtcattagcaatagagcaattgaaatgttaggaggtgaacttggcagcaagatacctgtgcatcccaacgatcatgttaataaaagccagagctcaaatgatacttttcccacagcaatgcacattgctgctgcaatagaagttcatgaagtactgttaccaggactacagaagttacatgatgctcttgatgcaaaatccaaagagtttgcacagatcatcaagattggacgtactcatactcaggatgctgttccacttactcttgggcaggaatttagtggttatgttcaacaagtaaaatatgcaatgacaagaataaaagctgccatgccaagaatctatgagctcgcagctggaggcactgctgttggtacaggtttaaatactagaattggctttgcagaaaaggttgctgcaaaagtggctgcacttacaggcttgccttttgtcactgctccgaataaatttgaagctctggctgctcatgacgctctggttgagctcagtggagccatgaacactactgcctgcagtctgatgaagatagcaaatgatattcgatttttgggttctggtcctcggtcaggtctgggagaattgatcttgcctgaaaatgaaccaggaagcagtatcatgccaggcaaggtgaaccctactcagtgtgaagcaatgaccatggttgcagcccaagtcatggggaaccatgttgctgtcactgtcggaggcagcaatggacattttgagttgaatgttttcaagccaatgatgattaaaaatgtgttacactcagccaggctgctgggggatgcttcagtttcctttacagaaaactgcgtggtgggaatccaggccaatacagaaaggatcaacaagctgatgaatgagtctctaatgttggtgacagctctcaatcctcatatagggtatgacaaggcagcaaagattgctaagacagcacacaaaaatggatcaaccttaaaggaaactgctatcgaacttggctatctcacagcagagcagtttgacgaatgggtaaaacctaaggacatgctgggtccaaagtgatttacataaatttataatgaaaataaacatgtataaaatttaaaaaaacagactcccatttcttaaaaacggataagtttgaaaggaaactgctattgaacttaagcatctctagcagagcaatttgatcagtatataaaaccctaggatgtgctaggtctaagatggattaaacaagtataaaataaaatacatttataaaataaaaaggaaaacagacttaaaa

SEQ ID NO: 171 - protein, 510 aa, Homo sapiens
MYRALRLLARSRPLVRAPAAALASAPGLGGAAVPSFWPPNAARMASQNSFRIEYDTFGELKVPNDKYYGAQTVRSTMNFKIGGVTERMPTPVIKAFGILKRAAAEVNQDYGLDPKIANAIMKAADEVAEGKLNDHFPLVVWQTGSGTQTNMNVNEVISNRAIEMLGGELGSKIPVHPNDHVNKSQSSNDTFPTAMHIAAAIEVHEVLLPGLQKLHDALDAKSKEFAQIIKIGRTHTQDAVPLTLGQEFSGYVQQVKYAMTRIKAAMPRIYELAAGGTAVGTGLNTRIGFAEKVAAKVAALTGLPFVTAPNKFEALAAHDALVELSGAMNTTACSLMKIANDIRFLGSGPRSGLGELILPENEPGSSIMPGKVNPTQCEAMTMVAAQVMGNHVAVTVGGSNGHFELNVFKPMMIKNVLHSARLLGDASVSFTENCVVGIQANTERINKLMNESLMLVTALNPHIGYDKAAKIAKTAHKNGSTLKETAIELGYLTAEQFDEWVKPKDMLGPK

SEQ ID NO: 172 - DNA, 4992 bp, Homo sapiens
cagaagcaacaataattgtgaaaaatacttcagcagttatggactcatctgtcattcaaaggaaaaaagtagctgtcattggtggtggcttggttggctcattacaagcatgctttcttgcaaagaggaatttccagattgatgtatatgaagctagggaagatactcgagtggctaccttcacacgtggaagaagcattaacttagccctttctcatagaggacgacaagccttgaaagctgttggcctggaagatcagattgtatcccaaggtattcccatgagagcaagaatgatccactctctttcaggaaaaaagtctgcaattccctatgggacaaagtctcagtatattctttctgtaagcagagaaaatctaaacaaggatctattgactgctgctgagaaataccccaatgtgaaaatgcactttaaccacaggctgttgaaatgtaatccagaggaaggaatgatcacagtgcttggatctgacaaagttcccaaagatgtcacttgtgacctcattgtaggatgtgatggagcctattcaactgtcagatctcacctgatgaagaaacctcgctttgattacagtcagcagtacattcctcatgggtacatggagttgactattccacctaagaacggagattatgccatggaacctaattatctgcatatttggcctagaaatacctttatgatgattgcacttcctaacatgaacaaatcattcacatgtactttgttcatgccctttgaagagtttgaaaaacttctaaccagtaatgatgtggtagatttcttccagaaatactttccggatgccatccctctaattggagagaaactcctagtgcaagatttcttcctgttgcctgcccagcccatgatatctgtaaagtgctcttcatttcactttaaatctcactgtgtactgctgggagatgcagctcatgctatagtgccgttttttgggcaaggaatgaatgcgggctttgaagactgcttggtatttgatgagttaatggataaattcagtaacgaccttagtttgtgtcttcctgtgttctcaagattgagaatcccagatgatcacgcgatttcagacctatccatgtacaattacatagagatgcgagcacatgtcaactcaagctggttcatttttcagaagaacatggagagatttcttcatgcgattatgccatcgacctttatccctctctatacaatggtcactttttccagaataagataccatgaggctgtgcagcgttggcattggcaaaaaaaggtgataaacaaaggactctttttcttgggatcactgatagccatcagcagtacctacctacttatacactacatgtcaccacgatctttcctctgcttgagaagaccatggaactggatagctcacttccggaatacaacatgtttccccgcaaaggccgtggactccctagaacaaatttccaatctcattagcaggtgatagaaaggttttgtggtagcaaatgcatgatttctctgtgaccaaaattaagcatgaaaaaaatgtttccattgccatatttgattcactagtggaagatagtgttctgcttataattaaactgaatgtagagtatctctgtatgttaattgcaattactggttggggggtgcattttaaaagatgaaacatgcagcttccctacattacacacactcaggttgagtcattctaactataaaagtgcaatgactaagatccttcacttctctgaaagtaaggccctagatgcctcagggaagacagtaatcatgccttttctttaaaagacacaataggactcgcaacagcattgactcaacacctaggactaaaaatcacaacttaactagcatgttaactgcacttttcattacgtgaatggaacttacctaaccacagggctcagacttactagataaaaccagaaatggaaataaggaattcaggggagttccagagacttacaaaatgaactcattttattttcccaccttcaaatataagtattatcatctatctgtttatcgtctatctatctatcatctatctatctatctatcatctatctatctatctatctatctatctatctatctatctatctatctatctctatttatttatgtatttagagatcaggtctcactctgttgaccaggctggagtgcagtggtgagatctgggttcactgcaacctctgcctcctgggctcaagcaatcctcccacttcagcctcccaaatagctggggctaccatggtatttttcagtagagaccgggtcttgccatgctgcccaggccagtctcaaactcctggcctcatgtgatctgcccacctcagcctcccaaagtacagggattagagttgtgagccaccgctgccagcccagagttaccctctaaagataagaaaaaggctattaatatcatactaagtgaaggacaggaaagggttttattcataaattaaatgtctacatgtgccagaatggaaaggaaacaaggggagacaacttttatagaaatacaaagccattactttattcaatttcagaccctcagaagcaatttactaatttattcttcgactacatactgcagcagaaccagcaatacacttgatttttaaaagcacatttagtgaaatgttttctttggttcatccttctttaacaggctgctgagtcactcagaaatccttcaaacatgattaattatgaagatgaaacactagagtcatataagaaataaaaattgggcaataaaataaaatgattcagtgtttcttttctatattgtcaatgaaaaccttgagttctaataatccatgttcagtttgtagggaaagaaaaaataatttttccttctacccactttaggttccttggctggggcccctataacaaaagacagattgacaagagaaaaacaaacataaatttattagcgggtatatgtaatatatatgtgggaaatacaggggaatgagcaaatctcaaagagctggcgtcttagaactccctggcttatatagcatcgacaaagaacagtaaatttttagagaaacaacaaaacaaagaaaaagagctttgagtctgtaggggcagcaatttgggggaagcaaatatatgggagtttgccttgtagattcctctggtggtggtctccaggctgacaaggattcaaagttgtctctgaaactcctctttgtcatactgcacatataaaacgtcttttgtttccaacaagaggatttctttttcattctagaattatctccttgataacttgatcagatataggacatgacactgaatagagtccaacagtacaaaaaaaattcagtatgttctagctacttcacacatgtgtacgcgacagttatttttacagtaaggtattttcgagaaaaatgcattacgtgttttggaaaatagagtaatttaaaaaatatatttgaaatgaaaatctccaacacattagaagatgatgatgttagatgcccatcgtgtgccacaagtggttttttcattatgtaaagcacccgttgaattaaaagaatttgtttttgttcaacctcttcctgaggcccaagagcatatgggcaattcggatttcctgctggaccacaaggttctgttgatattacatagaaacgggtattccagacacttcttatgatgaaagtccaaaagtggcatccaatttaaggccccatctttcgttgccattcttcattcctacaaaggacgaacttggattacatcaactttggacccattggttttgtcgctgtcgtcaactgacagtgattcaccactggtgatgataaaaatgatggaagaagagttgaaagtcacttttttctttggcctgtccccatctttctgtgacatcacaatgggtctgatctgcatttcacttccagctgctggtaggtctttagcaggcctctggcacctcagcagtcggaggcacagaagctgcaaaagggatcttcgaaactgggcagagaaaaaataaagtggaatattaagtaaaagttgggcactaatctggattaacattcgaggaaatcagttgagctgatttaagttgttttttgtttgttagcaggtgtggatgtggggttatgtggtcatgctcagatctacctaaatcaccccagagctttatgtcttttattcattctaaatcttattaaccggaatatgtaggaccatttcaataccttgtaatcctccaagcttcaatctgcacacactttctatgagggcaggtacaactattaagagattttgaacattaagttagtccacaaatattcagtgggcatctactaggtgacagccactgtgctataattagagactttttactataagcatcaaaaacagataaggctcttcctggcagagtttacagcctggtgtacttgctaatgtctctttaattaggtgaagaattttttttttctatcgaaattactaatcagttggggaaaaaaatactatagcagacagcactaatgtcatcaacaaacattgttcttctccgtgtcctgggtacaacatcgaataatatttcttggcctcctttccgcttctcctctctgctgttcctctctacaagaacctgggaggccaacgcctaaagatcataatatcacaatggaaggaacctagattcctaaatgactgcataggacagatcccatctcctccacccaatacattattagactgaactgtgacctgaaatgagcaataaactctgtattaattcactgaaatgttggggttgcttgttatagtagtcggtccatcatgaccagtaaaacataaatcaaaagttaatgtaattgttatcccattatttagagcgaaataaatgttgaatatatggactttctcagattaggaaataccaattaaaaatataataaatagct

SEQ ID NO: 173 - protein, 486 aa, Homo sapiens
MDSSVIQRKKVAVIGGGLVGSLQACFLAKRNFQIDVYEAREDTRVATFTRGRSINLALSHRGRQALKAVGLEDQIVSQGIPMRARMIHSLSGKKSAIPYGTKSQYILSVSRENLNKDLLTAAEKYPNVKMHFNHRLLKCNPEEGMITVLGSDKVPKDVTCDLIVGCDGAYSTVRSHLMKKPRFDYSQQYIPHGYMELTIPPKNGDYAMEPNYLHIWPRNTFMMIALPNMNKSFTCTLFMPFEEFEKLLTSNDVVDFFQKYFPDAIPLIGEKLLVQDFFLLPAQPMISVKCSSFHFKSHCVLLGDAAHAIVPFFGQGMNAGFEDCLVFDELMDKFSNDLSLCLPVFSRLRIPDDHAISDLSMYNYIEMRAHVNSSWFIFQKNMERFLHAIMPSTFIPLYTMVTFSRIRYHEAVQRWHWQKKVINKGLFFLGSLIAISSTYLLIHYMSPRSFLCLRRPWNWIAHFRNTTCFPAKAVDSLEQISNLISR

SEQ ID NO: 174 - DNA, 3138 bp, Homo sapiens
cccgtgttctgcgttgccggccgtgggtgctctggccacagtgagttaggggcgtcggagcgggtttctccaaccgcaatcggctccgctcaaggggaggaggagagtcccttctcggaaggcctaaggaaacgtgtcgtctggaatgggcttgggggccacgcctgcacatctccgcgagacagagggataaagtgaagatggtgctgttattgttacctcgagtgccacatgcgacctctgagatatgtacacagtcattcttactatcgcactcagccattcttactacgctaaagaagaaataattattcgaggatatttgcctggcccagaagaaacttatgtaaatttcatgaactattatatccgttttcctcggagtgagagaaaactctttttagatatcatctgagaggtagttaatttggcaccatggggatacagggattgctacaatttatcaaagaagcttcagaacccatccatgtgaggaagtataaagggcaggtagtagctgtggatacatattgctggcttcacaaaggagctattgcttgtgctgaaaaactagccaaaggtgaacctactgataggtatgtaggattttgtatgaaatttgtaaatatgttactatctcatgggatcaagcctattctcgtatttgatggatgtactttaccttctaaaaaggaagtagagagatctagaagagaaagacgacaagccaatcttcttaagggaaagcaacttcttcgtgaggggaaagtctcggaagctcgagagtgtttcacccggtctatcaatatcacacatgccatggcccacaaagtaattaaagctgcccggtctcagggggtagattgcctcgtggctccctatgaagctgatgcgcagttggcctatcttaacaaagcgggaattgtgcaagccataattacagaggactcggatctcctagcttttggctgtaaaaaggtaattttaaagatggaccagtttggaaatggacttgaaattgatcaagctcggctaggaatgtgcagacagcttggggatgtattcacggaagagaagtttcgttacatgtgtattctttcaggttgtgactacctgtcatcactgcgtgggattggattagcaaaggcatgcaaagtcctaagactagccaataatccagatatagtaaaggttatcaagaaaattggacattatctcaagatgaatatcacggtaccagaggattacatcaacgggtttattcgggccaacaataccttcctctatcagctagtttttgatcccatcaaaaggaaacttattcctctgaacgcctatgaagatgatgttgatcctgaaacactaagctacgctgggcaatatgttgatgattccatagctcttcaaatagcacttggaaataaagatataaatacttttgaacagatcgatgactacaatccagacactgctatgcctgcccattcaagaagtcatagttgggatgacaaaacatgtcaaaagtcagctaatgttagcagcatttggcataggaattactctcccagaccagagtcgggtactgtttcagatgccccacaattgaaggaaaatccaagtactgtgggagtggaacgagtgattagtactaaagggttaaatctcccaaggaaatcatccattgtgaaaagaccaagaagtgcagagctgtcagaagatgacctgttgagtcagtattctctttcatttacgaagaagaccaagaaaaatagctctgaaggcaataaatcattgagcttttctgaagtgtttgtgcctgacctggtaaatggacctactaacaaaaagagtgtaagcactccacctaggacgagaaataaatttgcaacatttttacaaaggaaaaatgaagaaagtggtgcagttgtggttccagggaccagaagcaggtttttttgcagttcagattctactgactgtgtatcaaacaaagtgagcatccagcctctggatgaaactgctgtcacagataaagagaacaatctgcatgaatcagagtatggagaccaagaaggcaagagactggttgacacagatgtagcacgtaattcaagtgatgacattccgaataatcatattccaggtgatcatattccagacaaggcaacagtgtttacagatgaagagtcctactcttttgagagcagcaaatttacaaggaccatttcaccacccactttgggaacactaagaagttgttttagttggtctggaggtcttggagatttttcaagaacgccgagcccctctccaagcacagcattgcagcagttccgaagaaagagcgattcccccacctctttgcctgagaataatatgtctgatgtgtcgcagttaaagagcgaggagtccagtgacgatgagtctcatcccttacgagaaggggcatgttcttcacagtcccaggaaagtggagaattctcactgcagagttcaaatgcatcaaagctttctcagtgctctagtaaggactctgattcagaggaatctgattgcaatattaagttacttgacagtcaaagtgaccagacctccaagctatgtttatctcatttctcaaaaaaagacacacctctaaggaacaaggttcctgggctatataagtccagttctgcagactctctttctacaaccaagatcaaacctctaggacctgccagagccagtgggctgagcaagaagccggcaagcatccagaagagaaagcatcataatgccgagaacaagccggggttacagatcaaactcaatgagctctggaaaaactttggatttaaaaaattctgaaaagcttcctccttgtaagaaacccctgtccccagtcagagataacatccaactaactccagaagcggaagaggatatatttaacaaacctgaatgtggccgtgttcaaagagcaatattccagtaaatgcagactgctgcaaagcttttgcctgcaagagaatctgatcaatttgaagtccctgtttgggaatgaggcacttatcagcatgaagaattttttctcattctgtgccattttaaaaatagaatacattttgtatattaactttaaaaaaaaaaaaaaaaaaa

SEQ ID NO: 175 - protein, 803 aa, Homo sapiens
MGIQGLLQFIKEASEPIHVRKYKGQVVAVDTYCWLHKGAIACAEKLAKGEPTDRYVGFCMKFVNMLLSHGIKPILVFDGCTLPSKKEVERSRRERRQANLLKGKQLLREGKVSEARECFTRSINITHAMAHKVIKAARSQGVDCLVAPYEADAQLAYLNKAGIVQAIITEDSDLLAFGCKKVILKMDQFGNGLEIDQARLGMCRQLGDVFTEEKFRYMCILSGCDYLSSLRGIGLAKACKVLRLANNPDIVKVIKKIGHYLKMNITVPEDYINGFIRANNTFLYQLVFDPIKRKLIPLNAYEDDVDPETLSYAGQYVDDSIALQIALGNKDINTFEQIDDYNPDTAMPAHSRSHSWDDKTCQKSANVSSIWHRNYSPRPESGTVSDAPQLKENPSTVGVERVISTKGLNLPRKSSIVKRPRSAELSEDDLLSQYSLSFTKKTKKNSSEGNKSLSFSEVFVPDLVNGPTNKKSVSTPPRTRNKFATFLQRKNEESGAVVVPGTRSRFFCSSDSTDCVSNKVSIQPLDETAVTDKENNLHESEYGDQEGKRLVDTDVARNSSDDIPNNHIPGDHIPDKATVFTDEESYSFESSKFTRTISPPTLGTLRSCFSWSGGLGDFSRTPSPSPSTALQQFRRKSDSPTSLPENNMSDVSQLKSEESSDDESHPLREGACSSQSQESGEFSLQSSNASKLSQCSSKDSDSEESDCNIKLLDSQSDQTSKLCLSHFSKKDTPLRNKVPGLYKSSSADSLSTTKIKPLGPARASGLSKKPASIQKRKHHNAENKPGLQIKLNELWKNFGFKKF

SEQ ID NO: 176 - DNA, 3140 bp, Homo sapiens
cccgtgttctgcgttgccggccgtgggtgctctggccacagtgagttaggggcgtcggagcgggtttctccaaccgcaatcggctccgctcaaggggaggaggagagtcccttctcggaaggcctaaggaaacgtgtcgtctggaatgggcttgggggccacgcctgcacatctccgcgagacagagggataaagtgaagatggtgctgttattgttacctcgagtgccacatgcgacctctgagatatgtacacagtcattcttactatcgcactcagccattcttactacgctaaagaagaaataattattcgaggatatttgcctggcccagaagaaacttatgtaaatttcatgaactattatatccgttttcctcggagtgagagaaaactctttttagatatcatctgagaggtagttaatttggcaccatggggatacagggattgctacaatttatcaaagaagcttcagaacccatccatgtgaggaagtataaagggcaggtagtagctgtggatacatattgctggcttcacaaaggagctattgcttgtgctgaaaaactagccaaaggtgaacctactgataggtatgtaggattttgtatgaaatttgtaaatatgttactatctcatgggatcaagcctattctcgtatttgatggatgtactttaccttctaaaaaggaagtagagagatctagaagagaaagacgacaagccaatcttcttaagggaaagcaacttcttcgtgaggggaaagtctcggaagctcgagagtgtttcacccggtctatcaatatcacacatgccatggcccacaaagtaattaaagctgcccggtctcagggggtagattgcctcgtggctccctatgaagctgatgcgcagttggcctatcttaacaaagcgggaattgtgcaagccataattacagaggactcggatctcctagcttttggctgtaaaaaggtaattttaaagatggaccagtttggaaatggacttgaaattgatcaagctcggctaggaatgtgcagacagcttggggatgtattcacggaagagaagtttcgttacatgtgtattctttcaggttgtgactacctgtcatcactgcgtgggattggattagcaaaggcatgcaaagtcctaagactagccaataatccagatatagtaaaggttatcaagaaaattggacattatctcaagatgaatatcacggtaccagaggattacatcaacgggtttattcgggccaacaataccttcctctatcagctagtttttgatcccatcaaaaggaaacttattcctctgaacgcctatgaagatgatgttgatcctgaaacactaagctacgctgggcaatatgttgatgattccatagctcttcaaatagcacttggaaataaagatataaatacttttgaacagatcgatgactacaatccagacactgctatgcctgcccattcaagaagtcatagttgggatgacaaaacatgtcaaaagtcagctaatgttagcagcatttggcataggaattactctcccagaccagagtcgggtactgtttcagatgccccacaattgaaggaaaatccaagtactgtgggagtggaacgagtgattagtactaaagggttaaatctcccaaggaaatcatccattgtgaaaagaccaagaagtgcagagctgtcagaagatgacctgttgagtcagtattctctttcatttacgaagaagaccaagaaaaatagctctgaaggcaataaatcattgagcttttctgaagtgtttgtgcctgacctggtaaatggacctactaacaaaaagagtgtaagcactccacctaggacgagaaataaatttgcaacatttttacaaaggaaaaatgaagaaagtggtgcagttgtggttccagggaccagaagcaggtttttttgcagttcagattctactgactgtgtatcaaacaaagtgagcatccagcctctggatgaaactgctgtcacagataaagagaacaatctgcatgaatcagagtatggagaccaagaaggcaagagactggttgacacagatgtagcacgtaattcaagtgatgacattccgaataatcatattccaggtgatcatattccagacaaggcaacagtgtttacagatgaagagtcctactcttttgagagcagcaaatttacaaggaccatttcaccacccactttgggaacactaagaagttgttttagttggtctggaggtcttggagatttttcaagaacgccgagcccctctccaagcacagcattgcagcagttccgaagaaagagcgattcccccacctctttgcctgagaataatatgtctgatgtgtcgcagttaaagagcgaggagtccagtgacgatgagtctcatcccttacgagaaggggcatgttcttcacagtcccaggaaagtggagaattctcactgcagagttcaaatgcatcaaagctttctcagtgctctagtaaggactctgattcagaggaatctgattgcaatattaagttacttgacagtcaaagtgaccagacctccaagctatgtttatctcatttctcaaaaaaagacacacctctaaggaacaaggttcctgggctatataagtccagttctgcagactctctttctacaaccaagatcaaacctctaggacctgccagagccagtgggctgagcaagaagccggcaagcatccagaagagaaagcatcataatgccgagaacaagccggggttacagatcaaactcaatgagctctggaaaaactttggatttaaaaaagattctgaaaagcttcctccttgtaagaaacccctgtccccagtcagagataacatccaactaactccagaagcggaagaggatatatttaacaaacctgaatgtggccgtgttcaaagagcaatattccagtaaatgcagactgctgcaaagcttttgcctgcaagagaatctgatcaatttgaagtccctgtttgggaatgaggcacttatcagcatgaagaattttttctcattctgtgccattttaaaaatagaatacattttgtatattaactttaaaaaaaaaaaaaaaaaaa

SEQ ID NO: 177 - protein, 846 aa, Homo sapiens
MGIQGLLQFIKEASEPIHVRKYKGQVVAVDTYCWLHKGAIACAEKLAKGEPTDRYVGFCMKFVNMLLSHGIKPILVFDGCTLPSKKEVERSRRERRQANLLKGKQLLREGKVSEARECFTRSINITHAMAHKVIKAARSQGVDCLVAPYEADAQLAYLNKAGIVQAIITEDSDLLAFGCKKVILKMDQFGNGLEIDQARLGMCRQLGDVFTEEKFRYMCILSGCDYLSSLRGIGLAKACKVLRLANNPDIVKVIKKIGHYLKMNITVPEDYINGFIRANNTFLYQLVFDPIKRKLIPLNAYEDDVDPETLSYAGQYVDDSIALQIALGNKDINTFEQIDDYNPDTAMPAHSRSHSWDDKTCQKSANVSSIWHRNYSPRPESGTVSDAPQLKENPSTVGVERVISTKGLNLPRKSSIVKRPRSAELSEDDLLSQYSLSFTKKTKKNSSEGNKSLSFSEVFVPDLVNGPTNKKSVSTPPRTRNKFATFLQRKNEESGAVVVPGTRSRFFCSSDSTDCVSNKVSIQPLDETAVTDKENNLHESEYGDQEGKRLVDTDVARNSSDDIPNNHIPGDHIPDKATVFTDEESYSFESSKFTRTISPPTLGTLRSCFSWSGGLGDFSRTPSPSPSTALQQFRRKSDSPTSLPENNMSDVSQLKSEESSDDESHPLREGACSSQSQESGEFSLQSSNASKLSQCSSKDSDSEESDCNIKLLDSQSDQTSKLCLSHFSKKDTPLRNKVPGLYKSSSADSLSTTKIKPLGPARASGLSKKPASIQKRKHHNAENKPGLQIKLNELWKNFGFKKDSEKLPPCKKPLSPVRDNIQLTPEAEEDIFNKPECGRVQRAIFQ

SEQ ID NO: 178 - DNA, 3245 bp, Homo sapiens
cccgtgttctgcgttgccggccgtgggtgctctggccacagtgagttaggggcgtcggagcgggtttctccaaccgcaatcggctccgctcaaggggaggaggagagtcccttctcggaaggcctaaggaaacgtgtcgtctggaatgggcttgggggccacgcctgcacatctccgcgagacagagggataaagtgaagatggtgctgttattgttacctcgagtgccacatgcgacctctgagatatgtacacagtcattcttactatcgcactcagccattcttactacgctaaagaagaaataattattcgaggatatttgcctggcccagaagaaacttatgtaaatttcatgaactattatatccgttttcctcggagtgagagaaaactctttttagatatcatctgagagaactagtgaatcccagtcactgagtggagttgagagtctaagaacctctgaaatttgagaactgctggaccagagcctttagagctctgataaggtgtcaacagggtagttaatttggcaccatggggatacagggattgctacaatttatcaaagaagcttcagaacccatccatgtgaggaagtataaagggcaggtagtagctgtggatacatattgctggcttcacaaaggagctattgcttgtgctgaaaaactagccaaaggtgaacctactgataggtatgtaggattttgtatgaaatttgtaaatatgttactatctcatgggatcaagcctattctcgtatttgatggatgtactttaccttctaaaaaggaagtagagagatctagaagagaaagacgacaagccaatcttcttaagggaaagcaacttcttcgtgaggggaaagtctcggaagctcgagagtgtttcacccggtctatcaatatcacacatgccatggcccacaaagtaattaaagctgcccggtctcagggggtagattgcctcgtggctccctatgaagctgatgcgcagttggcctatcttaacaaagcgggaattgtgcaagccataattacagaggactcggatctcctagcttttggctgtaaaaaggtaattttaaagatggaccagtttggaaatggacttgaaattgatcaagctcggctaggaatgtgcagacagcttggggatgtattcacggaagagaagtttcgttacatgtgtattctttcaggttgtgactacctgtcatcactgcgtgggattggattagcaaaggcatgcaaagtcctaagactagccaataatccagatatagtaaaggttatcaagaaaattggacattatctcaagatgaatatcacggtaccagaggattacatcaacgggtttattcgggccaacaataccttcctctatcagctagtttttgatcccatcaaaaggaaacttattcctctgaacgcctatgaagatgatgttgatcctgaaacactaagctacgctgggcaatatgttgatgattccatagctcttcaaatagcacttggaaataaagatataaatacttttgaacagatcgatgactacaatccagacactgctatgcctgcccattcaagaagtcatagttgggatgacaaaacatgtcaaaagtcagctaatgttagcagcatttggcataggaattactctcccagaccagagtcgggtactgtttcagatgccccacaattgaaggaaaatccaagtactgtgggagtggaacgagtgattagtactaaagggttaaatctcccaaggaaatcatccattgtgaaaagaccaagaagtgcagagctgtcagaagatgacctgttgagtcagtattctctttcatttacgaagaagaccaagaaaaatagctctgaaggcaataaatcattgagcttttctgaagtgtttgtgcctgacctggtaaatggacctactaacaaaaagagtgtaagcactccacctaggacgagaaataaatttgcaacatttttacaaaggaaaaatgaagaaagtggtgcagttgtggttccagggaccagaagcaggtttttttgcagttcagattctactgactgtgtatcaaacaaagtgagcatccagcctctggatgaaactgctgtcacagataaagagaacaatctgcatgaatcagagtatggagaccaagaaggcaagagactggttgacacagatgtagcacgtaattcaagtgatgacattccgaataatcatattccaggtgatcatattccagacaaggcaacagtgtttacagatgaagagtcctactcttttgagagcagcaaatttacaaggaccatttcaccacccactttgggaacactaagaagttgttttagttggtctggaggtcttggagatttttcaagaacgccgagcccctctccaagcacagcattgcagcagttccgaagaaagagcgattcccccacctctttgcctgagaataatatgtctgatgtgtcgcagttaaagagcgaggagtccagtgacgatgagtctcatcccttacgagaaggggcatgttcttcacagtcccaggaaagtggagaattctcactgcagagttcaaatgcatcaaagctttctcagtgctctagtaaggactctgattcagaggaatctgattgcaatattaagttacttgacagtcaaagtgaccagacctccaagctatgtttatctcatttctcaaaaaaagacacacctctaaggaacaaggttcctgggctatataagtccagttctgcagactctctttctacaaccaagatcaaacctctaggacctgccagagccagtgggctgagcaagaagccggcaagcatccagaagagaaagcatcataatgccgagaacaagccggggttacagatcaaactcaatgagctctggaaaaactttggatttaaaaaagattctgaaaagcttcctccttgtaagaaacccctgtccccagtcagagataacatccaactaactccagaagcggaagaggatatatttaacaaacctgaatgtggccgtgttcaaagagcaatattccagtaaatgcagactgctgcaaagcttttgcctgcaagagaatctgatcaatttgaagtccctgtttgggaatgaggcacttatcagcatgaagaattttttctcattctgtgccattttaaaaatagaatacattttgtatattaactttaaaaaaaaaaaaaaaaaaa

SEQ ID NO: 179 - protein, 846 aa, Homo sapiens; identical to SEQ ID NO: 177

SEQ ID NO: 180 - DNA, 4244 bp, Homo sapiens
tttaaactgtgctttctaagcacagtcaggtagcaaaagtaataaaaaggatggttgaacaagttttcttgtatgttccaggatatgtttgggacttttctttgtttattatatgagttgttccctttgaaattaaagctattttgtaggttttgtgggacataatttgataagtagagttaattaaatttcttctggaagagatctaaattcttattcttagtgagagactgtagttaaaggaaggcttttagaacttgggttcaaggaagatggagatgcgtcggaagctctttggcgggggtgaggaagttcagaaagtgtgcattttccttctggcatttaggtcttgtccgtgtgatttggtggtgcttgggtcataagcctgattaaaattcagggacatgtaccacggcggccaaagcggaattaatttttttatatggggactggagcgctgaaaagttgttcctgaccaggctctaatgagaaattcctctctccccaggttatgaagacagtatggagtttccagaccatagtagacatttgctacagtgtctgagcgagcagagacaccagggttttctttgtgactgcactgttctggtgggagatgcccagttccgagcgcaccgagctgtactggcttcatgcagcatgtatttccacctcttttacaaggaccagctggacaaaagagacattgttcatctgaacagcgacattgttacagcccccgctttcgctctcctgcttgaattcatgtatgaagggaaactccagttcaaagacttgcccattgaagacgtgctagcagctgccagttatctccacatgtatgacattgtcaaagtctgcaaaaagaagctgaaagagaaagccaccacggaggcagacagcaccaaaaaggaagaagatgcttcaagttgttcggacaaagtcgagagtctctccgatggcagcagccacatagcaggcgatttgcccagtgatgaagatgaaggagaagatgaaaaattgaacatcctgcccagcaaaagggacttggcggccgagcctgggaacatgtggatgcgattgccctcagactcagcaggcatcccccaggctggcggagaggcagagccacacgccacagcagctggaaaaacagtagccagcccctgcagctcaacagagtctttgtcccagaggtctgtcacctccgtgagggattcggcagatgttgactgtgtgctggacctgtctgtcaagtccagcctttcaggagttgaaaatctgaacagctcttatttctcttcacaggacgtgctgagaagcaacctggtgcaggtgaaggtggagaaagaggcttcctgtgatgagagtgatgttggcactaatgactatgacatggaacatagcactgtgaaagaaagtgtgagcactaataacagggtacagtatgagccggcccatctggctcccctgagggaggactcggtcttgagggagctggaccgggaggacaaagccagtgatgatgagatgatgaccccagagagcgagcgtgtccaggtggagggaggcatggagagcagtctgctcccctacgtctccaacatcctgagccccgcgggccagatcttcatgtgccccctgtgcaacaaggtcttccccagcccccacatcctgcagatccacctgagcacgcacttccgcgagcaggacggcatccgcagcaagcccgccgccgatgtcaacgtgcccacgtgctcgctgtgtgggaagactttctcttgcatgtacaccctcaagcgccacgagaggactcactcgggggagaagccctacacatgcacccagtgcggcaagagcttccagtactcgcacaacctgagccgccatgccgtggtgcacacccgcgagaagccgcacgcctgcaagtggtgcgagcgcaggttcacgcagtccggggacctgtacagacacattcgcaagttccactgtgagttggtgaactccttgtcggtcaaaagcgaagcactgagcttgcctactgtcagagactggaccttagaagatagctctcaagaactttggaaataattttatatatatataaataatatatatatatatacatatatataaatagatctctatatagttgtggtacggtctaaaagcagtcttgtttcctggaaataaaaagttgggatattaacttgtttttgcactttagaatagcatgagaatctcactaatttagcattctgataaaagaaactttagagcaagtcagaatagagaggtgtttttcctttgaggggataggggaagtaagccaataagaaccttttaaacaaatcgtcctgtcacaaaatgctttcatatggcttaattttgtcaacactgcattgtcttttgagctcttttttcccccccaacaaagtttttttgttttttgtttttttttttaagtagaaattccctccagttttattagcctctttatatgtctcaaattgcatgaattttttctggctgttggaaacctgaatgcttttagacccaaatggaaaatttctgaaatgctggattatctatttttaaacaagcagttgacttaaaactttctgtggcaacttctggttttctgacagttcccagtgagagaaatgctgaaagtacactgggatcactgggacactgtcttatgaaggtttgcttgggatgaaaaaggatattgcagcttcagcagtgttgaactgtgtgtttaaaaatgtgaattactgttattgtatactgtaattgattacatgggctgggggggtgtcaaagaacttgacaggttgtgttgatgctcttagttgagtcttgaaaagtaaatattaacgctacagaaatgcatgagtttcaatatattttttgtctttgtttgcattgtataactttaacgagtgagtttaaaattatttaatttccttagaaaaatagcaccatttggaaaaaaaaactggtgttatgaagaacgtaaatgcactgtttttatttttattttatataatttaaattgactttcccactgtctttaagttgaaactgttaagctgaataaaaacttaagctgcaaattgataacttcgctacataacaaggaaaatataaatgtttacaaacagcttaaagatttgcatgtgcagtgtgcatttataacaaacttctaattgcacaaaacccatgccagctcagagtttaggtgtacacatttacccagttgagcgttcttagaataactactgcacaagttgacaataggtcgttctctctttttttttgtttgctccctttttctttttctccccttcctccttaccctccctcccttactctccccccccaccaccaccctccacccccaactcatgaaaagattctatggactgaaaaagccccaggctgaaaggactggactgccttgattgacatggggaagggggttagtagactatgtggattgcggcagcagaggctgcagcctaacgtgtggttttaatgaccagcacgcaaggcaaaagcattttgcacagtgtttgttttcctgtcttgcacttacaaataaggtctatgggagtagcatggaaaacgtttgctgtttttcccttttttttttaattgcttttgtttaaaatttgatcgccttaactactgtaaacatagcctatttttgtgcttaagatactgaatggaaaactccattgtgtgttgctggactgttttggaaatatttggttaaatgtgtgttaatttggctgtaatggcatttaaagcaaacaaacaaacaaaaaaagctgtgaaaatggccttggagcattatctttagttacttgaagagtttctagtttttttaaaatacagtttatgttaaaataatttttattaatttagagaagacaatcaatgtctgtgagaaaacggactttcttttggattttctttttgtggtcattgtgagtgattgctttttccttttcttagtttcacattcttcctttgttctaaaacttagactgacatctagctttgacaatcatagtatgttttattttcctgagggggaataacttataatgctgtttagttttgtactattggtgtgttggtgaatttttaaactgtgtgctaactgcaataaattatatgaactgagaaaaaaaaaaaaaaaaaaaaaaaaaaaaaaaaaaaaaaaaaaaaaaaaa

SEQ ID NO: 181 - protein, 522 aa, Homo sapiens
MEFPDHSRHLLQCLSEQRHQGFLCDCTVLVGDAQFRAHRAVLASCSMYFHLFYKDQLDKRDIVHLNSDIVTAPAFALLLEFMYEGKLQFKDLPIEDVLAAASYLHMYDIVKVCKKKLKEKATTEADSTKKEEDASSCSDKVESLSDGSSHIAGDLPSDEDEGEDEKLNILPSKRDLAAEPGNMWMRLPSDSAGIPQAGGEAEPHATAAGKTVASPCSSTESLSQRSVTSVRDSADVDCVLDLSVKSSLSGVENLNSSYFSSQDVLRSNLVQVKVEKEASCDESDVGTNDYDMEHSTVKESVSTNNRVQYEPAHLAPLREDSVLRELDREDKASDDEMMTPESERVQVEGGMESSLLPYVSNILSPAGQIFMCPLCNKVFPSPHILQIHLSTHFREQDGIRSKPAADVNVPTCSLCGKTFSCMYTLKRHERTHSGEKPYTCTQCGKSFQYSHNLSRHAVVHTREKPHACKWCERRFTQSGDLYRHIRKFHCELVNSLSVKSEALSLPTVRDWTLEDSSQELWK

SEQ ID NO: 182 - DNA, 3922 bp, Homo sapiens
attctaacacacagacagggagttagtgtgtgcggatctgtggtggagaaggtatctcattcctctctaacatcatctccactttgcatctgtctctcttagtctgctttttttccaccgatgtaacagacctggagccagcaggactcagaggaaaggacttaatcaggtttatgtgtcctaaaggttatgaagacagtatggagtttccagaccatagtagacatttgctacagtgtctgagcgagcagagacaccagggttttctttgtgactgcactgttctggtgggagatgcccagttccgagcgcaccgagctgtactggcttcatgcagcatgtatttccacctcttttacaaggaccagctggacaaaagagacattgttcatctgaacagcgacattgttacagcccccgctttcgctctcctgcttgaattcatgtatgaagggaaactccagttcaaagacttgcccattgaagacgtgctagcagctgccagttatctccacatgtatgacattgtcaaagtctgcaaaaagaagctgaaagagaaagccaccacggaggcagacagcaccaaaaaggaagaagatgcttcaagttgttcggacaaagtcgagagtctctccgatggcagcagccacatagcaggcgatttgcccagtgatgaagatgaaggagaagatgaaaaattgaacatcctgcccagcaaaagggacttggcggccgagcctgggaacatgtggatgcgattgccctcagactcagcaggcatcccccaggctggcggagaggcagagccacacgccacagcagctggaaaaacagtagccagcccctgcagctcaacagagtctttgtcccagaggtctgtcacctccgtgagggattcggcagatgttgactgtgtgctggacctgtctgtcaagtccagcctttcaggagttgaaaatctgaacagctcttatttctcttcacaggacgtgctgagaagcaacctggtgcaggtgaaggtggagaaagaggcttcctgtgatgagagtgatgttggcactaatgactatgacatggaacatagcactgtgaaagaaagtgtgagcactaataacagggtacagtatgagccggcccatctggctcccctgagggaggactcggtcttgagggagctggaccgggaggacaaagccagtgatgatgagatgatgaccccagagagcgagcgtgtccaggtggagggaggcatggagagcagtctgctcccctacgtctccaacatcctgagccccgcgggccagatcttcatgtgccccctgtgcaacaaggtcttccccagcccccacatcctgcagatccacctgagcacgcacttccgcgagcaggacggcatccgcagcaagcccgccgccgatgtcaacgtgcccacgtgctcgctgtgtgggaagactttctcttgcatgtacaccctcaagcgccacgagaggactcactcgggggagaagccctacacatgcacccagtgcggcaagagcttccagtactcgcacaacctgagccgccatgccgtggtgcacacccgcgagaagccgcacgcctgcaagtggtgcgagcgcaggttcacgcagtccggggacctgtacagacacattcgcaagttccactgtgagttggtgaactccttgtcggtcaaaagcgaagcactgagcttgcctactgtcagagactggaccttagaagatagctctcaagaactttggaaataattttatatatatataaataatatatatatatatacatatatataaatagatctctatatagttgtggtacggtctaaaagcagtcttgtttcctggaaataaaaagttgggatattaacttgtttttgcactttagaatagcatgagaatctcactaatttagcattctgataaaagaaactttagagcaagtcagaatagagaggtgtttttcctttgaggggataggggaagtaagccaataagaaccttttaaacaaatcgtcctgtcacaaaatgctttcatatggcttaattttgtcaacactgcattgtcttttgagctcttttttcccccccaacaaagtttttttgttttttgtttttttttttaagtagaaattccctccagttttattagcctctttatatgtctcaaattgcatgaattttttctggctgttggaaacctgaatgcttttagacccaaatggaaaatttctgaaatgctggattatctatttttaaacaagcagttgacttaaaactttctgtggcaacttctggttttctgacagttcccagtgagagaaatgctgaaagtacactgggatcactgggacactgtcttatgaaggtttgcttgggatgaaaaaggatattgcagcttcagcagtgttgaactgtgtgtttaaaaatgtgaattactgttattgtatactgtaattgattacatgggctgggggggtgtcaaagaacttgacaggttgtgttgatgctcttagttgagtcttgaaaagtaaatattaacgctacagaaatgcatgagtttcaatatattttttgtctttgtttgcattgtataactttaacgagtgagtttaaaattatttaatttccttagaaaaatagcaccatttggaaaaaaaaactggtgttatgaagaacgtaaatgcactgtttttatttttattttatataatttaaattgactttcccactgtctttaagttgaaactgttaagctgaataaaaacttaagctgcaaattgataacttcgctacataacaaggaaaatataaatgtttacaaacagcttaaagatttgcatgtgcagtgtgcatttataacaaacttctaattgcacaaaacccatgccagctcagagtttaggtgtacacatttacccagttgagcgttcttagaataactactgcacaagttgacaataggtcgttctctctttttttttgtttgctccctttttctttttctccccttcctccttaccctccctcccttactctccccccccaccaccaccctccacccccaactcatgaaaagattctatggactgaaaaagccccaggctgaaaggactggactgccttgattgacatggggaagggggttagtagactatgtggattgcggcagcagaggctgcagcctaacgtgtggttttaatgaccagcacgcaaggcaaaagcattttgcacagtgtttgttttcctgtcttgcacttacaaataaggtctatgggagtagcatggaaaacgtttgctgtttttcccttttttttttaattgcttttgtttaaaatttgatcgccttaactactgtaaacatagcctatttttgtgcttaagatactgaatggaaaactccattgtgtgttgctggactgttttggaaatatttggttaaatgtgtgttaatttggctgtaatggcatttaaagcaaacaaacaaacaaaaaaagctgtgaaaatggccttggagcattatctttagttacttgaagagtttctagtttttttaaaatacagtttatgttaaaataatttttattaatttagagaagacaatcaatgtctgtgagaaaacggactttcttttggattttctttttgtggtcattgtgagtgattgctttttccttttcttagtttcacattcttcctttgttctaaaacttagactgacatctagctttgacaatcatagtatgttttattttcctgagggggaataacttataatgctgtttagttttgtactattggtgtgttggtgaatttttaaactgtgtgctaactgcaataaattatatgaactgagaaaaaaaaaaaaaaaaaaaaaaaaaaaaaaaaaaaaaaaaaaaaaaaaa

SEQ ID NO: 183 - protein, 531 aa, Homo sapiens
MCPKGYEDSMEFPDHSRHLLQCLSEQRHQGFLCDCTVLVGDAQFRAHRAVLASCSMYFHLFYKDQLDKRDIVHLNSDIVTAPAFALLLEFMYEGKLQFKDLPIEDVLAAASYLHMYDIVKVCKKKLKEKATTEADSTKKEEDASSCSDKVESLSDGSSHIAGDLPSDEDEGEDEKLNILPSKRDLAAEPGNMWMRLPSDSAGIPQAGGEAEPHATAAGKTVASPCSSTESLSQRSVTSVRDSADVDCVLDLSVKSSLSGVENLNSSYFSSQDVLRSNLVQVKVEKEASCDESDVGTNDYDMEHSTVKESVSTNNRVQYEPAHLAPLREDSVLRELDREDKASDDEMMTPESERVQVEGGMESSLLPYVSNILSPAGQIFMCPLCNKVFPSPHILQIHLSTHFREQDGIRSKPAADVNVPTCSLCGKTFSCMYTLKRHERTHSGEKPYTCTQCGKSFQYSHNLSRHAVVHTREKPHACKWCERRFTQSGDLYRHIRKFHCELVNSLSVKSEALSLPTVRDWTLEDSSQELWK

SEQ ID NO: 184 - DNA, 1477 bp, Homo sapiens
gtggattttagagatacctcccctccttctgctcagctgccttgcagtaattaaactctttctctgctgcaacacccctactgttctccgtgtattggcttttctgggcagcaggaaggaaaagctgatgcgatgctctcagtgccgcgtcgccaaatactgtagtgctaagtgtcagaaaaaagcttggccagaccacaagcgggaatgcaaatgccttaaaagctgcaaacccagatatcctccagactccgttcgacttcttggcagagttgtcttcaaacttatggatggagcaccttcagaatcagagaagctttactcattttatgatctggagtcaaatattaacaaactgactgaagataagaaagagggcctcaggcaactcgtaatgacatttcaacatttcatgagagaagaaatacaggatgcctctcagctgccacctgcctttgacctttttgaagcctttgcaaaagtgatctgcaactctttcaccatctgtaatgcggagatgcaggaagttggtgttggcctatatcccagtatctctttgctcaatcacagctgtgaccccaactgttcgattgtgttcaatgggccccacctcttactgcgagcagtccgagacatcgaggtgggagaggagctcaccatctgctacctggatatgctgatgaccagtgaggagcgccggaagcagctgagggaccagtactgctttgaatgtgactgtttccgttgccaaacccaggacaaggatgctgatatgctaactggtgatgagcaagtatggaaggaagttcaagaatccctgaaaaaaattgaagaactgaaggcacactggaagtgggagcaggttctggccatgtgccaggcgatcataagcagcaattctgaacggcttcccgatatcaacatctaccagctgaaggtgctcgactgcgccatggatgcctgcatcaacctcggcctgttggaggaagccttgttctatggtactcggaccatggagccatacaggatttttttcccaggaagccatcccgtcagaggggttcaagtgatgaaagttggcaaactgcagctacatcaaggcatgtttccccaagcaatgaagaatctgagactggcttttgatattatgagagtgacacatggcagagaacacagcctgattgaagatttgattctacttttagaagaatgcgacgccaacatcagagcatcctaagggaacgcagtcagagggaaatacggcgtgtgtctttgttgaatgccttattgaggtcacacactctatgctttgttagctgtgtgaacctctcttattggaaattctgttccgtgtttgtgtaggtaaataaaggcagacatggtttgcaaaccacaagaatcattagttgtagagaagcacgattataataaattcaaaacatttggttgaggatgccaaaaaaaaaaaaaaaaaaaa

SEQ ID NO: 185 - protein, 369 aa, Homo sapiens
MRCSQCRVAKYCSAKCQKKAWPDHKRECKCLKSCKPRYPPDSVRLLGRVVFKLMDGAPSESEKLYSFYDLESNINKLTEDKKEGLRQLVMTFQHFMREEIQDASQLPPAFDLFEAFAKVICNSFTICNAEMQEVGVGLYPSISLLNHSCDPNCSIVFNGPHLLLRAVRDIEVGEELTICYLDMLMTSEERRKQLRDQYCFECDCFRCQTQDKDADMLTGDEQVWKEVQESLKKIEELKAHWKWEQVLAMCQAIISSNSERLPDINIYQLKVLDCAMDACINLGLLEEALFYGTRTMEPYRIFFPGSHPVRGVQVMKVGKLQLHQGMFPQAMKNLRLAFDIMRVTHGREHSLIEDLILLLEECDANIRAS

SEQ ID NO: 186 - DNA, 1803 bp, Homo sapiens
agtgttttacttccgcttgacctggcccggacgccagaaaatgttccacgtgggataccctgcgtggggttcactgtagtagctgcactaggtgattcttggagcgggcctgagagacaaggacatgtggatcccagtggtcgggcttcctcggcggctgaggctctccgccttggcgggcgctggtcgcttttgcattttagggtctgaagcggcgacgcgaaagcatttgccggcgaggaaccactgtgggctctctgactcctctccgcagctgtggcccgaaccggatttcaggaatccgccaaggaaggcgtctaaggccagcttagactttaagcgttacgtaaccgatcggagattggctgagaccctggcgcaaatctatttgggaaaaccaagtagacctccacacctactgctggagtgcaatccaggtcctggaatcctgactcaggcattacttgaagctggtgccaaagtggttgcgctcgaaagtgacaaaacttttattccacatttggagtccttaggaaaaaatctggatggaaaactacgagtgattcactgtgacttctttaaactagatcctagaagtggtggagtaataaaaccacctgctatgtcttctcgagggctctttaagaatttgggaatagaagcagttccttggacagcagacatccctttaaaagtagttggaatgttcccaagtagaggtgagaaaagggcactttggaaactcgcatatgacttgtattcctgtacttctatatataaatttggacgaatagaagtaaatatgtttattggtgaaaaagaattccagaaactaatggcagatcccggaaatccagacttgtatcatgtattaagtgttatctggcaattagcttgtgagattaaggttctgcacatggagccttggtcatcatttgatatatacacccggaaagggccgctggaaaacccaaagcgtagggaattattagaccaattacaacaaaagctgtatcttattcaaatgattcctcgtcaaaatttatttaccaagaacttaacacctatgaactataatatattttttcacttgttaaagcactgttttgggaggcgcagcgccactgtaatagaccacttacgttcattgactccacttgatgcgagagatatattgatgcaaataggaaaacaggaggatgagaaagtagttaacatgcaccctcaagacttcaaaacactttttgaaactatagagcgttccaaagattgtgcttataaatggctgtatgatgaaaccctggaagataggtagcaactagactgtcgtttttggtggagcggttcatttatttggaaactatgacatgaaaaccaaatttgaaaactcacatcctttcagcagaaggtaactgttcttgtcttgcacaagccaggcagatcatttctcctaagctgatatcattggcttattggatgaaacagtgtctgctattttattcacaattgaataaaatgaaaacttcaattaattgtggatttgatcagattgaattcgttttgtttcagattcctatttaaatatttcacttgtactgttgctgatttttgcatcttcttgaagagcaagagtctgtacattattaagcttagaaagtaagcaaaactgatttactggtttgcctttcagtttgttgaaatgtattgtcaagtactgtacaatgaaattgtttaaattttaatatgatttaagctttttagaaattaaaatattttaaataaaaaaaaaaaaaaaaaaaaaaa

SEQ ID NO: 187 - protein, 396 aa, Homo sapiens
MWIPVVGLPRRLRLSALAGAGRFCILGSEAATRKHLPARNHCGLSDSSPQLWPEPDFRNPPRKASKASLDFKRYVTDRRLAETLAQIYLGKPSRPPHLLLECNPGPGILTQALLEAGAKVVALESDKTFIPHLESLGKNLDGKLRVIHCDFFKLDPRSGGVIKPPAMSSRGLFKNLGIEAVPWTADIPLKVVGMFPSRGEKRALWKLAYDLYSCTSIYKFGRIEVNMFIGEKEFQKLMADPGNPDLYHVLSVIWQLACEIKVLHMEPWSSFDIYTRKGPLENPKRRELLDQLQQKLYLIQMIPRQNLFTKNLTPMNYNIFFHLLKHCFGRRSATVIDHLRSLTPLDARDILMQIGKQEDEKVVNMHPQDFKTLFETIERSKDCAYKWLYDETLEDR

SEQ ID NO: 188 - DNA, 3608 bp, Homo sapiens
agagggaggcggggcggaaaggcgagaggtgtctcctccaccggagccaggggagacccgagcaagctccgtgacagcacgtcggccgccatgtcgccgagtggggctggaaacagacccggcgcccagcggtagccctccttgcgcctccgattcccagacatggaaggtctttaatgtaactttaaatggttcaccaaaggatgctctaatggatgacagcgatactcctacatattatctgcaaatagaaccacaagatggatgtcatcctggtgacagcgtggaaaggagtgtgacctgtctgccttctgcatcagatgaaaatgaaaatcagcttgacggggacgggcatgagcatctgaccagcagtgacagtgcgatgggaaagccccaagtgtctgagcaggacagtctcaataataatgaaagctgcacattgagctgcgaggtggctgcaggtgagaactcgcaaaacaccctttgtgaagcctccagagatgaacaggccttcttgggaaaggacaaaaaaattcctggaaaaagaagtccaagaagcaaaaaagggactgctaagaagataccaccaggacttttttcaggagatattgcacctttaatgcaagaaaaagtactaagcgcagtcacatatgctgttgatgatgaagaagctgctgaagtaaatgctaatgagcagccagaggcgccaaagcttgttctgcagtctctgttttcacttatacgaggtgaagttgagcagttggattcaagagcacttcccctttgccttcatcagatagcagaatcctatttccaggaggaggactacgagaaagcaatgaaattcattcagctagaacgattgtatcatgagcaattgctcgcaaatctttctgccattcaagaacagtgggaaacaaaatggaaaactgtgcaaccacatacagttacggctctaaggaattcagaaaagggatttaatggtgaagattttgaacggcttacgaaaatttgtgcaacacatcaagatcctcttttatccaaacataagatagcagctgtggagaagtcccaggaaaggaaatgctccacgcagttactagtgtctgaagatccaaaggaaggaggagctaccaccaaagagtcagagagtaaaacttgtctcggcacagagtcaagtaaagaaagccaacatacagtggagcccctggggagcagtccctgctgtcatcagatggacgtgcaaacagattccccaagcctttcggtaactgcaggaaaggaccacatggaggagctgctctgcagcgctgaagccacgttagcgctccacacccagtcctccgagacagcagggagcccgtctgggccagactcttctgaggatgcttgtgaggatgacagtcgcttgcagctggctcaaacagaggcctgccaggatgtggccagaatagagggcattgctgaagaccctaaggtgtttctttccagcaagtcaaagacagagccgttgatttcaccaggctgtgaccgtatacctcctgcattgatttctgagggtaaatattcacaggctcagaggaaagaactccgtttgccacttcgggatgcttctgaggcgttgcccacagaccaacttgagaacaatgaattaaatgagctgcagcagcctgatcttacagacagtgatggaaaatcaccacaggcgcaggctgactcagacggttctgagaatgtgctctgtggaaataatcaaatatctgacttaggcatactgcttccagaggtgtgtatggccccagaggaaaagggagataaagacgaccaactcaacaaagaaacagaagactatttgaacagccttttagaaggatgtttaaaagatactgaagattccctttcctatgaagataaccaagacgacgactccgatctccttcaagatctctctcctgaagaagcatcctatagtctccaggagaatctgccttctgatgagagctgtctttctcttgatgatcttgccaaaaggatagagattgcagaggttgttcctactgaaggattggtctccatattaaagaagaggaatgatactgtaggagatcatcctgcccaaatgcaacacaaaccatctaagcgaagagtgagattccaagaaatagacgatagcttggatcaagatgaagttggaggtggctcctgtattttgctggtcttgctgtgcatagcaacggttttcctcagtgttggaggaactgcattatactgcactttcggtgacatggagtcacctgtttgtactgactttgcagacaacatggacttctattacactaagttacttcagggagtggcagaactgaagcactggatctacctctcctagcagcattccagacacagacatgctggcagtgagagtgaaaggcgggagactttctaaacagtttttctttcaggaattctgtagcattcccccttccctctgttaggaaccaaggacatcagaaatagcaactttaagtggcaagccggaggaactctgttagaataatccacacagtgaggcaaatatcaatctaagcattgtggatggaaggaatggtctttggagagagcatatccatctcctcctcactgcctcctaatgtcatgaggtacactgagcagaattaaacagggtagtcttaaccacactatttttagctaccttgtcaagctaatggttaaagaacacttttggtttacacttgttgggtcatagaagttgctttccgccatcacgcaataagtttgtgtgtaatcagaaggagttaccttatggtttcagtgtcattctttagttaacttgggagctgtgtaatttaggctttgcgtattatttcacttctgttctccacttatgaagtgattgtgtgtttgcgtgtgtgtgcgtgcgcatgtgcttccggcagttaacataagcaaatacccaacatcacaaagatgatctttcttcttttaacttgatgatgatgtgcaggcacaaatctttggagaaggcttaactgtggaatagatgaattctagaactcttgaccctgcaatgagaaactgtgacagatctgtgtcaattaacttgattagccagaaattaatcacaggcctagagaccaaagaaaaagctcccctgagtctcaggcaacagttttgtcacggatgcaaagcttcctgaaatcatgaatgctggactcagtttggcaaacgcttacacctattatgttctgagattctgagaaccagaatgcaaacttaagtaagatacagttcccactgtaggtgttttaatcctggtcttatatagaataaaccagtactttgctgagtgaaatcaccatatagaattcagtattaacagatcatgcattcagatgcttgaatgtgcattcttgttgtgggcttgatttagatcctattgcggggtcattacgcaaaaattcaatcataccttccatagacaaatgtctgatttttgtttaaatctgtccgttaggtggcctttccttatctgaggtgtagtggtctaacatttaggaagccttgctttgactttatcgggcagcatt

SEQ ID NO: 189 - protein, 725 aa, Homo sapiens
MDDSDTPTYYLQIEPQDGCHPGDSVERSVTCLPSASDENENQLDGDGHEHLTSSDSAMGKPQVSEQDSLNNNESCTLSCEVAAGENSQNTLCEASRDEQAFLGKDKKIPGKRSPRSKKGTAKKIPPGLFSGDIAPLMQEKVLSAVTYAVDDEEAAEVNANEQPEAPKLVLQSLFSLIRGEVEQLDSRALPLCLHQIAESYFQEEDYEKAMKFIQLERLYHEQLLANLSAIQEQWETKWKTVQPHTVTALRNSEKGFNGEDFERLTKICATHQDPLLSKHKIAAVEKSQERKCSTQLLVSEDPKEGGATTKESESKTCLGTESSKESQHTVEPLGSSPCCHQMDVQTDSPSLSVTAGKDHMEELLCSAEATLALHTQSSETAGSPSGPDSSEDACEDDSRLQLAQTEACQDVARIEGIAEDPKVFLSSKSKTEPLISPGCDRIPPALISEGKYSQAQRKELRLPLRDASEALPTDQLENNELNELQQPDLTDSDGKSPQAQADSDGSENVLCGNNQISDLGILLPEVCMAPEEKGDKDDQLNKETEDYLNSLLEGCLKDTEDSLSYEDNQDDDSDLLQDLSPEEASYSLQENLPSDESCLSLDDLAKRIEIAEVVPTEGLVSILKKRNDTVGDHPAQMQHKPSKRRVRFQEIDDSLDQDEVGGGSCILLVLLCIATVFLSVGGTALYCTFGDMESPVCTDFADNMDFYYTKLLQGVAELKHWIYLS

SEQ ID NO: 190 - DNA, 4484 bp, Homo sapiens
gtagatgaggaaactgaagttgaggaatagtgaagagtttgtccaatgtcatagccccgtaatcaacgggacaaaaattttcttgctgatgggtcaagatggcatcgtgaagtggttgttcaccgtaaactgtaatacaatcctgtttatggatttgtttgcatatttttccctccatagggaaacctttcttccatggctcaggacacactcctggatcgagccaacaggagaactttctggtaagcatttggctaacttttttttttttgagatggagtcttgctgtgtcgcctaggctggagtgcagtggcgtgatcttggctcactgcagcctccacttcccgggttcaatcaattctcctacctcaacttcctgagtagctgggattacaggcgcccgccaccacacccggctcatttttgtacttttagtagagacacagttttgccatgttggccaggctggtcttgaattcctcagctcaggtgatctgcctgccttggcctctcaaagtgctgggattacaggcgtgagccactgtgcccggccttggctaacttttcaaaattaaagattttgacttgttacagtcatgtgacatttttttctttctgtttgctgagtttttgataatttatatctctcaaagtggagactttaaaaaagactcatccgtgtgccgtgttcactgcctggtatcttagtgtggaccgaagcctaaggaccctgaaaacagctgcagatgaagatggcaagcacccgctgcaagctggccaggtacctggaggacctggaggatgtggacttgaagaaatttaagatgcacttagaggactatcctccccagaagggctgcatccccctcccgaggggtcagacagagaaggcagaccatgtggatctagccacgctaatgatcgacttcaatggggaggagaaggcgtgggccatggccgtgtggatcttcgctgcgatcaacaggagagacctttatgagaaagcaaaaagagatgagccgaagtggggttcagataatgcacgtgtttcgaatcccactgtgatatgccaggaagacagcattgaagaggagtggatgggtttactggagtacctttcgagaatctctatttgtaaaatgaagaaagattaccgtaagaagtacagaaagtacgtgagaagcagattccagtgcattgaagacaggaatgcccgtctgggtgagagtgtgagcctcaacaaacgctacacacgactgcgtctcatcaaggagcaccggagccagcaggagagggagcaggagcttctggccatcggcaagaccaagacgtgtgagagccccgtgagtcccattaagatggagttgctgtttgaccccgatgatgagcattctgagcctgtgcacaccgtggtgttccagggggcggcagggattgggaaaacaatcctggccaggaagatgatgttggactgggcgtcggggacactctaccaagacaggtttgactatctgttctatatccactgtcgagaggtgagccttgtgacacagaggagcctgggggacctgatcatgagctgctgccccgacccaaacccacccatccacaagatcgtgagaaaaccctccagaatcctcttcctcatggacggcttcgatgagctgcaaggtgcctttgacgagcacataggaccgctctgcactgactggcagaaggccgagcggggagacattctcctgagcagcctcatcagaaagaagctgcttcccgaggcctctctgctcatcaccacgagacctgtggccctggagaaactgcagcacttgctggaccatcctcggcatgtggagatcctgggtttctccgaggccaaaaggaaagagtacttcttcaagtacttctctgatgaggcccaagccagggcagccttcagtctgattcaggagaacgaggtcctcttcaccatgtgcttcatccccctggtctgctggatcgtgtgcactggactgaaacagcagatggagagtggcaagagccttgcccagacatccaagaccaccaccgcggtgtacgtcttcttcctttccagtttgctgcagccccggggagggagccaggagcacggcctctgcgcccacctctgggggctctgctctttggctgcagatggaatctggaaccagaaaatcctgtttgaggagtccgacctcaggaatcatggactgcagaaggcggatgtgtctgctttcctgaggatgaacctgttccaaaaggaagtggactgcgagaagttctacagcttcatccacatgactttccaggagttctttgccgccatgtactacctgctggaagaggaaaaggaaggaaggacgaacgttccagggagtcgtttgaagcttcccagccgagacgtgacagtccttctggaaaactatggcaaattcgaaaaggggtatttgatttttgttgtacgtttcctctttggcctggtaaaccaggagaggacctcctacttggagaagaaattaagttgcaagatctctcagcaaatcaggctggagctgctgaaatggattgaagtgaaagccaaagctaaaaagctgcagatccagcccagccagctggaattgttctactgtttgtacgagatgcaggaggaggacttcgtgcaaagggccatggactatttccccaagattgagatcaatctctccaccagaatggaccacatggtttcttccttttgcattgagaactgtcatcgggtggagtcactgtccctggggtttctccataacatgcccaaggaggaagaggaggaggaaaaggaaggccgacaccttgatatggtgcagtgtgtcctcccaagctcctctcatgctgcctgttctcatggattggtgaacagccacctcacttccagtttttgccggggcctcttttcagttctgagcaccagccagagtctaactgaattggacctcagtgacaattctctgggggacccagggatgagagtgttgtgtgaaacgctccagcatcctggctgtaacattcggagattgtggttggggcgctgtggcctctcgcatgagtgctgcttcgacatctccttggtcctcagcagcaaccagaagctggtggagctggacctgagtgacaacgccctcggtgacttcggaatcagacttctgtgtgtgggactgaagcacctgttgtgcaatctgaagaagctctggttggtcagctgctgcctcacatcagcatgttgtcaggatcttgcatcagtattgagcaccagccattccctgaccagactctatgtgggggagaatgccttgggagactcaggagtcgcaattttatgtgaaaaagccaagaatccacagtgtaacctgcagaaactggggttggtgaattctggccttacgtcagtctgttgttcagctttgtcctcggtactcagcactaatcagaatctcacgcacctttacctgcgaggcaacactctcggagacaaggggatcaaactactctgtgagggactcttgcaccccgactgcaagcttcaggtgttggaattagacaactgcaacctcacgtcacactgctgctgggatctttccacacttctgacctccagccagagcctgcgaaagctgagcctgggcaacaatgacctgggcgacctgggggtcatgatgttctgtgaagtgctgaaacagcagagctgcctcctgcagaacctggggttgtctgaaatgtatttcaattatgagacaaaaagtgcgttagaaacacttcaagaagaaaagcctgagctgaccgtcgtctttgagccttcttggtaggagtggaaacggggctgccagacgccagtgttctccggtccctccagctgggggccctcaggtggagagagctgcgatccatccaggccaagaccacagctctgtgatccttccggtggagtgtcggagaagagagcttgccgacgatgccttcctgtgcagagcttgggcatctcctttacgccagggtgaggaagacaccaggacaatgacagcatcgggtgttgttgtcatcacagcgcctcagttagaggatgttcctcttggtgacctcatgtaattagctcattcaataaagcactttctttatttttctcttctctgtctaactttctttttcctatcttttttcttctttgttctgtttacttttgctcatatcatcattcccgctatctttctattaactgaccataacacagaactagttgactatatattatgttgaaattttatggcagctatttatttatttaaattttttgtaacagttttgttttctaataagaaaaatccatgctttttgtagctggttgaaaattcaggaatatgtaaaactttttggtatttaattaaattgattccttttcttaattttaaaaaaaaaaaaaaaaaaaaaaaaaaaaa

SEQ ID NO: 191 - protein, 1036 aa, Homo sapiens
MKMASTRCKLARYLEDLEDVDLKKFKMHLEDYPPQKGCIPLPRGQTEKADHVDLATLMIDFNGEEKAWAMAVWIFAAINRRDLYEKAKRDEPKWGSDNARVSNPTVICQEDSIEEEWMGLLEYLSRISICKMKKDYRKKYRKYVRSRFQCIEDRNARLGESVSLNKRYTRLRLIKEHRSQQEREQELLAIGKTKTCESPVSPIKMELLFDPDDEHSEPVHTVVFQGAAGIGKTILARKMMLDWASGTLYQDRFDYLFYIHCREVSLVTQRSLGDLIMSCCPDPNPPIHKIVRKPSRILFLMDGFDELQGAFDEHIGPLCTDWQKAERGDILLSSLIRKKLLPEASLLITTRPVALEKLQHLLDHPRHVEILGFSEAKRKEYFFKYFSDEAQARAAFSLIQENEVLFTMCFIPLVCWIVCTGLKQQMESGKSLAQTSKTTTAVYVFFLSSLLQPRGGSQEHGLCAHLWGLCSLAADGIWNQKILFEESDLRNHGLQKADVSAFLRMNLFQKEVDCEKFYSFIHMTFQEFFAAMYYLLEEEKEGRTNVPGSRLKLPSRDVTVLLENYGKFEKGYLIFVVRFLFGLVNQERTSYLEKKLSCKISQQIRLELLKWIEVKAKAKKLQIQPSQLELFYCLYEMQEEDFVQRAMDYFPKIEINLSTRMDHMVSSFCIENCHRVESLSLGFLHNMPKEEEEEEKEGRHLDMVQCVLPSSSHAACSHGLVNSHLTSSFCRGLFSVLSTSQSLTELDLSDNSLGDPGMRVLCETLQHPGCNIRRLWLGRCGLSHECCFDISLVLSSNQKLVELDLSDNALGDFGIRLLCVGLKHLLCNLKKLWLVSCCLTSACCQDLASVLSTSHSLTRLYVGENALGDSGVAILCEKAKNPQCNLQKLGLVNSGLTSVCCSALSSVLSTNQNLTHLYLRGNTLGDKGIKLLCEGLLHPDCKLQVLELDNCNLTSHCCWDLSTLLTSSQSLRKLSLGNNDLGDLGVMMFCEVLKQQSCLLQNLGLSEMYFNYETKSALETLQEEKPELTVVFEPSW

SEQ ID NO: 192 - DNA, 4142 bp, Homo sapiens
gtagatgaggaaactgaagttgaggaatagtgaagagtttgtccaatgtcatagccccgtaatcaacgggacaaaaattttcttgctgatgggtcaagatggcatcgtgaagtggttgttcaccgtaaactgtaatacaatcctgtttatggatttgtttgcatatttttccctccatagggaaacctttcttccatggctcaggacacactcctggatcgagccaacaggagaactttctggtaagcatttggctaacttttttttttttgagatggagtcttgctgtgtcgcctaggctggagtgcagtggcgtgatcttggctcactgcagcctccacttcccgggttcaatcaattctcctacctcaacttcctgagtagctgggattacaggcgcccgccaccacacccggctcatttttgtacttttagtagagacacagttttgccatgttggccaggctggtcttgaattcctcagctcaggtgatctgcctgccttggcctctcaaagtgctgggattacaggcgtgagccactgtgcccggccttggctaacttttcaaaattaaagattttgacttgttacagtcatgtgacatttttttctttctgtttgctgagtttttgataatttatatctctcaaagtggagactttaaaaaagactcatccgtgtgccgtgttcactgcctggtatcttagtgtggaccgaagcctaaggaccctgaaaacagctgcagatgaagatggcaagcacccgctgcaagctggccaggtacctggaggacctggaggatgtggacttgaagaaatttaagatgcacttagaggactatcctccccagaagggctgcatccccctcccgaggggtcagacagagaaggcagaccatgtggatctagccacgctaatgatcgacttcaatggggaggagaaggcgtgggccatggccgtgtggatcttcgctgcgatcaacaggagagacctttatgagaaagcaaaaagagatgagccgaagtggggttcagataatgcacgtgtttcgaatcccactgtgatatgccaggaagacagcattgaagaggagtggatgggtttactggagtacctttcgagaatctctatttgtaaaatgaagaaagattaccgtaagaagtacagaaagtacgtgagaagcagattccagtgcattgaagacaggaatgcccgtctgggtgagagtgtgagcctcaacaaacgctacacacgactgcgtctcatcaaggagcaccggagccagcaggagagggagcaggagcttctggccatcggcaagaccaagacgtgtgagagccccgtgagtcccattaagatggagttgctgtttgaccccgatgatgagcattctgagcctgtgcacaccgtggtgttccagggggcggcagggattgggaaaacaatcctggccaggaagatgatgttggactgggcgtcggggacactctaccaagacaggtttgactatctgttctatatccactgtcgagaggtgagccttgtgacacagaggagcctgggggacctgatcatgagctgctgccccgacccaaacccacccatccacaagatcgtgagaaaaccctccagaatcctcttcctcatggacggcttcgatgagctgcaaggtgcctttgacgagcacataggaccgctctgcactgactggcagaaggccgagcggggagacattctcctgagcagcctcatcagaaagaagctgcttcccgaggcctctctgctcatcaccacgagacctgtggccctggagaaactgcagcacttgctggaccatcctcggcatgtggagatcctgggtttctccgaggccaaaaggaaagagtacttcttcaagtacttctctgatgaggcccaagccagggcagccttcagtctgattcaggagaacgaggtcctcttcaccatgtgcttcatccccctggtctgctggatcgtgtgcactggactgaaacagcagatggagagtggcaagagccttgcccagacatccaagaccaccaccgcggtgtacgtcttcttcctttccagtttgctgcagccccggggagggagccaggagcacggcctctgcgcccacctctgggggctctgctctttggctgcagatggaatctggaaccagaaaatcctgtttgaggagtccgacctcaggaatcatggactgcagaaggcggatgtgtctgctttcctgaggatgaacctgttccaaaaggaagtggactgcgagaagttctacagcttcatccacatgactttccaggagttctttgccgccatgtactacctgctggaagaggaaaaggaaggaaggacgaacgttccagggagtcgtttgaagcttcccagccgagacgtgacagtccttctggaaaactatggcaaattcgaaaaggggtatttgatttttgttgtacgtttcctctttggcctggtaaaccaggagaggacctcctacttggagaagaaattaagttgcaagatctctcagcaaatcaggctggagctgctgaaatggattgaagtgaaagccaaagctaaaaagctgcagatccagcccagccagctggaattgttctactgtttgtacgagatgcaggaggaggacttcgtgcaaagggccatggactatttccccaagattgagatcaatctctccaccagaatggaccacatggtttcttccttttgcattgagaactgtcatcgggtggagtcactgtccctggggtttctccataacatgcccaaggaggaagaggaggaggaaaaggaaggccgacaccttgatatggtgcagtgtgtcctcccaagctcctctcatgctgcctgttctcatgggttggggcgctgtggcctctcgcatgagtgctgcttcgacatctccttggtcctcagcagcaaccagaagctggtggagctggacctgagtgacaacgccctcggtgacttcggaatcagacttctgtgtgtgggactgaagcacctgttgtgcaatctgaagaagctctggttggtgaattctggccttacgtcagtctgttgttcagctttgtcctcggtactcagcactaatcagaatctcacgcacctttacctgcgaggcaacactctcggagacaaggggatcaaactactctgtgagggactcttgcaccccgactgcaagcttcaggtgttggaattagacaactgcaacctcacgtcacactgctgctgggatctttccacacttctgacctccagccagagcctgcgaaagctgagcctgggcaacaatgacctgggcgacctgggggtcatgatgttctgtgaagtgctgaaacagcagagctgcctcctgcagaacctggggttgtctgaaatgtatttcaattatgagacaaaaagtgcgttagaaacacttcaagaagaaaagcctgagctgaccgtcgtctttgagccttcttggtaggagtggaaacggggctgccagacgccagtgttctccggtccctccagctgggggccctcaggtggagagagctgcgatccatccaggccaagaccacagctctgtgatccttccggtggagtgtcggagaagagagcttgccgacgatgccttcctgtgcagagcttgggcatctcctttacgccagggtgaggaagacaccaggacaatgacagcatcgggtgttgttgtcatcacagcgcctcagttagaggatgttcctcttggtgacctcatgtaattagctcattcaataaagcactttctttatttttctcttctctgtctaactttctttttcctatcttttttcttctttgttctgtttacttttgctcatatcatcattcccgctatctttctattaactgaccataacacagaactagttgactatatattatgttgaaattttatggcagctatttatttatttaaattttttgtaacagttttgttttctaataagaaaaatccatgctttttgtagctggttgaaaattcaggaatatgtaaaactttttggtatttaattaaattgattccttttcttaattttaaaaaaaaaaaaaaaaaaaaaaaaaaaaa

SEQ ID NO: 193 - protein, 922 aa, Homo sapiens
MKMASTRCKLARYLEDLEDVDLKKFKMHLEDYPPQKGCIPLPRGQTEKADHVDLATLMIDFNGEEKAWAMAVWIFAAINRRDLYEKAKRDEPKWGSDNARVSNPTVICQEDSIEEEWMGLLEYLSRISICKMKKDYRKKYRKYVRSRFQCIEDRNARLGESVSLNKRYTRLRLIKEHRSQQEREQELLAIGKTKTCESPVSPIKMELLFDPDDEHSEPVHTVVFQGAAGIGKTILARKMMLDWASGTLYQDRFDYLFYIHCREVSLVTQRSLGDLIMSCCPDPNPPIHKIVRKPSRILFLMDGFDELQGAFDEHIGPLCTDWQKAERGDILLSSLIRKKLLPEASLLITTRPVALEKLQHLLDHPRHVEILGFSEAKRKEYFFKYFSDEAQARAAFSLIQENEVLFTMCFIPLVCWIVCTGLKQQMESGKSLAQTSKTTTAVYVFFLSSLLQPRGGSQEHGLCAHLWGLCSLAADGIWNQKILFEESDLRNHGLQKADVSAFLRMNLFQKEVDCEKFYSFIHMTFQEFFAAMYYLLEEEKEGRTNVPGSRLKLPSRDVTVLLENYGKFEKGYLIFVVRFLFGLVNQERTSYLEKKLSCKISQQIRLELLKWIEVKAKAKKLQIQPSQLELFYCLYEMQEEDFVQRAMDYFPKIEINLSTRMDHMVSSFCIENCHRVESLSLGFLHNMPKEEEEEEKEGRHLDMVQCVLPSSSHAACSHGLGRCGLSHECCFDISLVLSSNQKLVELDLSDNALGDFGIRLLCVGLKHLLCNLKKLWLVNSGLTSVCCSALSSVLSTNQNLTHLYLRGNTLGDKGIKLLCEGLLHPDCKLQVLELDNCNLTSHCCWDLSTLLTSSQSLRKLSLGNNDLGDLGVMMFCEVLKQQSCLLQNLGLSEMYFNYETKSALETLQEEKPELTVVFEPSW

SEQ ID NO: 194 - DNA, 3309 bp, Homo sapiens
ttcagcccctctcccgggctgcgcctccgcactccgggcccgggcagaagggggtgcgcctcggccccaccacccagggagcagccgagctgaaaggccgggaaccgcggcttgcggggaccacagctcccgaaagcgacgttcggccaccggaggagcgggagccaagcaggcggagctcggcgggagaggtgcgggccgaatccgagccgagcggagaggaatccggcagtagagagcggactccagccggcggaccctgcagccctcgcctgggacagcggcgcgctgggcaggcgcccaagagagcatcgagcagcggaacccgcgaagccggcccgcagccgcgacccgcgcagcctgccgctctcccgccgccggtccgggcagcatgaggcgcgcggcgctctggctctggctgtgcgcgctggcgctgagcctgcagccggccctgccgcaaattgtggctactaatttgccccctgaagatcaagatggctctggggatgactctgacaacttctccggctcaggtgcaggtgctttgcaagatatcaccttgtcacagcagaccccctccacttggaaggacacgcagctcctgacggctattcccacgtctccagaacccaccggcctggaggctacagctgcctccacctccaccctgccggctggagaggggcccaaggagggagaggctgtagtcctgccagaagtggagcctggcctcaccgcccgggagcaggaggccaccccccgacccagggagaccacacagctcccgaccactcatcaggcctcaacgaccacagccaccacggcccaggagcccgccacctcccacccccacagggacatgcagcctggccaccatgagacctcaacccctgcaggacccagccaagctgaccttcacactccccacacagaggatggaggtccttctgccaccgagagggctgctgaggatggagcctccagtcagctcccagcagcagagggctctggggagcaggacttcacctttgaaacctcgggggagaatacggctgtagtggccgtggagcctgaccgccggaaccagtccccagtggatcagggggccacgggggcctcacagggcctcctggacaggaaagaggtgctgggaggggtcattgccggaggcctcgtggggctcatctttgctgtgtgcctggtgggtttcatgctgtaccgcatgaagaagaaggacgaaggcagctactccttggaggagccgaaacaagccaacggcggggcctaccagaagcccaccaaacaggaggaattctatgcctgacgcgggagccatgcgccccctccgccctgccactcactaggcccccacttgcctcttccttgaagaactgcaggccctggcctcccctgccaccaggccacctccccagcattccagcccctctggtcgctcctgcccacggagtcgtggggtgtgctgggagctccactctgcttctctgacttctgcctggagacttagggcaccaggggtttctcgcataggacctttccaccacagccagcacctggcatcgcaccattctgactcggtttctccaaactgaagcagcctctccccaggtccagctctggaggggagggggatccgactgctttggacctaaatggcctcatgtggctggaagatcctgcgggtggggcttggggctcacacacctgtagcacttactggtaggaccaagcatcttgggggggtggccgctgagtggcaggggacaggagtccactttgtttcgtggggaggtctaatctagatatcgacttgtttttgcacatgtttcctctagttctttgttcatagcccagtagaccttgttacttctgaggtaagttaagtaagttgattcggtatccccccatcttgcttccctaatctatggtcgggagacagcatcagggttaagaagactttttttttttttttttaaactaggagaaccaaatctggaagccaaaatgtaggcttagtttgtgtgttgtctcttgagtttgtcgctcatgtgtgcaacagggtatggactatctgtctggtggccccgtttctggtggtctgttggcaggctggccagtccaggctgccgtggggccgccgcctctttcaagcagtcgtgcctgtgtccatgcgctcagggccatgctgaggcctgggccgctgccacgttggagaagcccgtgtgagaagtgaatgctgggactcagccttcagacagagaggactgtagggagggcggcaggggcctggagatcctcctgcagaccacgcccgtcctgcctgtggcgccgtctccaggggctgcttcctcctggaaattgacgaggggtgtcttgggcagagctggctctgagcgcctccatccaaggccaggttctccgttagctcctgtggccccaccctgggccctgggctggaatcaggaatattttccaaagagtgatagtcttttgcttttggcaaaactctacttaatccaatgggtttttccctgtacagtagattttccaaatgtaataaactttaatataaagtagtcctgtgaatgccactgccttcgcttcttgcctctgtgctgtgtgtgacgtgaccggacttttctgcaaacaccaacatgttgggaaacttggctcgaatctctgtgccttcgtctttcccatggggagggattctggttccagggtccctctgtgtatttgcttttttgttttggctgaaattctcctggaggtcggtaggttcagccaaggttttataaggctgatgtcaatttctgtgttgccaagctccaagccccatcttctaaatggcaaaggaaggtggatggccccagcacagcttgacctgaggctgtggtcacagcggaggtgtggagccgaggcctaccccgcagacaccttggacatcctcctcccacccggctgcagaggccagaggcccccagcccagggctcctgcacttacttgcttatttgacaacgtttcagcgactccgttggccactccgagaggtgggccagtctgtggatcagagatgcaccaccaagccaagggaacctgtgtccggtattcgatactgcgactttctgcctggagtgtatgactgcacatgactcgggggtggggaaaggggtcggctgaccatgctcatctgctggtccgtgggacggtgcccaagccagaggctgggttcatttgtgtaacgacaataaacggtacttgtcatttcgggcaaaaaaaaaaaaaaaaaa

SEQ ID NO: 195 - protein, 310 aa, Homo sapiens
MRRAALWLWLCALALSLQPALPQIVATNLPPEDQDGSGDDSDNFSGSGAGALQDITLSQQTPSTWKDTQLLTAIPTSPEPTGLEATAASTSTLPAGEGPKEGEAVVLPEVEPGLTAREQEATPRPRETTQLPTTHQASTTTATTAQEPATSHPHRDMQPGHHETSTPAGPSQADLHTPHTEDGGPSATERAAEDGASSQLPAAEGSGEQDFTFETSGENTAVVAVEPDRRNQSPVDQGATGASQGLLDRKEVLGGVIAGGLVGLIFAVCLVGFMLYRMKKKDEGSYSLEEPKQANGGAYQKPTKQEEFYA

SEQ ID NO: 196 - DNA, 3217 bp, Homo sapiens
ggccgggagacctggcggagctgggggtggggggccagtttttgcaacggctaaggaagggcctgtgggtttattataaggcggagctcggcgggagaggtgcgggccgaatccgagccgagcggagaggaatccggcagtagagagcggactccagccggcggaccctgcagccctcgcctgggacagcggcgcgctgggcaggcgcccaagagagcatcgagcagcggaacccgcgaagccggcccgcagccgcgacccgcgcagcctgccgctctcccgccgccggtccgggcagcatgaggcgcgcggcgctctggctctggctgtgcgcgctggcgctgagcctgcagccggccctgccgcaaattgtggctactaatttgccccctgaagatcaagatggctctggggatgactctgacaacttctccggctcaggtgcaggtgctttgcaagatatcaccttgtcacagcagaccccctccacttggaaggacacgcagctcctgacggctattcccacgtctccagaacccaccggcctggaggctacagctgcctccacctccaccctgccggctggagaggggcccaaggagggagaggctgtagtcctgccagaagtggagcctggcctcaccgcccgggagcaggaggccaccccccgacccagggagaccacacagctcccgaccactcatcaggcctcaacgaccacagccaccacggcccaggagcccgccacctcccacccccacagggacatgcagcctggccaccatgagacctcaacccctgcaggacccagccaagctgaccttcacactccccacacagaggatggaggtccttctgccaccgagagggctgctgaggatggagcctccagtcagctcccagcagcagagggctctggggagcaggacttcacctttgaaacctcgggggagaatacggctgtagtggccgtggagcctgaccgccggaaccagtccccagtggatcagggggccacgggggcctcacagggcctcctggacaggaaagaggtgctgggaggggtcattgccggaggcctcgtggggctcatctttgctgtgtgcctggtgggtttcatgctgtaccgcatgaagaagaaggacgaaggcagctactccttggaggagccgaaacaagccaacggcggggcctaccagaagcccaccaaacaggaggaattctatgcctgacgcgggagccatgcgccccctccgccctgccactcactaggcccccacttgcctcttccttgaagaactgcaggccctggcctcccctgccaccaggccacctccccagcattccagcccctctggtcgctcctgcccacggagtcgtggggtgtgctgggagctccactctgcttctctgacttctgcctggagacttagggcaccaggggtttctcgcataggacctttccaccacagccagcacctggcatcgcaccattctgactcggtttctccaaactgaagcagcctctccccaggtccagctctggaggggagggggatccgactgctttggacctaaatggcctcatgtggctggaagatcctgcgggtggggcttggggctcacacacctgtagcacttactggtaggaccaagcatcttgggggggtggccgctgagtggcaggggacaggagtccactttgtttcgtggggaggtctaatctagatatcgacttgtttttgcacatgtttcctctagttctttgttcatagcccagtagaccttgttacttctgaggtaagttaagtaagttgattcggtatccccccatcttgcttccctaatctatggtcgggagacagcatcagggttaagaagactttttttttttttttttaaactaggagaaccaaatctggaagccaaaatgtaggcttagtttgtgtgttgtctcttgagtttgtcgctcatgtgtgcaacagggtatggactatctgtctggtggccccgtttctggtggtctgttggcaggctggccagtccaggctgccgtggggccgccgcctctttcaagcagtcgtgcctgtgtccatgcgctcagggccatgctgaggcctgggccgctgccacgttggagaagcccgtgtgagaagtgaatgctgggactcagccttcagacagagaggactgtagggagggcggcaggggcctggagatcctcctgcagaccacgcccgtcctgcctgtggcgccgtctccaggggctgcttcctcctggaaattgacgaggggtgtcttgggcagagctggctctgagcgcctccatccaaggccaggttctccgttagctcctgtggccccaccctgggccctgggctggaatcaggaatattttccaaagagtgatagtcttttgcttttggcaaaactctacttaatccaatgggtttttccctgtacagtagattttccaaatgtaataaactttaatataaagtagtcctgtgaatgccactgccttcgcttcttgcctctgtgctgtgtgtgacgtgaccggacttttctgcaaacaccaacatgttgggaaacttggctcgaatctctgtgccttcgtctttcccatggggagggattctggttccagggtccctctgtgtatttgcttttttgttttggctgaaattctcctggaggtcggtaggttcagccaaggttttataaggctgatgtcaatttctgtgttgccaagctccaagccccatcttctaaatggcaaaggaaggtggatggccccagcacagcttgacctgaggctgtggtcacagcggaggtgtggagccgaggcctaccccgcagacaccttggacatcctcctcccacccggctgcagaggccagaggcccccagcccagggctcctgcacttacttgcttatttgacaacgtttcagcgactccgttggccactccgagaggtgggccagtctgtggatcagagatgcaccaccaagccaagggaacctgtgtccggtattcgatactgcgactttctgcctggagtgtatgactgcacatgactcgggggtggggaaaggggtcggctgaccatgctcatctgctggtccgtgggacggtgcccaagccagaggctgggttcatttgtgtaacgacaataaacggtacttgtcatttcgggcaaaaaaaaaaaaaaaaaa

SEQ ID NO: 197 - protein, 310 aa, Homo sapiens; identical to SEQ ID NO: 195

SEQ ID NO: 198 - DNA, 5063 bp, Homo sapiens
atggggctgcggccaggcattttcctcctggagctgctgctgcttctggggcaagggacccctcagatccatacctctcctagaaagagtacattggaagggcagctatggccagagaccctgaagaattctccattcccatgcaacccaaataaattaggagtgaatatgccttctaaatcagttcactctctgaagccttctgatattaaatttgtggcagccattggcaatctggaaattcctccagacccagggacgggcgatctggagaagcaagactggactgaaaggccacagcaggtgtgcatgggagtgatgacagtcctttcagacatcatcagatatttcagtccttctgttccaatgcctgtgtgccacactggaaagagagtcataccccacgatggtgctgaagacttgtggattcaggctcaagaactggtgagaaacatgaaagagaacctgcaacttgactttcaatttgactggaagctcatcaatgtgttcttcagtaatgcaagccagtgttacctgtgcccctctgctcaacagaatgggcttgcggcgggcggcgtggatgagctgatgggggtgctggactacctgcagcaggaggtccccagagcatttgtaaacctggtggacctctctgaggttgcagaggtctctcgtcagtatcacggcacttggctcagccctgcaccagagccctgtaattgctcagaggagaccacccggctggccaaggtggtgatgcagtggtcttatcaggaagcctggaacagcctcctggcctccagcaggtacagtgagcaggagtccttcaccgtggttttccagcctttcttctatgagaccaccccatctctacactcggaggacccccgactccaggattctaccacgctggcctggcatctctggaataggatgatggagccagcaggagagaaagatgagccattgagtgtaaaacacgggaggccaatgaagtgtccctctcaggagagcccctatctgttcagctacagaaacagcaactacctgaccagactgcagaaaccccaagacaagcttgaggtaagagaaggagcggaaatcagatgtcctgacaaagacccctccgatacggttcccacctcagttcataggctgaagccggctgacatcaacgtaattggagccctgggtgactctctcacggcaggcaatggggccgggtccacacctgggaacgtcttggacgtcttgactcagtaccgaggcctgtcctggagcgtcggcggagatgagaacatcggcaccgttaccaccctggcgaacatcctccgggaattcaacccttccctgaagggcttctctgttggcactgggaaagaaaccagtcctaatgccttcttaaaccaggctgtggcaggaggccgagctgaggatctacctgtccaggccaggaggctggtggacctgatgaagaatgacacgaggatacactttcaggaagactggaagataataaccctgtttataggcggcaatgacctctgtgatttctgcaatgatctggtccactattctccccagaacttcacagacaacattggaaaggccctggacatcctccatgctgaggttcctcgggcatttgtgaacctggtgacggtgcttgagatcgtcaacctgagggagctgtaccaggagaaaaaagtctactgcccaaggatgatcctcaggtctctgtgtccctgtgtcctgaagtttgatgataactcaacagaacttgctaccctcatcgaattcaacaagaagtttcaggagaagacccaccaactgattgagagtgggcgatatgacacaagggaagattttactgtggttgtgcagccgttctttgaaaacgtggacatgccaaagacctcggaaggattgcctgacaactctttcttcgctcctgactgtttccacttcagcagcaagtctcactcccgagcagccagtgctctctggaacaatatgctggagcctgttggccagaagacgactcgtcataagtttgaaaacaagatcaatatcacatgtccgaaccaggtccagccgtttctgaggacctacaagaacagcatgcagggtcatgggacctggctgccatgcagggacagagccccttctgccttgcaccctacctcagtgcatgccctgagacctgcagacatccaagttgtggctgctctgggggattctctgaccgctggcaatggaattggctccaaaccagacgacctccccgatgtcaccacacagtatcggggactgtcatacagtgcaggaggggacggctccctggagaatgtgaccaccttacctaatatccttcgggagtttaacagaaacctcacaggctacgccgtgggcacgggtgatgccaatgacacgaatgcattcctcaatcaagctgttcccggagcaaaggctgaggatcttatgagccaagtccaaactctgatgcagaagatgaaagatgatcatagagtaaatttccatgaagactggaaggtcatcacagtgctgatcggaggcagcgatttatgtgactactgcacagattcgaatctgtattctgcagccaactttgttgaccatctccgcaatgccttggacgtcctgcatagagaggtgcccagagtcctggtcaacctcgtggacttcctgaaccccactatcatgcggcaggtgttcctgggaaacccagacaagtgcccagtgcagcaggccagcgttttgtgtaactgcgttctgaccctgcgggagaactcccaagagctagccaggctggaggccttcagccgagcctaccggagcagcatgcgcgagctggtggggtcaggccgctatgacacgcaggaggacttctctgtggtgctgcagcccttcttccagaacatccagctccctgtcctggcggatgggctcccagatacgtccttctttgccccagactgcatccacccaaatcagaaattccactcccagctggccagagccctttggaccaatatgcttgaaccacttggaagcaaaacagagaccctggacctgagagcagagatgcccatcacctgtcccactcagaatgagcccttcctgagaacccctcggaatagtaactacacgtaccccatcaagccagccattgagaactggggcagtgacttcctgtgtacagagtggaaggcttccaatagtgttccaacctctgtccaccagctccgaccagcagacatcaaagtggtggccgccctgggtgactctctgactacagcagtgggagctcgaccaaacaactccagtgacctacccacatcttggaggggactctcttggagcattggaggggatgggaacttggagactcacaccacactgcccaacattctgaagaagttcaacccttacctccttggcttctctaccagcacctgggaggggacagcaggactaaatgtggcagcggaaggggccagagctagggacatgccagcccaggcctgggacctggtagagcgaatgaaaaacagccccgacatcaacctggagaaagactggaagctggtcacactcttcattggggtcaacgacttgtgtcattactgtgagaatccggaggcccacttggccacggaatatgttcagcacatccaacaggccctggacatcctctctgaggagctcccaagggctttcgtcaacgtggtggaggtcatggagctggctagcctgtaccagggccaaggcgggaaatgtgccatgctggcagctcagaacaactgcacttgcctcagacactcgcaaagctccctggagaagcaagaactgaagaaagtgaactggaacctccagcatggcatctccagtttctcctactggcaccaatacacacagcgtgaggactttgcggttgtggtgcagcctttcttccaaaacacactcaccccactgaacgagagaggggacactgacctcaccttcttctccgaggactgttttcacttctcagaccgcgggcatgccgagatggccatcgcactctggaacaacatgctggaaccagtgggccgcaagactacctccaacaacttcacccacagccgagccaaactcaagtgcccctctcctgagagcccttacctctacaccctgcggaacagccgattgctcccagaccaggctgaagaagcccccgaggtgctctactgggctgtcccagtggcagcgggagtcggccttgtggtgggcatcatcgggacagtggtctggaggtgcaggagaggtggccggagggaagatcctccaatgagcctgcgcactgtggccctctaggcccgggggtgggtcctcaccctaaactccctatagccactctcttcaccgccctctgccccagccactcccggccaccaggacatgcttcaatgcctggtgccataggaagcccaggggacagtcacaacttcttggggcctgggcttcttccaggcctatgctcctggaatggatacatttaaataaagtccaaagctattttattcctgggtttgcctgcgtgaagcactcaccttccatctcttgtgcagcccaggtgtgggagctgccactttttgtggcctgcctccagcagggctgcccaagccacgaccaaccagagcccaaactgcctgccaccacgagcatatcctcaagtcaccaaacccactatttcaaaggcagaaaaaatgctggtcaccaggtggtggctggaattttggagctggctggttgccattcagtccaatccaacacatacctattaagcaactgttttgtatccaggacaatgcgaagcactgaggtgcctcctaggctgtgcatgtcgcagcctggcagagaggtcaaactccttcaataaccaagaagccacgtgatgatgtgtaactactagggcatcagtaggtaaatgtgtctgattgttttaaagaatagaaagggttcttcggggaaagtttcttgggggagagcaaccttcacat

SEQ ID NO: 199 - protein, 1458 aa, Homo sapiens
MGLRPGIFLLELLLLLGQGTPQIHTSPRKSTLEGQLWPETLKNSPFPCNPNKLGVNMPSKSVHSLKPSDIKFVAAIGNLEIPPDPGTGDLEKQDWTERPQQVCMGVMTVLSDIIRYFSPSVPMPVCHTGKRVIPHDGAEDLWIQAQELVRNMKENLQLDFQFDWKLINVFFSNASQCYLCPSAQQNGLAAGGVDELMGVLDYLQQEVPRAFVNLVDLSEVAEVSRQYHGTWLSPAPEPCNCSEETTRLAKVVMQWSYQEAWNSLLASSRYSEQESFTVVFQPFFYETTPSLHSEDPRLQDSTTLAWHLWNRMMEPAGEKDEPLSVKHGRPMKCPSQESPYLFSYRNSNYLTRLQKPQDKLEVREGAEIRCPDKDPSDTVPTSVHRLKPADINVIGALGDSLTAGNGAGSTPGNVLDVLTQYRGLSWSVGGDENIGTVTTLANILREFNPSLKGFSVGTGKETSPNAFLNQAVAGGRAEDLPVQARRLVDLMKNDTRIHFQEDWKIITLFIGGNDLCDFCNDLVHYSPQNFTDNIGKALDILHAEVPRAFVNLVTVLEIVNLRELYQEKKVYCPRMILRSLCPCVLKFDDNSTELATLIEFNKKFQEKTHQLIESGRYDTREDFTVVVQPFFENVDMPKTSEGLPDNSFFAPDCFHFSSKSHSRAASALWNNMLEPVGQKTTRHKFENKINITCPNQVQPFLRTYKNSMQGHGTWLPCRDRAPSALHPTSVHALRPADIQVVAALGDSLTAGNGIGSKPDDLPDVTTQYRGLSYSAGGDGSLENVTTLPNILREFNRNLTGYAVGTGDANDTNAFLNQAVPGAKAEDLMSQVQTLMQKMKDDHRVNFHEDWKVITVLIGGSDLCDYCTDSNLYSAANFVDHLRNALDVLHREVPRVLVNLVDFLNPTIMRQVFLGNPDKCPVQQASVLCNCVLTLRENSQELARLEAFSRAYRSSMRELVGSGRYDTQEDFSVVLQPFFQNIQLPVLADGLPDTSFFAPDCIHPNQKFHSQLARALWTNMLEPLGSKTETLDLRAEMPITCPTQNEPFLRTPRNSNYTYPIKPAIENWGSDFLCTEWKASNSVPTSVHQLRPADIKVVAALGDSLTTAVGARPNNSSDLPTSWRGLSWSIGGDGNLETHTTLPNILKKFNPYLLGFSTSTWEGTAGLNVAAEGARARDMPAQAWDLVERMKNSPDINLEKDWKLVTLFIGVNDLCHYCENPEAHLATEYVQHIQQALDILSEELPRAFVNVVEVMELASLYQGQGGKCAMLAAQNNCTCLRHSQSSLEKQELKKVNWNLQHGISSFSYWHQYTQREDFAVVVQPFFQNTLTPLNERGDTDLTFFSEDCFHFSDRGHAEMAIALWNNMLEPVGRKTTSNNFTHSRAKLKCPSPESPYLYTLRNSRLLPDQAEEAPEVLYWAVPVAAGVGLVVGIIGTVVWRCRRGGRREDPPMSLRTVAL

SEQ ID NO: 200 - DNA, 4872 bp, Homo sapiens
ggcgttacgggatgaattaacggcgggttccgcacggaggttgtgacccctacggagccccagcttgcccacgcaccccactcggcgtcgcgcggcgtgccctgcttgtcacagaatcatggtgtcatggaaagggatttactttatactgactctgttttggggaagcttttttggaagcattttcatgctgagtccctttttacctttgatgtttgtaaacccatcttggtatcgctggatcaacaaccgccttgtggcaacatggctcaccctacctgtggcattattggagaccatgtttggtgtaaaagtgattataactggggatgcatttgttcctggagaaagaagtgtcattatcatgaaccatcggacaagaatggactggatgttcctgtggaattgcctgatgcgatatagctacctcagattggagaaaatttgcctcaaagcgagtctcaaaggtgttcctggatttggttgggccatgcaggctgctgcctatatcttcattcataggaaatggaaggatgacaagagccatttcgaagacatgattgattacttttgtgatattcacgaaccacttcaactcctcatattcccagaagggactgatctcacagaaaacagcaagtctcgaagtaatgcatttgctgaaaaaaatggacttcagaaatatgaatatgttttacatccaagaactacaggctttacttttgtggtagaccgtctaagagaaggtaagaaccttgatgctgtccatgatatcactgtggcgtatcctcacaacattcctcaatcagagaagcacctcctccaaggagactttcccagggaaatccactttcacgtccaccggtatccaatagacaccctccccacatccaaggaggaccttcaactctggtgccacaaacggtgggaagagaaagaagagaggctgcgttccttctatcaaggggagaagaatttttattttaccggacagagtgtcattccaccttgcaagtctgaactcagggtccttgtggtcaaattgctctctatactgtattggaccctgttcagccctgcaatgtgcctactcatatatttgtacagtcttgttaagtggtattttataatcaccattgtaatctttgtgctgcaagagagaatatttggtggactggagatcatagaacttgcatgttaccgacttttacacaaacagccacatttaaattcaaagaaaaatgagtaagattataaggtttgccatgtgaaaacctagagcatattttggaaatgttctaaacctttctaagctcagatgcatttttgcatgactatgtcgaatatttcttactgccatcattatttgttaaagatattttgcacttaattttgtgggaaaaatattgctacaattttttttaatctctgaatgtaatttcgatactgtgtacatagcagggagtgatcggggtgaaataacttgggccagaatattattaaacaatcatcaggcttttagcgacaaggaacacacacatttttcttaaaggcccaatcctaacagactccccgtaccagaggcagatctggaactcgtcaacaacagcccggatcacatgctgttactggactgcccaggtcacctcattgaggtgagcgctgtccctccaggtactcaggcaggtggtgcccaggctccctcccttggcgtccttcttcctgcgccaaacccatctcatccttaagatcagaaaatggaaccccctttgtcgtgaaaccgatcaagcattttgacaggaagcccttcattattcataacattgtatgctgaccaagacgtcagaagaccacctgtgcccttttctctcgtggaagataaaacctggactcagggagcaaccacaggctctccactttgaaactttagtttgaattttaaaagataggaagtaatacagtttaagttcctttctcacactcagtattgcatgcttagtgctggttttcttacaacattttggcaggtgtagctttttctgttaaaaatggtatacatgaagtcacatacttttttaaaggaacactcggaacattctgtcattccagtcagaaactgtcttttgaaatatttctttacaacctaccaaaaaaggaaggttgttttttctacatgtgcttgggtatctaacatctaccattaaaacaacaaatggcttgcagacagggcagtaatggtttatcctaaattactcaaccccttgtagccttgacaaattttaccttaaaaccaaaatgaaacacaaaaattaatccttaataatgatagcaagtgatctttctttttagttttagccttcctttttcaatagtaatatttaaacccacttttgaccaattgtttgcccaaatattcttgtcatttggagtcagtggaaaatccagcacaccaagcaccagtcttcttctgaggcaaaagaaaagtgttgtcattttcactctgttggagctgcacacttttttttctttttttttttctttttttttttgtcgtgtaagaaggatgctggtcagagctgcagaaaatatgaggcaattaaaagtctttagctgttagcaaacctgttagttttacttctgcattgaaccagcctcagaagctacttactgctttatgtactctttgggcattaatgccttctctgtaattatatctcgtttttgcttgacagtgacctacccaataattgcatcgtgcattgccatgaaaggtaaacacattgtgaactgaacttaccaagcagattctgtgagaaagcactggttgaggctgaacactgttgacacatcatttttattggaagagtattaactggtgcctcttctgaaacacaccaacccatattcctctgctcccccaaagctgtttctgatcctgctgggagcaactaactagttattatgcacatctgctccagacccagctctttaacttcatggttttacagcttgttttttctttttcttttctttttttttttttttttttaaaaaagcacctttttttgttgtttccccttaataaaagaggtttctaatttatgtttctctaagatttcctttggttgtatttagaaacacaaatagttttataatcaggattgcatttgtgctgggtaaaagaggagagctgtgctttctaccccaaagttgttggtaatggagccggtctgcccttcctacaaactcaagaggctcattgttcaaggtgtaacaacatttaattgcatgtcctctaacgctttgaaacctttagagggaagatcctcattttttacaattttgttccttttcatcatagaaaacatgtttaagataaaatacaaactttacctaccccaaattcataaagtacatttagtgctgtatagcactaaaacttagagatacagacactgtacttactttttaagaattagagacagtaactccaaaaataattgtccttttttctttctttctttttttacaataaggctcttgaaaattgtcattacttgtgttttcctatacattcatctgtgtgaaagcctttttcttctttgatttaaaaaaattaactatacagttaatggtttagaacttagaactacttagaattaatgctaaagtgtcaggaagaaattaatttagcttcaataattgtgactggcctcaggaattctcccttccacacctgcccacctcacctcactgcaccgcaccgcaccagagccagagcagctgcttgtctgcagcaggacacagttcctacatacgtttcagttctttcatggtaagctcaatggactttgaattgtttacagtgctgtatgtccaattgttaaatgtaccattctgaacgatgttaaagcaagtgtggtttatttatggcatgaaccatgtaacttgaaatatgaacttacaaggaggggcactcattaggtaacaagttcttacaccaaacttccttgatgaaataagccaaaataatcctaaaattcattagaagaacttgataaaagactcaaataaatgttagaaagagcccgtaattttaggactcctataaaattcttccttgtttgttaatgctattaaaactcagattcaagggaaataccagcttccacttgagtcactttgaaatagttaattcaacagcaccatgttagaaatatattggcagccaagactctgaactctgcagaaacatttgtttcacccagacttcaaactctagccctgactatgatgcccctgtgtgcatttacaataaagactccaacggagggagcctgttggtgttaaattgtttacatttctttatacaaataatgtgctttcagtgccttagttacagctccctttctgtttcttgttccaaggattctgtagtatgtagtgtgtttcttaggtaaagtctctttttgctactgaaagggaaatggtctctaaacactggtcactgtagcaggtaaacactactctaacgtggagaaatgagcttcatgctgaggtagtggttgccttagagctgttatttatgctgtagaaaacgaaaatggttttgctacctgataagcttcagattagatatagccctaaagttatcctgtacctgcattaaattttcattttagaagagaatcttggttttggtaattcatttttttttaagatcattatgtgcaaaacaccaagttttaaaaataactcacagaatggccttagttttcaatgtctgatggtatatttgtgagttgtgttatctgtaatatacatcccagaataaaggagtgaattaaatagtttaaaaaaaaaaaaaaaaaa

SEQ ID NO: 201 - protein, 376 aa, Homo sapiens
MVSWKGIYFILTLFWGSFFGSIFMLSPFLPLMFVNPSWYRWINNRLVATWLTLPVALLETMFGVKVIITGDAFVPGERSVIIMNHRTRMDWMFLWNCLMRYSYLRLEKICLKASLKGVPGFGWAMQAAAYIFIHRKWKDDKSHFEDMIDYFCDIHEPLQLLIFPEGTDLTENSKSRSNAFAEKNGLQKYEYVLHPRTTGFTFVVDRLREGKNLDAVHDITVAYPHNIPQSEKHLLQGDFPREIHFHVHRYPIDTLPTSKEDLQLWCHKRWEEKEERLRSFYQGEKNFYFTGQSVIPPCKSELRVLVVKLLSILYWTLFSPAMCLLIYLYSLVKWYFIITIVIFVLQERIFGGLEIIELACYRLLHKQPHLNSKKNE

SEQ ID NO: 202 - DNA, 5077 bp, Homo sapiens
ggccggacgcctccgcgttacgggatgaattaacggcgggttccgcacggaggttgtgacccctacggagccccagcttgcccacgcaccccactcggcgtcgcgcggcgtgccctgcttgtcacaggtgggaggctggaactatcaggctgaaaaacagagtgggtactctcttctgggaagctggcaacaaatggatgatgtgatatatgcattccaggggaagggaaattgtggtgcttctgaacccatggtcaattaacgaggcagtttctagctactgcacgtacttcataaagcaggactctaaaagctttggaatcatggtgtcatggaaagggatttactttatactgactctgttttggggaagcttttttggaagcattttcatgctgagtccctttttacctttgatgtttgtaaacccatcttggtatcgctggatcaacaaccgccttgtggcaacatggctcaccctacctgtggcattattggagaccatgtttggtgtaaaagtgattataactggggatgcatttgttcctggagaaagaagtgtcattatcatgaaccatcggacaagaatggactggatgttcctgtggaattgcctgatgcgatatagctacctcagattggagaaaatttgcctcaaagcgagtctcaaaggtgttcctggatttggttgggccatgcaggctgctgcctatatcttcattcataggaaatggaaggatgacaagagccatttcgaagacatgattgattacttttgtgatattcacgaaccacttcaactcctcatattcccagaagggactgatctcacagaaaacagcaagtctcgaagtaatgcatttgctgaaaaaaatggacttcagaaatatgaatatgttttacatccaagaactacaggctttacttttgtggtagaccgtctaagagaaggtaagaaccttgatgctgtccatgatatcactgtggcgtatcctcacaacattcctcaatcagagaagcacctcctccaaggagactttcccagggaaatccactttcacgtccaccggtatccaatagacaccctccccacatccaaggaggaccttcaactctggtgccacaaacggtgggaagagaaagaagagaggctgcgttccttctatcaaggggagaagaatttttattttaccggacagagtgtcattccaccttgcaagtctgaactcagggtccttgtggtcaaattgctctctatactgtattggaccctgttcagccctgcaatgtgcctactcatatatttgtacagtcttgttaagtggtattttataatcaccattgtaatctttgtgctgcaagagagaatatttggtggactggagatcatagaacttgcatgttaccgacttttacacaaacagccacatttaaattcaaagaaaaatgagtaagattataaggtttgccatgtgaaaacctagagcatattttggaaatgttctaaacctttctaagctcagatgcatttttgcatgactatgtcgaatatttcttactgccatcattatttgttaaagatattttgcacttaattttgtgggaaaaatattgctacaattttttttaatctctgaatgtaatttcgatactgtgtacatagcagggagtgatcggggtgaaataacttgggccagaatattattaaacaatcatcaggcttttagcgacaaggaacacacacatttttcttaaaggcccaatcctaacagactccccgtaccagaggcagatctggaactcgtcaacaacagcccggatcacatgctgttactggactgcccaggtcacctcattgaggtgagcgctgtccctccaggtactcaggcaggtggtgcccaggctccctcccttggcgtccttcttcctgcgccaaacccatctcatccttaagatcagaaaatggaaccccctttgtcgtgaaaccgatcaagcattttgacaggaagcccttcattattcataacattgtatgctgaccaagacgtcagaagaccacctgtgcccttttctctcgtggaagataaaacctggactcagggagcaaccacaggctctccactttgaaactttagtttgaattttaaaagataggaagtaatacagtttaagttcctttctcacactcagtattgcatgcttagtgctggttttcttacaacattttggcaggtgtagctttttctgttaaaaatggtatacatgaagtcacatacttttttaaaggaacactcggaacattctgtcattccagtcagaaactgtcttttgaaatatttctttacaacctaccaaaaaaggaaggttgttttttctacatgtgcttgggtatctaacatctaccattaaaacaacaaatggcttgcagacagggcagtaatggtttatcctaaattactcaaccccttgtagccttgacaaattttaccttaaaaccaaaatgaaacacaaaaattaatccttaataatgatagcaagtgatctttctttttagttttagccttcctttttcaatagtaatatttaaacccacttttgaccaattgtttgcccaaatattcttgtcatttggagtcagtggaaaatccagcacaccaagcaccagtcttcttctgaggcaaaagaaaagtgttgtcattttcactctgttggagctgcacacttttttttctttttttttttctttttttttttgtcgtgtaagaaggatgctggtcagagctgcagaaaatatgaggcaattaaaagtctttagctgttagcaaacctgttagttttacttctgcattgaaccagcctcagaagctacttactgctttatgtactctttgggcattaatgccttctctgtaattatatctcgtttttgcttgacagtgacctacccaataattgcatcgtgcattgccatgaaaggtaaacacattgtgaactgaacttaccaagcagattctgtgagaaagcactggttgaggctgaacactgttgacacatcatttttattggaagagtattaactggtgcctcttctgaaacacaccaacccatattcctctgctcccccaaagctgtttctgatcctgctgggagcaactaactagttattatgcacatctgctccagacccagctctttaacttcatggttttacagcttgttttttctttttcttttctttttttttttttttttttaaaaaagcacctttttttgttgtttccccttaataaaagaggtttctaatttatgtttctctaagatttcctttggttgtatttagaaacacaaatagttttataatcaggattgcatttgtgctgggtaaaagaggagagctgtgctttctaccccaaagttgttggtaatggagccggtctgcccttcctacaaactcaagaggctcattgttcaaggtgtaacaacatttaattgcatgtcctctaacgctttgaaacctttagagggaagatcctcattttttacaattttgttccttttcatcatagaaaacatgtttaagataaaatacaaactttacctaccccaaattcataaagtacatttagtgctgtatagcactaaaacttagagatacagacactgtacttactttttaagaattagagacagtaactccaaaaataattgtccttttttctttctttctttttttacaataaggctcttgaaaattgtcattacttgtgttttcctatacattcatctgtgtgaaagcctttttcttctttgatttaaaaaaattaactatacagttaatggtttagaacttagaactacttagaattaatgctaaagtgtcaggaagaaattaatttagcttcaataattgtgactggcctcaggaattctcccttccacacctgcccacctcacctcactgcaccgcaccgcaccagagccagagcagctgcttgtctgcagcaggacacagttcctacatacgtttcagttctttcatggtaagctcaatggactttgaattgtttacagtgctgtatgtccaattgttaaatgtaccattctgaacgatgttaaagcaagtgtggtttatttatggcatgaaccatgtaacttgaaatatgaacttacaaggaggggcactcattaggtaacaagttcttacaccaaacttccttgatgaaataagccaaaataatcctaaaattcattagaagaacttgataaaagactcaaataaatgttagaaagagcccgtaattttaggactcctataaaattcttccttgtttgttaatgctattaaaactcagattcaagggaaataccagcttccacttgagtcactttgaaatagttaattcaacagcaccatgttagaaatatattggcagccaagactctgaactctgcagaaacatttgtttcacccagacttcaaactctagccctgactatgatgcccctgtgtgcatttacaataaagactccaacggagggagcctgttggtgttaaattgtttacatttctttatacaaataatgtgctttcagtgccttagttacagctccctttctgtttcttgttccaaggattctgtagtatgtagtgtgtttcttaggtaaagtctctttttgctactgaaagggaaatggtctctaaacactggtcactgtagcaggtaaacactactctaacgtggagaaatgagcttcatgctgaggtagtggttgccttagagctgttatttatgctgtagaaaacgaaaatggttttgctacctgataagcttcagattagatatagccctaaagttatcctgtacctgcattaaattttcattttagaagagaatcttggttttggtaattcatttttttttaagatcattatgtgcaaaacaccaagttttaaaaataactcacagaatggccttagttttcaatgtctgatggtatatttgtgagttgtgttatctgtaatatacatcccagaataaaggagtgaattaaatagtttaaaaaaaaaaaaaaaaaa

SEQ ID NO: 203 - protein, 414 aa, Homo sapiens [sequence omitted]

SEQ ID NO: 204 - DNA, 2690 bp, Homo sapiens
agcagacaccagcactgctctttctccaagacggccggccatgctctcctcctctgccagtctcctccaccactctctaacctgagagcctgtggaacctgcccgtctcccctcctccatcagacacacctgcctaggaaacaggaaaggacctcggaagtcttctaaggagagtcatggcgtattaccaggagccttcagtggagacctccatcatcaagttcaaagaccaggactttaccaccttgcgggatcactgcctgagcatgggccggacgtttaaggatgagacattccctgcagcagattcttccataggccagaagctgctccaggaaaaacgcctctccaatgtgatatggaagcggccacaggatctaccagggggtcctcctcacttcatcctggatgatataagcagatttgacatccaacaaggaggcgcagctgactgctggttcctggcagcactgggatccttgactcagaacccacagtacaggcagaagatcctgatggtccaaagcttttcacaccagtatgctggcattttccgtttccggttctggcaatgtggccagtgggtggaagtggtgattgatgaccgcctacctgtccagggagataaatgcctctttgtgcgtcctcgccaccaaaaccaagagttctggccctgcctgctggagaaggcctatgccaagctgctcggatcctattccgatctgcactatggcttcctcgaggatgccctggtggacctcacaggaggcgtgatcaccaacatccatctgcactcttcccctgtggacctggtgaaggcagtgaagacagcgaccaaggcaggctccctgataacctgtgccactccaagtgggccaacagatacagcacaggcgatggagaatgggctggtgagtctccatgcctacactgtgactggggctgagcagattcaataccgaaggggctgggaagaaattatctccctgtggaacccctggggctggggcgaggccgaatggagagggcgctggagtgatgggtctcaggagtgggaggaaacctgtgatccgcggaaaagccagctacataagaaacgggaagatggcgagttttggatgtcgtgtcaagatttccaacagaaattcatcgccatgtttatatgtagcgaaattccaattaccctggaccatggaaacacactccacgaaggatggtcccaaataatgtttaggaagcaagtgattctaggaaacactgcaggaggacctcggaatgatgctcaattcaacttctctgtgcaagagccaatggaaggcaccaatgttgtcgtgtgcgtcacagttgctgtcacaccatcaaatttgaaagcagaagatgcaaaatttccactcgatttccaagtgattctggctggctcacagcggttccgggagaaatttccacccgtgtttttttcctcgttcagaaacactgtccaaagctcaaataataaattccgccgcaacttcaccatgacttaccatctgagccctgggaactatgttgtggttgcacagacacggagaaaatcagcggagttcttgctccgaatcttcctgaaaatgccagacagtgacaggcacctgagcagccatttcaacctcagaatgaagggaagcccttcagaacatggctcccaacaaagcattttcaacagatatgctcagcagaggctggacattgatgccacccagcttcagggccttctcaaccaggagcttctaacaggacctccaggggacatgttctccttagatgagtgccgcagcttggtggctctgatggaactgaaagtgaatgggcggctagaccaagaggagtttgcgcgactgtggaagcgccttgttcactaccagcatgttttccagaaggttcagacaagccctggagtcctcctgagctcggacttgtggaaggccatagagaatacagacttcctcagagggatcttcatcagccgtgagctgctgcatctggtgaccctcaggtacagcgacagcgtcggcagggtcagcttccccagcctggtctgcttcctgatgcggcttgaagccatggcaaagaccttccgcaacctctctaaggatggaaaaggactctacctgacagaaatggagtggatgagcctggtcatgtacaactgaagcaaagaggaaagcagacccatggctcaggacaagctcccagtgatcactcaagaatctggctctcattctaagaggctgtgctgcccagtatggtggttgtgataaatctaaaccagccctgcatgaaacagagtccaagctgtctcccaacagcctgggttcggtccttggctggcccaggcccagttaagcctgtggccaccaagcagctcatctgagcactttgggatgtattcagcctacgttgccctggaaaaggaagcaggagatgtctccctgtgggaaaggagaagagaagttgtctctgagtcccctgtcaccagttggattcatttcttggaagagccagaatgagccactttgaccaccctcgggtgctatgggtgacacaagagctgtccactgggtgtttgcagaataattacactatcttatgtctggatcctgatgatttcacagctaaatggcaaaaataaaacatgtttcccataaaaaaaaaaa

SEQ ID NO: 205 - protein, 669 aa, Homo sapiens
MAYYQEPSVETSIIKFKDQDFTTLRDHCLSMGRTFKDETFPAADSSIGQKLLQEKRLSNVIWKRPQDLPGGPPHFILDDISRFDIQQGGAADCWFLAALGSLTQNPQYRQKILMVQSFSHQYAGIFRFRFWQCGQWVEVVIDDRLPVQGDKCLFVRPRHQNQEFWPCLLEKAYAKLLGSYSDLHYGFLEDALVDLTGGVITNIHLHSSPVDLVKAVKTATKAGSLITCATPSGPTDTAQAMENGLVSLHAYTVTGAEQIQYRRGWEEIISLWNPWGWGEAEWRGRWSDGSQEWEETCDPRKSQLHKKREDGEFWMSCQDFQQKFIAMFICSEIPITLDHGNTLHEGWSQIMFRKQVILGNTAGGPRNDAQFNFSVQEPMEGTNVVVCVTVAVTPSNLKAEDAKFPLDFQVILAGSQRFREKFPPVFFSSFRNTVQSSNNKFRRNFTMTYHLSPGNYVVVAQTRRKSAEFLLRIFLKMPDSDRHLSSHFNLRMKGSPSEHGSQQSIFNRYAQQRLDIDATQLQGLLNQELLTGPPGDMFSLDECRSLVALMELKVNGRLDQEEFARLWKRLVHYQHVFQKVQTSPGVLLSSDLWKAIENTDFLRGIFISRELLHLVTLRYSDSVGRVSFPSLVCFLMRLEAMAKTFRNLSKDGKGLYLTEMEWMSLVMYN

SEQ ID NO: 206 - DNA, 2945 bp, Homo sapiens
ggaagccagaccagagagcgtgcgtgtttttcccagggtgccccgcgctgctgttatggccgcctccttgaggtagtatccgcacatggaattctagggccgcaggtgtatttacggtaactgtcgccactagatttcagcgcctttggactctcctgttttcactttcttttgttgactcccgtgtggccctcgtgggagcctgttttggctgcagcggtgtctggggtgatgtggaccccggagctggcaattctgaggggattccccactgaggctgagcggcagcaatggaaacaggagggggtcgtcggttcagagagtggatctttcctacaattgctgctggaagggaactatgaagccatattcttaaattcaatgactcaaaatatttttaattcaacaacaaccgctgaagaaaagattgatagctacctggagaagcaggtagtaacattcctggattactcaacagatttggacacaacggaaagacaacagttgatatttctacttggtgtgagcagtttgcaactttttgttcagagcaactggacggggccccctgttgacttacaccctcaggactttttgtcatctgttttgttccagcaattcagtgaggttaaaggactggatgcatttgttctgagcctgctcactctagatggtgaatcaatctacagcctgacctcgaagcctatactactgttattagcacgcattatcctagtgaatgtaagacataaactgacagctattcagagcttgccatggtggactttgagatgtgtgaatattcatcagcatttgcttgaggaacgctcacctctgctttttactcttgccgaaaactgtattgatcaagtgatgaaactacagaatctgtttgtagatgattcaggtcgatatttggctattcaattccatctggaatgtgcatatgtgtttttatattattatgagtacagaaaagcaaaagatcagttggatattgctaaggacatcagccaattacaaattgatttgacaggtgctttgggaaaaagaacacggttccaggaaaattatgtggcacaactgattctagatgtaagaagggaaggggatgtcctttcaaattgtgaattcactccagcacccactcctcaggaacatttaaccaagaatcttgagctcaatgatgacaccattctgaatgacataaagttagcagattgtgaacagttccagatgccggatctgtgtgctgaagagatcgctattattcttggaatctgcactaattttcaaaagaataacccagtgcacacattaactgaagtggagcttctggcatttacatcatgtttgctttcacaaccaaagttctgggccattcagacatcagccttgatcctccggacaaaacttgagaaaggaagtactcgccgagtggaacgggcaatgaggcagacacaggctcttgcagaccaatttgaagataaaactacatctgtattggaacgcctgaagattttctattgctgtcaagtaccacctcactgggccattcagcgccaacttgcaagtttgctctttgagttgggatgtaccagttcagcccttcagatatttgaaaagctagaaatgtgggaagatgttgtcatttgttatgaaagagccgggcagcacggaaaggcagaagaaatccttagacaagagctggagaaaaaagaaacgcctagtttatactgcttgcttggagatgtcctcggagaccattcttgctatgacaaggcctgggagttgtcccggtaccgcagtgctcgtgctcagcgctccaaagccctccttcatcttcggaataaggagtttcaagagtgtgtagagtgcttcgaacgctcggttaagattaatcccatgcagctcggggtgtggttttctctcggttgtgcctatttggccttggaagactatcaaggttcagcaaaggcatttcagcgctgtgtgactctagaacccgataatgctgaagcttggaacaatttgtcaacttcctatatccgattaaaacaaaaagtaaaagcttttagaactttacaagaagctctcaagtgtaactatgaacactggcagatttgggaaaactacatcctcaccagcactgacgttggggaattttcagaagccattaaagcttatcaccggctcttggacttacgtgacaaatacaaagatgttcaggtccttaaaattctagtcagggcagtgattgatgggatgactgatcgaagtggagatgttgcaactggcctcaaaggaaagctgcaggagttatttggcagagtgacttcaagagtgacaaatgatggagaaatctggaggctgtatgcccacgtatatggaaatgggcagagtgaaaagcctgatgaaaatgaaaaggcattccagtgcctctcaaaggcatacaagtgtgacacccagtccaattgttgggagaaagatattacatcatttaaggaagttgttcaaagagccttaggacttgcacatgtggccataaaatgcagtaaaaacaaatccagttcccaagaagctgtacaaatgctttcttctgttcgactcaatttacggggcttgttatctaaagcaaagcaactttttacagatgtggcaactggagaaatgtccagggaattagctgatgacataacagctatggacaccttagtgacagagctccaagacctaagcaaccagtttcgaaatcagtattgattctgctggaagcagattctggaaaaggtgctttcacctgctgttaaaagatacatctgtatatctgaaatgcaagatattgatttttaaaataaatttgttttatgacttaaaaaaaaaaaaaaaaaaaaaaaaaaaaaaaaaaaaaaaaaaaaaaaaaaaaaaaaaaaaaaaaaaaaaaa

SEQ ID NO: 207 - protein, 843 aa, Homo sapiens
MWTPELAILRGFPTEAERQQWKQEGVVGSESGSFLQLLLEGNYEAIFLNSMTQNIFNSTTTAEEKIDSYLEKQVVTFLDYSTDLDTTERQQLIFLLGVSSLQLFVQSNWTGPPVDLHPQDFLSSVLFQQFSEVKGLDAFVLSLLTLDGESIYSLTSKPILLLLARIILVNVRHKLTAIQSLPWWTLRCVNIHQHLLEERSPLLFTLAENCIDQVMKLQNLFVDDSGRYLAIQFHLECAYVFLYYYEYRKAKDQLDIAKDISQLQIDLTGALGKRTRFQENYVAQLILDVRREGDVLSNCEFTPAPTPQEHLTKNLELNDDTILNDIKLADCEQFQMPDLCAEEIAIILGICTNFQKNNPVHTLTEVELLAFTSCLLSQPKFWAIQTSALILRTKLEKGSTRRVERAMRQTQALADQFEDKTTSVLERLKIFYCCQVPPHWAIQRQLASLLFELGCTSSALQIFEKLEMWEDVVICYERAGQHGKAEEILRQELEKKETPSLYCLLGDVLGDHSCYDKAWELSRYRSARAQRSKALLHLRNKEFQECVECFERSVKINPMQLGVWFSLGCAYLALEDYQGSAKAFQRCVTLEPDNAEAWNNLSTSYIRLKQKVKAFRTLQEALKCNYEHWQIWENYILTSTDVGEFSEAIKAYHRLLDLRDKYKDVQVLKILVRAVIDGMTDRSGDVATGLKGKLQELFGRVTSRVTNDGEIWRLYAHVYGNGQSEKPDENEKAFQCLSKAYKCDTQSNCWEKDITSFKEVVQRALGLAHVAIKCSKNKSSSQEAVQMLSSVRLNLRGLLSKAKQLFTDVATGEMSRELADDITAMDTLVTELQDLSNQFRNQY

SEQ ID NO: 208 - DNA, 5601 bp, Homo sapiens
ggcccggctgcgaggaggaggcggcggcggcgcaggaggatgtacttggtggcgggggacagggggttggccggctgcgggcacctcctggtctcgctgctggggctgctgctgctgctggcgcgctccggcacccgggcgctggtctgcctgccctgtgacgagtccaagtgcgaggagcccaggaactgcccggggagcatcgtgcagggcgtctgcggctgctgctacacgtgcgccagccagaggaacgagagctgcggcggcaccttcgggatttacggaacctgcgaccgggggctgcgttgtgtcatccgccccccgctcaatggcgactccctcaccgagtacgaagcgggcgtttgcgaagatgagaactggactgatgaccaactgcttggttttaaaccatgcaatgaaaaccttattgctggctgcaatataatcaatgggaaatgtgaatgtaacaccattcgaacctgcagcaatccctttgagtttccaagtcaggatatgtgcctttcagctttaaagagaattgaagaagagaagccagattgctccaaggcccgctgtgaagtccagttctctccacgttgtcctgaagattctgttctgatcgagggttatgctcctcctggggagtgctgtcccttacccagccgctgcgtgtgcaaccccgcaggctgtctgcgcaaagtctgccagccgggaaacctgaacatactagtgtcaaaagcctcagggaagccgggagagtgctgtgacctctatgagtgcaaaccagttttcggcgtggactgcaggactgtggaatgccctcctgttcagcagaccgcgtgtcccccggacagctatgaaactcaagtcagactaactgcagatggttgctgtactttgccaacaagatgcgagtgtctctctggcttatgtggtttccccgtgtgtgaggtgggatccactccccgcatagtctctcgtggcgatgggacacctggaaagtgctgtgatgtctttgaatgtgttaatgatacaaagccagcctgcgtatttaacaatgtggaatattatgatggagacatgtttcgaatggacaactgtcggttctgtcgatgccaagggggcgttgccatctgcttcactgcccagtgtggtgagataaactgcgagaggtactacgtgcccgaaggagagtgctgcccagtgtgtgaagatccagtgtatccttttaataatcccgctggctgctatgccaatggcctgatccttgcccacggagaccggtggcgggaagacgactgcacattctgccagtgcgtcaacggtgaacgccactgcgttgcgaccgtctgcggacagacctgcacaaaccctgtgaaagtgcctggggagtgttgccctgtgtgcgaagaaccaaccatcatcacagttgatccacctgcatgtggggagttatcaaactgcactctgacagggaaggactgcattaatggtttcaaacgcgatcacaatggttgtcggacctgtcagtgcataaacaccgaggaactatgttcagaacgtaaacaaggctgcaccttgaactgtcccttcggtttccttactgatgcccaaaactgtgagatctgtgagtgccgcccaaggcccaagaagtgcagacccataatctgtgacaagtattgtccacttggattgctgaagaataagcacggctgtgacatctgtcgctgtaagaaatgtccagagctctcatgcagtaagatctgccccttgggtttccagcaggacagtcacggctgtcttatctgcaagtgcagagaggcctctgcttcagctgggccacccatcctgtcgggcacttgtctcaccgtggatggtcatcatcataaaaatgaggagagctggcacgatgggtgccgggaatgctactgtctcaatggacgggaaatgtgtgccctgatcacctgcccggtgcctgcctgtggcaaccccaccattcaccctggacagtgctgcccatcatgtgcagatgactttgtggtgcagaagccagagctcagtactccctccatttgccacgcccctggaggagaatactttgtggaaggagaaacgtggaacattgactcctgtactcagtgcacctgccacagcggacgggtgctgtgtgagacagaggtgtgcccaccgctgctctgccagaacccctcacgcacccaggattcctgctgcccacagtgtacagatcaaccttttcggccttccttgtcccgcaataacagcgtacctaattactgcaaaaatgatgaaggggatatattcctggcagctgagtcctggaagcctgacgtttgtaccagctgcatctgcattgatagcgtaattagctgtttctctgagtcctgcccttctgtatcctgtgaaagacctgtcttgagaaaaggccagtgttgtccctactgcatagaagacacaattccaaagaaggtggtgtgccacttcagtgggaaggcctatgccgacgaggagcggtgggaccttgacagctgcacccactgctactgcctgcagggccagaccctctgctcgaccgtcagctgcccccctctgccctgtgttgagcccatcaacgtggaaggaagttgctgcccaatgtgtccagaaatgtatgtcccagaaccaaccaatatacccattgagaagacaaaccatcgaggagaggttgacctggaggttcccctgtggcccacgcctagtgaaaatgatatcgtccatctccctagagatatgggtcacctccaggtagattacagagataacaggctgcacccaagtgaagattcttcactggactccattgcctcagttgtggttcccataattatatgcctctctattataatagcattcctattcatcaatcagaagaaacagtggataccactgctttgctggtatcgaacaccaactaagccttcttccttaaataatcagctagtatctgtggactgcaagaaaggaaccagagtccaggtggacagttcccagagaatgctaagaattgcagaaccagatgcaagattcagtggcttctacagcatgcaaaaacagaaccatctacaggcagacaatttctaccaaacagtgtgaagaaaggcaactaggatgaggtttcaaaagacggaagacgactaaatctgctctaaaaagtaaactagaatttgtgcacttgcttagtggattgtattggattgtgacttgatgtacagcgctaagaccttactgggatgggctctgtctacagcaatgtgcagaacaagcattcccacttttcctcaagataactgaccaagtgttttcttagaaccaaagtttttaaagttgctaagatatatttgcctgtaagatagctgtagagatatttggggtggggacagtgagtttggatggggaaatgggtgggagggtggtgttgggaagaaaaattggtcagcttggctcggggagaaacctggtaacataaaagcagttcagtggcccagaggttatttttttcctattgctctgaagactgcactggttgctgcaaagctcaggcctgaatgagcaggaaacaaaaaaggccttgcgacccagctgccataaccaccttagaactaccagacgagcacatcagaaccctttgacagccatcccaggtctaaagccacaagtttcttttctatacagtcacaactgcagtaggcagtgaggaagccagagaaatgcgatagcggcatttctctaaagcgggttattaaggatatatacagttacactttttgctgcttttattttcttccaagccaatcaatcagccagttcctagcagagtcagcacatgaacaagatctaagtcatttcttgatgtgagcactggagcttttttttttttacaacgtgacaggaagaggagggagagggtgacgaacaccaggcatttccaggggctatatttcactgtttgttgttgctttgttctgttatattgttggttgttcatagtttttgttgaagctctagcttaagaagaaactttttttaaaaagactgtttggggattctttttccttattatatactgattctacaaaatagaaactacttcattttaattgtatattattcaagcacctttgttgaagctcaaaaaaaatgatgcctctttaaactttagcaattataggagtatttatgtaactatcttatgcttcaaaaaacaaaagtatttgtgtgcatgtgtatataatatatatatatacatatatatttatacacatacaatttatgttttcctgttgaatgtatttttatgagattttaaccagaacaaaggcagataaacaggcattccatagcagtgcttttgatcacttacaaattttttgaataacacaaaatctcattctacctgcagtttaattggaaagatgtgtgtgtgagagtatgtatgtgtgtgtgtgtgtgtgtgtgtgtgcgcgcgcacgcacgccttgagcagtcagcattgcacctgctatggagaagggtattcctttattaaaatcttcctcatttggatttgctttcagttggttttcaatttgctcactggccagagacattgatggcagttcttatctgcatcactaatcagctcctggattttttttttttttttttcaaacaatggtttgaaacaactactggaatattgtccacaataagctggaagtttgttgtagtatgcctcaaatataactgactgtatactatagtggtaacttttcaaacagcccttagcacttttatactaattaacccatttgtgcattgagttttcttttaaaaatgcttgttgtgaaagacacagatacccagtatgcttaacgtgaaaagaaaatgtgttctgttttgtaaaggaactttcaagtattgttgtaaatacttggacagaggttgctgaactttaaaaaaaattaatttattattataatgacctaatttattaatctgaagattaaccatttttttgtcttagaatatcaaaaagaaaaagaaaaaggtgttctagctgtttgcatcaaaggaaaaaaagatttattatcaaggggcaatatttttatcttttccaaaataaatttgttaatgatacattacaaaaatagattgacatcagcctgattagtataaattttgttggtaattaatccattcctggcataaaaagtctttatcaaaaaaaattgtagatgcttgctttttgttttttcaatcatggccatattatgaaaatactaacaggatataggacaaggtgtaaatttttttattattattttaaagatatgatttatcctgagtgctgtatctattactcttttactttggttcctgttgtgctcttgtaaaagaaaaatataatttcctgaagaataaaatagatatatggcacttggagtgcatcatagttctacagtttgtttttgttttcttcaaaaaagctgtaagagaattatctgcaacttgattcttggcaggaaataaacattttgagttgaaatcaaaaaaaaaaaaaaaaaa

SEQ ID NO: 209 - protein, 1036 aa, Homo sapiens
MYLVAGDRGLAGCGHLLVSLLGLLLLLARSGTRALVCLPCDESKCEEPRNCPGSIVQGVCGCCYTCASQRNESCGGTFGIYGTCDRGLRCVIRPPLNGDSLTEYEAGVCEDENWTDDQLLGFKPCNENLIAGCNIINGKCECNTIRTCSNPFEFPSQDMCLSALKRIEEEKPDCSKARCEVQFSPRCPEDSVLIEGYAPPGECCPLPSRCVCNPAGCLRKVCQPGNLNILVSKASGKPGECCDLYECKPVFGVDCRTVECPPVQQTACPPDSYETQVRLTADGCCTLPTRCECLSGLCGFPVCEVGSTPRIVSRGDGTPGKCCDVFECVNDTKPACVFNNVEYYDGDMFRMDNCRFCRCQGGVAICFTAQCGEINCERYYVPEGECCPVCEDPVYPFNNPAGCYANGLILAHGDRWREDDCTFCQCVNGERHCVATVCGQTCTNPVKVPGECCPVCEEPTIITVDPPACGELSNCTLTGKDCINGFKRDHNGCRTCQCINTEELCSERKQGCTLNCPFGFLTDAQNCEICECRPRPKKCRPIICDKYCPLGLLKNKHGCDICRCKKCPELSCSKICPLGFQQDSHGCLICKCREASASAGPPILSGTCLTVDGHHHKNEESWHDGCRECYCLNGREMCALITCPVPACGNPTIHPGQCCPSCADDFVVQKPELSTPSICHAPGGEYFVEGETWNIDSCTQCTCHSGRVLCETEVCPPLLCQNPSRTQDSCCPQCTDQPFRPSLSRNNSVPNYCKNDEGDIFLAAESWKPDVCTSCICIDSVISCFSESCPSVSCERPVLRKGQCCPYCIEDTIPKKVVCHFSGKAYADEERWDLDSCTHCYCLQGQTLCSTVSCPPLPCVEPINVEGSCCPMCPEMYVPEPTNIPIEKTNHRGEVDLEVPLWPTPSENDIVHLPRDMGHLQVDYRDNRLHPSEDSSLDSIASVVVPIIICLSIIIAFLFINQKKQWIPLLCWYRTPTKPSSLNNQLVSVDCKKGTRVQVDSSQRMLRIAEPDARFSGFYSMQKQNHLQADNFYQTV

SEQ ID NO: 210 - DNA, 6053 bp, Homo sapiens
taggttgtgacagttggaagtgtcatgtacaacatgcggcgattaagtctttcacccaccttttcaatgggatttcatctgttagttactgtgagtctcttattttcccatgtggaccatgtaattgctgagacagaaatggaaggagaaggaaatgaaactggtgaatgtactggatcatattactgtaagaaaggggtgattttgcccatttgggaaccccaagacccttcttttggggacaaaattgctagagctactgtgtattttgtggccatggtctacatgtttcttggagtctctatcatagctgatcggttcatgtcctctatagaagtcatcacatctcaagaaaaagaaataaccataaagaaacccaatggagagaccaccaagacaactgtgaggatctggaatgaaacagtttctaacctgaccttgatggccctgggatcttctgctcctgagattctcctttcagtaattgaagtgtgtggccataacttcactgcaggagacctcggtcctagcaccatcgtgggaagtgctgcattcaatatgttcatcattattgcactctgtgtttatgtggtgcctgacggagagacaaggaagattaagcatttgcgtgtcttctttgtgacagcagcctggagcatctttgcctacacctggctttacattattttgtctgtcatatctcctggtgttgtggaggtctgggaaggtttgcttactttcttcttctttcccatctgtgttgtgttcgcttgggtagcggataggagacttctgttttacaagtatgtctacaagaggtatcgagctggcaagcagagggggatgattattgaacatgaaggagacaggccatcttctaagactgaaattgaaatggacgggaaagtggtcaattctcatgttgaaaatttcttagatggtgctctggttctggaggtggatgagagggaccaagatgatgaagaagctaggcgagaaatggctaggattctgaaggaacttaagcagaagcatccagataaagaaatagagcaattaatagaattagctaactaccaagtcctaagtcagcagcaaaaaagtagagcattttatcgcattcaagctactcgcctcatgactggagctggcaacattttaaagaggcatgcagctgaccaagcaaggaaggctgtcagcatgcacgaggtcaacactgaagtgactgaaaatgaccctgttagtaagatcttctttgaacaagggacatatcagtgtctggagaactgtggtactgtggcccttaccattatccgcagaggtggtgatttgactaacactgtgtttgttgacttcagaacagaggatggcacagcaaatgctgggtctgattatgaatttactgaaggaactgtggtgtttaagcctggtgatacccagaaggaaatcagagtgggtatcatagatgatgatatctttgaggaggatgaaaatttccttgtgcatctcagcaatgtcaaagtatcttctgaagcttcagaagatggcatactggaagccaatcatgtttctacacttgcttgcctcggatctccctccactgccactgtaactatttttgatgatgaccacgcaggcatttttacttttgaggaacctgtgactcatgtgagtgagagcattggcatcatggaggtgaaagtattgagaacatctggagctcgaggaaatgttatcgttccatataaaaccatcgaagggactgccagaggtggaggggaggattttgaggacacttgtggagagctcgaattccagaatgatgaaattgtcaaaacaatatcagtcaaggtaattgatgatgaggagtatgagaaaaacaagaccttcttccttgagattggagagccccgcctggtggagatgagtgagaagaaagccctgttattgaatgagcttggtggcttcacaataacaggaaaatacctgtttggccaacctgtcttcaggaaggttcatgctagagaacatccgattctctctactgtaatcaccattgcagacgaatatgatgacaagcagccactgaccagcaaagaggaagaggagaggcgcattgcagaaatggggcgccccatcctgggagagcacaccaagttggaagtgatcattgaagaatcctatgaattcaagagtactgtggacaaactcattaagaagacaaacctggcccttgtggttgggactaacagctggagagaacagttcattgaagctatcactgtcagtgctggggaagatgatgacgacgatgaatgtggggaagagaagctgccctcctgtttcgattacgtgatgcactttctgactgtgttctggaaggtcctgtttgccttcgtcccccctactgaatactggaatggctgggcgtgtttcattgtctccatcctcatgattggcctactgacagctttcattggagacctggcttcccactttggctgcaccattggcctgaaagattctgtgactgcagtcgtgttcgtcgcacttggaacatcagtgccagacacatttgccagcaaagtggcagccacccaggaccagtatgcagacgcctccataggtaacgtcacgggcagcaacgcggtgaatgtcttcctgggaatcggtgtggcctggtccatcgctgccatctaccacgcagccaatggggaacagttcaaagtgtcccctggcacactagctttctctgtcactctcttcaccatttttgctttcatcaatgtgggggtgctgctgtatcggcggaggccagaaatcggaggtgagctgggtgggccccggactgccaagctcctcacatcctgcctctttgtgctcctatggctcttgtacattttcttctcctccctggaggcctactgccacataaaaggcttctaaaggaactatcagatatagtaaatttatatatatacatatatatacataaaaattatgtataatggacagaggaaactgacatttgtcatgttcacttacctgctgatggaatccagcttcaagagcatactctgtactagggccgaagtaaaaaaccatcacctcccattcccaggggcatcatcatgttcaacaaggcatggaggcagggccatctttgcagctcagtctagaagggctgcactctctccaggttgataaatccttaaggctttgatttgttttgtttttggttttgttttcagtggagctggggaggtagttaatgtttggctttatttttgttattttgttttgttttgtttttttgggagagtcagggttgttgcttttctttgtggaaagtgaaaccatccaaatgtaaatgggttttggtaaaaatttaaatcattagtattccccctcacctcccccaatcactttaaaacttattttggattaagaaaaaatctgggcatggaagaagaaagaagcatgtcttcatcgtattaccaaagttcatgcttatctccggaatgtgagtggaggtgaagctgcctccaagaagaagcataaaagtggaatggagccaggaaatccgatggttctagaaatagtctgatatttaaacatgtgatacctggcagtctcgtttaacaggtacaaggaaaacgtgcctagattcccaggaacgtgcaaaatcctttctttcttatctctttagctctggactgtgattggcaaggtccttcttccagcattcagcccagctaagcccccaggtgccccatcccaaccctgttcctcctgtccacctgccatcccctatgcaaacagtaagaataaccccattcaaaaagcacatcatcgttttccatttgcattaacatgtgtctcagtcccatgttgccgttgcttgggattgtctgtcagttttattttcaaaggcatccatggcttgcacaatcctgttccagtcatgactgaacatttgctccttcttcatgtgccgttcggaaatgttgttgtgatacctgttacacagtgcatggtgaaaaacaaataaaacaaaacaaagagtatctgtatatagtagagtatagtacatactgttctcccatttggcaatgttgattggacattgaagacataagtgagttttcttttcacctgagttgttacttttgtgctgttattgagtttgattaattactagggataaaaggagaaaatggattattgttcacggttctgcacattcatttctaagaagcaataactgtcatgtggggagaagttaaagctattgagaggatagcaggcaaactacaaagatcttcatggaaaattagccatgtggaacacatcagaggcctctaaaaatcacccattaattcaggaaggccaaggagaaaggccttatagagacgttgatatgttggatgtgcctaggctttcagagccaccctttccacaacacccctccctgcaaagtatttatttcacatctgcactgtctggcacagatggtagatagtgctggtttgttcattttatttttttacttaaaaggctattttgagccctgtttctttcactgtccagtctagtcctctttgattatatcagtagttgctgagtaagaaagaagccagggtgaccaacgggcctttaaaagtgttgtctcctctacttatgctgaaagagaaggcaattaaataagactagtacctcccaggaggattggactgggatatttttaaccctttaaaaagaatagctgtttctatgttaaaataccaaagaacatggataaacccaacattccaaagtagtgagtccactaatgagaaaaataatagaatgactttggtcacctctcggagacttctgtgtctataaggaatcccaggctggagacattcctagccctctgtattgattcaaaaatacttaataaattaaagctgttgagacttattttttcttctgtcactcagtaaccatgatccttcctcatttaataaacatttggtgactgaatgagtaattaaatgctggttacccacttaatgtgccaggtagtatgatactttctggggactaagccatgaacaaaacagtctagatccctgccctcagaagggttacagtttatgtgattactattttcatgagtaaaagtgaagaaagccatatggaaagatttttatcttgcaagaaaaaacaattatgaaactcttttaacataaacacactgaaactgtatcaaagcaattgtccaaattgtatttatacccaagaatttctttaactaagagagcataaggcatatgtttggaaaaccaccctctttatctttgaccgacttgcagataaatatatctctccattttaaaccaagaagggcaatcatgttggtgatccagatcactgagaaagcccagtgtatcccatcttttatctttgttggcaatggaacttttctatggcccacactttacaattctttgtcattctaacccatccttcccatccttattttttttttttttgagaattgctaaatggaaagctagcctagaagcaccaagtaaatatattcaaggaatataagttgtttaaacattagaaaaatttttgcactcattttttagctgtattaggaatgtcaataatcctgtagcaaattttcacagagaactttaagaaattcttgcattggtcgatttcaatttgaaagctttttggtttgtttgctttttaaattttcatgttctaggaaactatgattctggttgttcaggattgttattattatagttgtgtaaaattattttattttgtgtgtattgtgcacagcttggggggggggcgggaaatgcactaattgtgctcttccttataaatggtacatattactgacacagacaaataaagtttctaattgtttctgatttaatcactagtgatacagcatattctgtatgaaatgttttctcctttctcattgtcatctacttcattttttgttttcatgttttgaagaaataaaaaccaaaatggta

SEQ ID NO: 211 - protein, 973 aa, Homo sapiens
MYNMRRLSLSPTFSMGFHLLVTVSLLFSHVDHVIAETEMEGEGNETGECTGSYYCKKGVILPIWEPQDPSFGDKIARATVYFVAMVYMFLGVSIIADRFMSSIEVITSQEKEITIKKPNGETTKTTVRIWNETVSNLTLMALGSSAPEILLSVIEVCGHNFTAGDLGPSTIVGSAAFNMFIIIALCVYVVPDGETRKIKHLRVFFVTAAWSIFAYTWLYIILSVISPGVVEVWEGLLTFFFFPICVVFAWVADRRLLFYKYVYKRYRAGKQRGMIIEHEGDRPSSKTEIEMDGKVVNSHVENFLDGALVLEVDERDQDDEEARREMARILKELKQKHPDKEIEQLIELANYQVLSQQQKSRAFYRIQATRLMTGAGNILKRHAADQARKAVSMHEVNTEVTENDPVSKIFFEQGTYQCLENCGTVALTIIRRGGDLTNTVFVDFRTEDGTANAGSDYEFTEGTVVFKPGDTQKEIRVGIIDDDIFEEDENFLVHLSNVKVSSEASEDGILEANHVSTLACLGSPSTATVTIFDDDHAGIFTFEEPVTHVSESIGIMEVKVLRTSGARGNVIVPYKTIEGTARGGGEDFEDTCGELEFQNDEIVKTISVKVIDDEEYEKNKTFFLEIGEPRLVEMSEKKALLLNELGGFTITGKYLFGQPVFRKVHAREHPILSTVITIADEYDDKQPLTSKEEEERRIAEMGRPILGEHTKLEVIIEESYEFKSTVDKLIKKTNLALVVGTNSWREQFIEAITVSAGEDDDDDECGEEKLPSCFDYVMHFLTVFWKVLFAFVPPTEYWNGWACFIVSILMIGLLTAFIGDLASHFGCTIGLKDSVTAVVFVALGTSVPDTFASKVAATQDQYADASIGNVTGSNAVNVFLGIGVAWSIAAIYHAANGEQFKVSPGTLAFSVTLFTIFAFINVGVLLYRRRPEIGGELGGPRTAKLLTSCLFVLLWLLYIFFSSLEAYCHIKGF

SEQ ID NO: 212 - DNA, 5537 bp, Homo sapiens
gaacccggcgaggaaatacatgcactggctgagaatcgcccgcgccagggcgcaacgccacaaggtgtagggagtgtgcggggtggggcgaaaggggacccaagagtccctgtggctcggagtgccgggccgtcggttcttcattcctgccctcggggcagacggagtgaccccggcccccactccccgccccgaccatggtagtgttcaatggccttcttaagatcaaaatctgcgaggccgtgagcttgaagcccacagcctggtcgctgcgccatgcggtgggaccccggccgcagactttccttctcgacccctacattgccctcaatgtggacgactcgcgcatcggccaaacggccaccaagcagaagaccaacagcccggcctggcacgacgagttcgtcaccgatgtgtgcaacggacgcaagatcgagctggctgtctttcacgatgcccccataggctacgacgacttcgtggccaactgcaccatccagtttgaggagctgctgcagaacgggagccgccacttcgaggactggattgatctggagccagaaggaagagtgtatgtgatcatcgatctctcagggtcgtcgggtgaagcccctaaagacaatgaagagcgtgtgttcagggaacgcatgcggccgaggaagcggcagggggccgtcaggcgcagggtccatcaggtcaacggccacaagttcatggccacctatcttcggcagcccacctactgctcccattgcagagacttcatctggggtgtcataggaaagcagggataccagtgtcaagtctgcacctgcgtggtccacaagcggtgccacgagctcataatcacaaagtgtgctgggttaaagaagcaggagacccccgaccaggtgggctcccagcggttcagcgtcaacatgccccacaagttcggtatccacaactacaaggtccctaccttctgcgatcactgtgggtccctgctctggggactcttgcggcagggtttgcagtgtaaagtctgcaaaatgaatgttcaccgtcgatgtgagaccaacgtggctcccaactgtggagtggatgccagaggaatcgccaaagtactggccgacctgggcgttaccccagacaaaatcaccaacagcggccagagaaggaaaaagctcattgctggtgccgagtccccgcagcctgcttctggaagctcaccatctgaggaagatcgatccaagtcagcacccacctccccttgtgaccaggaaataaaagaacttgagaacaacattcggaaagccttgtcatttgacaaccgaggagaggagcaccgggcagcatcgtctcctgatggccagctgatgagccccggtgagaatggcgaagtccggcaaggccaggccaagcgcctgggcctggatgagttcaacttcatcaaggtgttgggcaaaggcagctttggcaaggtcatgttggcagaactcaagggcaaagatgaagtatatgctgtgaaggtcttaaagaaggacgtcatccttcaggatgatgacgtggactgcacaatgacagagaagaggattttggctctggcacggaaacacccgtaccttacccaactctactgctgcttccagaccaaggaccgcctctttttcgtcatggaatatgtaaatggtggagacctcatgtttcagattcagcgctcccgaaaattcgacgagcctcgttcacggttctatgctgcagaggtcacatcggccctcatgttcctccaccagcatggagtcatctacagggatttgaaactggacaacatccttctggatgcagaaggtcactgcaagctggctgacttcgggatgtgcaaggaagggattctgaatggtgtgacgaccaccacgttctgtgggactcctgactacatagctcctgagatcctgcaggagttggagtatggcccctccgtggactggtgggccctgggggtgctgatgtacgagatgatggctggacagcctccctttgaggccgacaatgaggacgacctatttgagtccatcctccatgacgacgtgctgtacccagtctggctcagcaaggaggctgtcagcatcttgaaagctttcatgacgaagaatccccacaagcgcctgggctgtgtggcatcgcagaatggcgaggacgccatcaagcagcacccattcttcaaagagattgactgggtgctcctggagcagaagaagatcaagccacccttcaaaccacgcattaaaaccaaaagagacgtcaataattttgaccaagactttacccgggaagagccggtactcacccttgtggacgaagcaattgtaaagcagatcaaccaggaggaattcaaaggtttctcctactttggtgaagacctgatgccctgagagcccactgcagttggactttgccgatgctgcaagaaggggtgcagagaagactcctgtgttggagacactcagcaggtcttgaactacttctcctcctcggagccccagtcccatgtccactgtctatttattgcattcccttgccccaggccacctcctccccctcccacctggtgaccagaaggcgctctcggttcttgtctcaccagtaatgcagactcattgggtcagcaattagctgtatacactgccgtgtttggaccattggcaagcctggttccactcctcaggggctcctggcagtgaagcaacttcagttcttttactgcaaagaacagaaaaaagaaagaaagcaaacaagaagactccggctctgctatcggacacagatcctgatccctcttgcttcttttccctcctgcaccgcagcttgccatccctgcccttctgtcctggagaagagactggtgcttctccgcacacacgagggagggcgcccttgaggcatgccctctgagggagggagaccagagatgcagggattggccagctgggttggtttgctctggaatggctaactcttgcctgctttggttttagcttttcagcatgccaaagtcatgtaagtttgtgtcttgtggaagaaatcctctttgtggaaaaagaaacagggttttgaactctgttaacatttgaaaaatatattttcaaattcactttctaattggccaaaagagatgagttccagtctgaatacaggtagatattaaagggctaataaaaaatgagaaaccggtcgtccaaggtggatgctgtcaatgcccgagtgacacatgagagctgtatgaattgagagaaaaggcaacaagtagcattcttcatcattcaagttctacctggacacaaaggcgaggaccctggggttccaacaaagctcagctcccagattctctttccagtttcatcctaagttcctagcataaacactatttattttctgcagcagtgtgttatttttgcgcacttatacaaaatggtagtactactgtgttgtggtttttaaacattaaacatgtaaagttatatacgaaatatctgcttttggaataagcagaatgaggctaaacatgggttatacaaagggtatctggaaactgaagagcaacttgttagaaaactgacaatgtcgcaagatgtactcagttttgtttctgtgtgacatgcaatggcaactcatgtggacactattgaagggatgtgacattacctcctgtagatatgctaacagtgttattctttcatttccaagggttctctgtggctttgtgtatatgtttcccagaggtcatttgattacctaatttactgaactgatttagcagggaatggaatccattccaactattgcacgtggatttcccagctgcccctaaatatatatacttgtgagtggcaaagtggcactaatgaagcttttgccttttgtacatttgagatttttgtatatagtgtttgctgcaaggcctgtggaattaattcgttgcatatagaggtatcaactgctgcatgttcaggcatattataaaactttagtctatgaaagaataattataataatgtccaggtgcaatactctgtaagtctattggttcaagttaccgagagataggtgtgttcctttatgggggatgggggggtgtgttggggattctttgtattgtttatttcattttggtttattttaaaagatgtaaacatatattaagctatattaaatctcacatacagttcttctgtgctctattataccctgatagagatgggggagagaaaggaatgtttttgatggtggtttcaaagctcggacagtaactatcttgagcccattagagagtctgtgtccatatttgcatctggctggtcatagcctttgttactaatgatgacattcagttctcttttgtttttattttttaaaaactcaggtgtaattattatctgttcttaagataattgcaaatattaaatattatgatatatcaattcatgtgtttggcataccagtgaatgatgaagaacatgagattaatttaatttatcttcggtaacttgacattctggagagagactatcttctggagttgagtacaagcacagaaacatctttacggtggcatcatctcattttttaggaagacatgataatactgcccatcatattcatgtgtaactactgttctttcttctgctttcttcaccataataaactttggacaaccaagcaagctctaaccgcaatgccagatggccttgtccgagggcctagtgtttgcacggcagtgggaactgggcctttcctacaggacaactggcaagtttgctgggaagtcaaataatacattccacctggcagctgaaggcagccagtcagtctgtcccagaaagggcccttttcagcacccaaagctgggctggctgggatgcctctggctggtgaagttctcacataggctgatttaaatccagcaaaggtctatagaaaaaggcttgcgtgttcgttgagtaatcattgtttcattttcatttttacgagagtttgaaaatagacacactgttaacacttctgccagttttttctgatctttccagccccaccccctttctctttctctctctctctcaaagaaaaaaaaaatgggagtgcaaaaaaaacaaagccaaaaaatatatgaaggatagctgttcttctgtgttctctcattatggactttgtgaagtagaaacataattttttttcctccaaaggtgaaaaaacaatgcattcttgctttaaaaaaaaaaaagaaggctaaaaaattacctctttttaaattatgtgcaaaataattctggctaactgtaaaatgtattcaattttaggattttttttttttgtattgtgatgctttatttgtacatttttttcctttctggatgtaattttaatctcttgccattcattagtgttatttcattgtaaacgttattgtgccaaatgtactgtattcaaaaggatgtgaatgtgtattgtttcagaacctaataaatacaatgacgttaagtcttaaaaaaaaaaaaaaaaaa

SEQ ID NO: 213 - protein, 737 aa, Homo sapiens
MVVFNGLLKIKICEAVSLKPTAWSLRHAVGPRPQTFLLDPYIALNVDDSRIGQTATKQKTNSPAWHDEFVTDVCNGRKIELAVFHDAPIGYDDFVANCTIQFEELLQNGSRHFEDWIDLEPEGRVYVIIDLSGSSGEAPKDNEERVFRERMRPRKRQGAVRRRVHQVNGHKFMATYLRQPTYCSHCRDFIWGVIGKQGYQCQVCTCVVHKRCHELIITKCAGLKKQETPDQVGSQRFSVNMPHKFGIHNYKVPTFCDHCGSLLWGLLRQGLQCKVCKMNVHRRCETNVAPNCGVDARGIAKVLADLGVTPDKITNSGQRRKKLIAGAESPQPASGSSPSEEDRSKSAPTSPCDQEIKELENNIRKALSFDNRGEEHRAASSPDGQLMSPGENGEVRQGQAKRLGLDEFNFIKVLGKGSFGKVMLAELKGKDEVYAVKVLKKDVILQDDDVDCTMTEKRILALARKHPYLTQLYCCFQTKDRLFFVMEYVNGGDLMFQIQRSRKFDEPRSRFYAAEVTSALMFLHQHGVIYRDLKLDNILLDAEGHCKLADFGMCKEGILNGVTTTTFCGTPDYIAPEILQELEYGPSVDWWALGVLMYEMMAGQPPFEADNEDDLFESILHDDVLYPVWLSKEAVSILKAFMTKNPHKRLGCVASQNGEDAIKQHPFFKEIDWVLLEQKKIKPPFKPRIKTKRDVNNFDQDFTREEPVLTLVDEAIVKQINQEEFKGFSYFGEDLMP

SEQ ID NO: 214 - DNA, 820 bp, Homo sapiens
ataacacctagtttgagtcaacctggttaagtacaaatatgagaaggcttctcattcaggtccatgcttgcctactcctctgtccactgctttcgtgaagacaagatgaagttcacaattgtctttgctggacttcttggagtctttctagctcctgccctagctaactataatatcaacgtcaatgatgacaacaacaatgctggaagtgggcagcagtcagtgagtgtcaacaatgaacacaatgtggccaatgttgacaataacaacggatgggactcctggaattccatctgggattatggaaatggctttgctgcaaccagactctttcaaaagaagacatgcattgtgcacaaaatgaacaaggaagtcatgccctccattcaatcccttgatgcactggtcaaggaaaagaagcttcagggtaagggaccaggaggaccacctcccaagggcctgatgtactcagtcaacccaaacaaagtcgatgacctgagcaagttcggaaaaaacattgcaaacatgtgtcgtgggattccaacatacatggctgaggagatgcaagaggcaagcctgtttttttactcaggaacgtgctacacgaccagtgtactatggattgtggacatttccttctgtggagacacggtggagaactaaacaattttttaaagccactatggatttagtcatctgaatatgctgtgcagaaaaaatatgggctccagtggtttttaccatgtcattctgaaatttttctctactagttatgtttgatttctttaagtttcaataaaatcatttagcattgaattca

SEQ ID NO: 215 - protein, 199 aa, Homo sapiens
MLAYSSVHCFREDKMKFTIVFAGLLGVFLAPALANYNINVNDDNNNAGSGQQSVSVNNEHNVANVDNNNGWDSWNSIWDYGNGFAATRLFQKKTCIVHKMNKEVMPSIQSLDALVKEKKLQGKGPGGPPPKGLMYSVNPNKVDDLSKFGKNIANMCRGIPTYMAEEMQEASLFFYSGTCYTTSVLWIVDISFCGDTVEN

SEQ ID NO: 216 - DNA, 2143 bp, Homo sapiens
aattgcttccggggagttgcgagggagcgagggggaataaaggacccgcgaggaagggcccgcggatggcgcgtccctgagggtcgtggcgagttcgcggagcgtgggaaggagcggaccctgctctccccgggctgcgggccatggccacggcggagcggagagccctcggcatcggcttccagtggctctctttggccactctggtgctcatctgcgccgggcaagggggacgcagggaggatgggggtccagcctgctacggcggatttgacctgtacttcattttggacaaatcaggaagtgtgctgcaccactggaatgaaatctattactttgtggaacagttggctcacaaattcatcagcccacagttgagaatgtcctttattgttttctccacccgaggaacaaccttaatgaaactgacagaagacagagaacaaatccgtcaaggcctagaagaactccagaaagttctgccaggaggagacacttacatgcatgaaggatttgaaagggccagtgagcagatttattatgaaaacagacaagggtacaggacagccagcgtcatcattgctttgactgatggagaactccatgaagatctctttttctattcagagagggaggctaataggtctcgagatcttggtgcaattgtttactgtgttggtgtgaaagatttcaatgagacacagctggcccggattgcggacagtaaggatcatgtgtttcccgtgaatgacggctttcaggctctgcaaggcatcatccactcaattttgaagaagtcctgcatcgaaattctagcagctgaaccatccaccatatgtgcaggagagtcatttcaagttgtcgtgagaggaaacggcttccgacatgcccgcaacgtggacagggtcctctgcagcttcaagatcaatgactcggtcacactcaatgagaagcccttttctgtggaagatacttatttactgtgtccagcgcctatcttaaaagaagttggcatgaaagctgcactccaggtcagcatgaacgatggcctctcttttatctccagttctgtcatcatcaccaccacacactgtagcctccacaaaattgcatcaggccccacaacagctgcttgcatggaatagcagagaataccgcctgctccctccggacagcacactcctgaaaacggggagagaggagccaaacatgctcggtttacactttccttatttactgaatgagtggagggcagagacaggcctggagttacgcacactgagtgccccaacatggaaagaaacatcaggagggacaggaaacgttccctccttaaccaacagttttcaagaccttactggaggcactttattggctacataatcactccatgcggtgggcatcaggcagaatcctggtgcagacccaactttgaggtggaggatttcacagtttctttattttgaacttcccccaggctcccactaattcctctccattctatcctcctccctttcccacaaaagaaaacagaaaggagcagcagtgtttgataccgtatcatccagaggcctggttctctcccattatagggcaaacaagccctggcaagatatttcactcccgccccatgccatgcattaaaaatccaaaattgcctatattccacctgccaagcaagagatgctttcattattgaagttccaaatgtatacctttgagaacagtgccttctcgtcttaaaagagaggtcctcattttgtgagttgggagcagagggaattaaagaaagccatgatgcagggatttggccattcaagccgggcagccttcagagaatgtcatccctaatgacacatgcccgaatgaaggagcggggctgagcttgtcctgccttcgtattgaatgttgcctgtctgcctccttaatagcgggcctctgtgtgagcatttgacaagacttaaaactattcattgaagaaaatggatgatcccccaacaggaagatgcaaccccatgggctgcctgcttgaccacagaagtgcttccagctccagttgctcatctgagaactccccccaccacttgctgttaaaattgttaaaattaaaggccatgttgattgaaaaaaaaaaaaaaaaaaa

SEQ ID NO: 217 - protein, 333 aa, Homo sapiens
MATAERRALGIGFQWLSLATLVLICAGQGGRREDGGPACYGGFDLYFILDKSGSVLHHWNEIYYFVEQLAHKFISPQLRMSFIVFSTRGTTLMKLTEDREQIRQGLEELQKVLPGGDTYMHEGFERASEQIYYENRQGYRTASVIIALTDGELHEDLFFYSEREANRSRDLGAIVYCVGVKDFNETQLARIADSKDHVFPVNDGFQALQGIIHSILKKSCIEILAAEPSTICAGESFQVVVRGNGFRHARNVDRVLCSFKINDSVTLNEKPFSVEDTYLLCPAPILKEVGMKAALQVSMNDGLSFISSSVIITTTHCSLHKIASGPTTAACME

SEQ ID NO: 218 - DNA, 5540 bp, Homo sapiens
aattgcttccggggagttgcgagggagcgagggggaataaaggacccgcgaggaagggcccgcggatggcgcgtccctgagggtcgtggcgagttcgcggagcgtgggaaggagcggaccctgctctccccgggctgcgggccatggccacggcggagcggagagccctcggcatcggcttccagtggctctctttggccactctggtgctcatctgcgccgggcaagggggacgcagggaggatgggggtccagcctgctacggcggatttgacctgtacttcattttggacaaatcaggaagtgtgctgcaccactggaatgaaatctattactttgtggaacagttggctcacaaattcatcagcccacagttgagaatgtcctttattgttttctccacccgaggaacaaccttaatgaaactgacagaagacagagaacaaatccgtcaaggcctagaagaactccagaaagttctgccaggaggagacacttacatgcatgaaggatttgaaagggccagtgagcagatttattatgaaaacagacaagggtacaggacagccagcgtcatcattgctttgactgatggagaactccatgaagatctctttttctattcagagagggaggctaataggtctcgagatcttggtgcaattgtttactgtgttggtgtgaaagatttcaatgagacacagctggcccggattgcggacagtaaggatcatgtgtttcccgtgaatgacggctttcaggctctgcaaggcatcatccactcaattttgaagaagtcctgcatcgaaattctagcagctgaaccatccaccatatgtgcaggagagtcatttcaagttgtcgtgagaggaaacggcttccgacatgcccgcaacgtggacagggtcctctgcagcttcaagatcaatgactcggtcacactcaatgagaagcccttttctgtggaagatacttatttactgtgtccagcgcctatcttaaaagaagttggcatgaaagctgcactccaggtcagcatgaacgatggcctctcttttatctccagttctgtcatcatcaccaccacacactgttctgacggttccatcctggccatcgccctgctgatcctgttcctgctcctagccctggctctcctctggtggttctggcccctctgctgcactgtgattatcaaggaggtccctccaccccctgccgaggagagtgaggaagaagatgatgatggtctgcctaagaaaaagtggccaacggtagacgcctcttattatggtgggagaggcgttggaggcattaaaagaatggaggttcgttggggagaaaagggctccacagaagaaggtgctaagttggaaaaggcaaagaatgcaagagtcaagatgccggagcaggaatatgaattccctgagccgcgaaatctcaacaacaatatgcgtcggccttcttccccccggaagtggtactctccaatcaagggaaaactcgatgccttgtgggtcctactgaggaaaggatatgatcgtgtgtctgtgatgcgtccacagccaggagacacggggcgctgcatcaacttcaccagggtcaagaacaaccagccagccaagtacccactcaacaacgcctaccacacctcctcgccgcctcctgcccccatctacactcccccacctcctgcgccccactgccctcccccgccccccagcgcccctacccctcccatcccgtccccaccttccacccttccccctcctccccaggctccacctcccaacagggcacctcctccctcccgccctcctccaaggccttctgtctagagcccaaagttcctgctctgggctctctcagaaacttcaggagatgttagaacaagtctttccagttagagaagaggagtggtgataaagcccactgaccttcacacattctaaaaattggttggcaatgccagtataccaacaatcatgatcagctgaaagaaacagatattttaaattgccagaaaacaaatgatgaggcaactacagtcagatttatagccagccatctatcacctctagaaggttccagagacagtgaaactgcaagatgctctcaacaggattatgtctcatggagaccagtaagaaaatcatttatctgaaggtgaaatgcagagttggataagaaatacattgctgggtttctaaaatgctgccttcctgcctctactccacctccatccctggactttggacccttggcctaggagcctaaggaccttcacccctgtgcaccacccaagaaagaggaaaactttgcctacaactttggaaatgctggggtccctggtgtggtaagaaactcaacatcagacgggtatgcagaaggatgttcttctgggatttgcaggtacataaaaaatgtatggcatcttttccttgcaaattcttccagtttccaagtgagaaggggagcaggtgtttactgatggaaaaggtatgttgctatgttgatgtgtaagtgaaatcagttgtgtgcaatagacaggggcgtattcatgggagcatcagccagtttctaaaacccacaggccatcagcagctagaggtggctggctttggccagacatggaccctaaatcaacagacaatggcattgtcgaagagcaacctgttaatgaatcatgttaaaaatcaaggtttggcttcagtttaaatcacttgaggtatgaagtttatcctgttttccagagataaacataagttgatcttcccaaaataccatcattaggacctatcacacaatatcactagttttttttgtttgtttgttttttgttttttttcttggtaaagccatgcaccacagacttctgggcagagctgagagacaatggtcctgacataataaggatctttgattaacccccataaggcatgtgtgtgtatacaaatatacttctctttggcttttcgacatagaacctcagctgttaaccaaggggaaatacatcagatctgcaacacagaaatgctctgcctgaaatttccaccatgcctaggactcaccccatttatccaggtctttctggatctgtttaatcaataagccctataatcacttgctaaacactgggcttcatcacccagggataaaaacagagatcattgtcttggacctcctgcatcagcctattcaaaattatctctctctctagctttccacaaatcctaaaattcctgtcccaagccacccaaattctcagatcttttctggaacaaggcagaatataaaataaatatacatttagtggcttgggctatggtctccaaagatccttcaaaaatacatcaagccagcttcattcactcactttacttagaacagagatataagggcctgggatgcatttattttatcaataccaatttttgtggccatggcagacattgctaatcaatcacagcactatttcctattaagcccactgatttcttcacaatccttctcaaattacaattccaaagagccgccactcaacagtcagatgaacccaacagtcagatgagagaaatgaaccctacttgctatctctatcttagaaagcaaaaacaaacaggagtttccagggagaatgggaaagccagggggcataaaaggtacagtcaggggaaaatagatctaggcagagtgccttagtcagggaccacgggcgctgaatctgcagtgccaacaccaaactgacacatctccaggtgtacctccaaccctagccttctcccacagctgcctacaacagagtctcccagccttctcagagagctaaaaccagaaatttccagactcatgaaagcaaccccccagcctctccccaaccctgccgcattgtctaatttttagaacactaggcttcttctttcatgtagttcctcataagcaggggccagaatatctcagccacctgcagtgacattgctggacccctgaaaaccattccataggagaatgggttccccaggctcacagtgtagagacattgagcccatcacaactgttttgactgctggcagtctaaaacagtccacccaccccatggcactgccgcgtgattcccgcggccattcagaagttcaagccgagatgctgacgttgctgagcaacgagatggtgagcatcagtgcaaatgcaccattcagcacatcagtcatatgcccagtgcagttacaagatgttgtttcggcaaagcattttgatggaatagggaactgcaaatgtatgatgattttgaaaaggctcagcaggatttgttcttaaaccgactcagtgtgtcatccccggttatttagaattacagttaagaaggagaaacttctataagactgtatgaacaaggtgatatcttcatagtgggctattacaggcaggaaaatgttttaactggtttacaaaatccatcaatacttgtgtcattccctgtaaaaggcaggagacatgtgattatgatcaggaaactgcacaaaattattgttttcagcccccgtgttattgtccttttgaactgttttttttttattaaagccaaatttgtgttgtatatattcgtattccatgtgttagatggaagcatttcctatccagtgtgaataaaaagaacagttgtagtaaattattataaagccgatgatatttcatggcaggttattctaccaagctgtgcttgttggtttttcccatgactgtattgcttttataaatgtacaaatagttactgaaatgacgagacccttgtttgcacagcattaataagaaccttgataagaaccatattctgttgacagccagctcacagtttcttgcctgaagcttggtgcaccctccagtgagacacaagatctctcttttaccaaagttgagaacagagctggtggattaattaatagtcttcgatatctggccatgggtaacctcattgtaactatcatcagaatgggcagagatgatcttgaagtgtcacatacactaaagtccaaacactatgtcagatgggggtaaaatccattaaagaacaggaaaaaataattataagatgataagcaaatgtttcagcccaatgtcaacccagttaaaaaaaaaattaatgctgtgtaaaatggttgaattagtttgcaaactatataaagacatatgcagtaaaaagtctgttaatgcacatcctgtgggaatggagtgttctaaccaattgccttttcttgttatctgagctctcctatattatcatactcagataaccaaattaaaagaattagaatatgatttttaatacacttaacattaaactcttctaactttcttctttctgtgataattcagaagatagttatggatcttcaatgcctctgagtcattgttataaaaaatcagttatcactataccatgctataggagactgggcaaaacctgtacaatgacaaccctggaagttgctttttttaaaaaaataataaatttcttaaatcaaaaaaaaaaaaaaaaaaaa

SEQ ID NO: 219 - protein, 564 aa, Homo sapiens
MATAERRALGIGFQWLSLATLVLICAGQGGRREDGGPACYGGFDLYFILDKSGSVLHHWNEIYYFVEQLAHKFISPQLRMSFIVFSTRGTTLMKLTEDREQIRQGLEELQKVLPGGDTYMHEGFERASEQIYYENRQGYRTASVIIALTDGELHEDLFFYSEREANRSRDLGAIVYCVGVKDFNETQLARIADSKDHVFPVNDGFQALQGIIHSILKKSCIEILAAEPSTICAGESFQVVVRGNGFRHARNVDRVLCSFKINDSVTLNEKPFSVEDTYLLCPAPILKEVGMKAALQVSMNDGLSFISSSVIITTTHCSDGSILAIALLILFLLLALALLWWFWPLCCTVIIKEVPPPPAEESEEEDDDGLPKKKWPTVDASYYGGRGVGGIKRMEVRWGEKGSTEEGAKLEKAKNARVKMPEQEYEFPEPRNLNNNMRRPSSPRKWYSPIKGKLDALWVLLRKGYDRVSVMRPQPGDTGRCINFTRVKNNQPAKYPLNNAYHTSSPPPAPIYTPPPPAPHCPPPPPSAPTPPIPSPPSTLPPPPQAPPPNRAPPPSRPPPRPSV

SEQ ID NO: 220 - DNA, 1454 bp, Homo sapiens
aattgcttccggggagttgcgagggagcgagggggaataaaggacccgcgaggaagggcccgcggatggcgcgtccctgagggtcgtggcgagttcgcggagcgtgggaaggagcggaccctgctctccccgggctgcgggccatggccacggcggagcggagagccctcggcatcggcttccagtggctctctttggccactctggtgctcatctgcgccgggcaagggggacgcagggaggatgggggtccagcctgctacggcggatttgacctgtacttcattttggacaaatcaggaagtgtgctgcaccactggaatgaaatctattactttgtggaacagttggctcacaaattcatcagcccacagttgagaatgtcctttattgttttctccacccgaggaacaaccttaatgaaactgacagaagacagagaacaaatccgtcaaggcctagaagaactccagaaagttctgccaggaggagacacttacatgcatgaaggatttgaaagggccagtgagcagatttattatgaaaacagacaagggtacaggacagccagcgtcatcattgctttgactgatggagaactccatgaagatctctttttctattcagagagggaggctaataggtctcgagatcttggtgcaattgtttactgtgttggtgtgaaagatttcaatgagacacagctggcccggattgcggacagtaaggatcatgtgtttcccgtgaatgacggctttcaggctctgcaaggcatcatccactcaattttgaagaagtcctgcatcgaaattctagcagctgaaccatccaccatatgtgcaggagagtcatttcaagttgtcgtgagaggaaacggcttccgacatgcccgcaacgtggacagggtcctctgcagcttcaagatcaatgactcggtcacactcaatgagaagcccttttctgtggaagacacttatttactgtgtccagcgcctatcttaaaagaagttggcatgaaagctgcactccaggtcagcatgaacgatggcctctcttttatctccagttctgtcatcatcaccaccacacactgttctgacggttccatcctggccatcgccctgctgatcctgttcctgctcctagccctggctctcctctggtggttctggcccctctgctgcactgtgattatcaaggaggtccctccaccccctgccgaggagagtgaggaaaataaaataaaataacaagaagaagaaagaaagaaatcccacagaaacagataacctaacacagcccgtgcaacgtattttatacaatgctctgaaaatcatagtctcaatctagacagtcttttcctctagttccctgtattcaaatcccagtgtctaacattcaataaatagctatatgaaatcaaaaaaaaaaaaaaaaaaaaaaaaaaaaaaaaa

SEQ ID NO: 221 - protein, 368 aa, Homo sapiens
MATAERRALGIGFQWLSLATLVLICAGQGGRREDGGPACYGGFDLYFILDKSGSVLHHWNEIYYFVEQLAHKFISPQLRMSFIVFSTRGTTLMKLTEDREQIRQGLEELQKVLPGGDTYMHEGFERASEQIYYENRQGYRTASVIIALTDGELHEDLFFYSEREANRSRDLGAIVYCVGVKDFNETQLARIADSKDHVFPVNDGFQALQGIIHSILKKSCIEILAAEPSTICAGESFQVVVRGNGFRHARNVDRVLCSFKINDSVTLNEKPFSVEDTYLLCPAPILKEVGMKAALQVSMNDGLSFISSSVIITTTHCSDGSILAIALLILFLLLALALLWWFWPLCCTVIIKEVPPPPAEESEENKIK

SEQ ID NO: 222 - DNA, 1833 bp, Homo sapiens
aaagccgcgtcctgatcaatggggcgggcggcttagcgcgcgcggccacctggtccgaggaggagcagtcccggggcccgccgcaggtcgggtggctcagccatggctcctcggggcgcagcggccggccggagcccgggaccctgcgcggggcgctgagctcccgagcgggcagagggcacgggcaggcggacgtcggggcgccctcggggaacgtgcgggcaccatgcgtccccacctgtcgccgccgctgcagcagctactactgccggtgctgctcgcctgcgccgcgcactcgactggagcccttccccgactatgtgacgtgctacaagtgctgtgggaagagcaagaccagtgcctgcaggaactctccagagagcagacaggagacctgggcacggagcagccagtgccaggttgtgaggggatgtgggacaacataagctgctggccctcttctgtgccgggccggatggtggaggtggaatgcccgagattcctccggatgctcaccagcagaaatggttccttgttccgaaactgcacacaggatggctggtcagaaaccttccccaggcctaatctggcctgtggcgttaatgtgaacgactcttccaacgagaagcggcactcctacctgctgaagctgaaagtcatgtacaccgtgggctacagctcctccctggtcatgctcctggtcgcccttggcatcctctgtgctttccggaggctccactgcactcgcaactacatccacatgcacctgttcgtgtccttcatccttcgtgccctgtccaacttcatcaaggacgccgtgctcttctcctcagatgatgtcacctactgcgatgcccacagggcgggctgcaagctggtcatggtgctgttccagtactgcatcatggccaactactcctggctgctggtggaaggcctctaccttcacacactcctcgccatctccttcttctctgaaagaaagtacctccagggatttgtggcattcggatggggttctccagccatttttgttgctttgtgggctattgccagacactttctggaagatgttgggtgctgggacatcaatgccaacgcatccatctggtggatcattcgtggtcctgtgatcctctccatcctgattaatttcatccttttcataaacattctaagaatcctgatgagaaaacttagaacccaagaaacaagaggaaatgaagtcagccattataagcgcctggccaggtccactctcctgctgatccccctctttggcatccactacatcgtcttcgccttctccccagaggacgctatggagatccagctgttttttgaactagcccttggctcattccagggactggtggtggccgtcctctactgcttcctcaatggggaggtgcagctggaggttcagaagaagtggcagcaatggcacctccgtgagttcccactgcaccccgtggcctccttcagcaacagcaccaaggccagccacttggagcagagccagggcacctgcaggaccagcatcatctgagaggctggagcagggtcacccacggacagagaccaagagaggtcctgcgaaggctgggcactgctgtgggacagccagtcttcccagcagacaccctgtgtcctccttcagctgaagatgcccctccccaggccttggactcttccgaagggatgtgaggcactgtggggcaggacaagggcctgggatttggttcgtttgctcttctgggaagagaagttcaggggtcccagaaagggacagggaaataaatggtgcctgggatgagattcaaaaaaaaaaaa

SEQ ID NO: 223 - protein, 440 aa, Homo sapiens
MRPHLSPPLQQLLLPVLLACAAHSTGALPRLCDVLQVLWEEQDQCLQELSREQTGDLGTEQPVPGCEGMWDNISCWPSSVPGRMVEVECPRFLRMLTSRNGSLFRNCTQDGWSETFPRPNLACGVNVNDSSNEKRHSYLLKLKVMYTVGYSSSLVMLLVALGILCAFRRLHCTRNYIHMHLFVSFILRALSNFIKDAVLFSSDDVTYCDAHRAGCKLVMVLFQYCIMANYSWLLVEGLYLHTLLAISFFSERKYLQGFVAFGWGSPAIFVALWAIARHFLEDVGCWDINANASIWWIIRGPVILSILINFILFINILRILMRKLRTQETRGNEVSHYKRLARSTLLLIPLFGIHYIVFAFSPEDAMEIQLFFELALGSFQGLVVAVLYCFLNGEVQLEVQKKWQQWHLREFPLHPVASFSNSTKASHLEQSQGTCRTSII

SEQ ID NO: 224 - DNA, 2962 bp, Homo sapiens
gggctggcgccggccgaatccggcccgggaaccacctccagggacatgacctttggctctaaaaagaagactccatttttcatgataaaatggcagtggtgaaaacccccagcagaggactaaagaatgctaaagaaccctttaataatgcatcaccccatctcttgaagaacctagtggaggagccgaaaaaaagaaaagaagtacctaatcacctcctagaatcaaaggtttatgcaaaacttgtgaataataaggtcatacaggcaagacctggcataatacattttggaggctatcaagtagaaaaacaacaccaacagattctgcatctggtcaatgtttccaatgaagacacacgtgttcatattttacccccgcaaaccaaatactttgagatcaattatgtaagaaaggaacaccacctggtccctggcttgtccctcacggtcaccgttacattttctccagatgagtggcgatactattatgactgcatccgtgttcactgtaagggagatgacactttgcttgttcctattcatgcctatccagtcatgaactcactagactttccttcatttataaatctgtcaaatgttctacttggtgaaagcaaaacttatgttattcctttgcagtgcagctgccctgtagattttgagttttatatcaccttgattcagtctcatcaagcctttgctattgagccaacatcaggaataattccggctaatgggaagatgactgtgactattaagtttacaccctttcagtatgggactgcacaaataaaaatgcagttatggatttcgcagttcaactctcaaccatacgaatgtgtcttcaccggaacatgctatcccaacatggccttacccagcctaagtcaactgtaggatattagtgtggcctgctgaacccaaatcctgcaaataaccatcattgaaatcactcgggcaacaaacaagtagaactgaacacaaattttaaaactgctgatttttctggtggcaaataagcagattagaagagtttgaaaggttgaataccctttctaagaaagtaaacgttcctccagaaaaagcaatgatgcatataaattttcaccgaccgccagcgaagccgaagcctcagaaggtgaaggaaattgagtaccagaacctcagatttccagtagatttatcgaatccatttgctgtggcaactgttttaaaccaagaaccaggaaaattgaagattaaagaattaagagaagttttggaccagggcactgaaatttcaaaaacgagacagatgaaggaggcactctttgaacagaaagtcagacaggacattcacgaagagatggaaaatcatcttaagtggcaggtgcaccttggtaaagatcctatgtcttttaaacttaaaaaagagcttactgaagagtggcaaaaagcatgtgccaaatataagctagacagaggagatcctattttggatgaggaatttcagcgacttaaaacagaagttagccataaacgggtcgttcgcaatcaagaagagaaaatcaaggaatttcatcctacttttgatccactcattaataacacttggctcagcaggtccagggcacaaaaacggtttcaacaagtagcacgcaaggtcatgattcagggacgattattcaatatgctgagtgctgttcgtgaaatggacaaagagagtatactgagaaagattggccaagcaaaacaatcgatagcacaagaggcgaatttcttcaaattcttcctgaggcggatcagtcaggatgattataccagccggttctctgtgtcgcccaaggaggtgctgcccttcgctttcccagactgcagcccaccccaggactccaacgagttggctcctgatggccttggactggtcccaattaagtcttcagaagttcaaatcaagcagagttattccttcttcaatctgcaggttcctcaactgtacaaaattaagagatatcagccattctctgtccacaagtcttcaacaagttacagacctcaaaagcttgcccgagccctaaagcaaggagctgaggatgaagtcaccaccatcacagcccttccgaaacaggactccacaactcagctctctggcaaaacatcaatcttgagcatgaaaccacctgaggccttagccatgtctctagattatgatcctctgtatgtttttaatcccaacccaggattatttgctgtaatgcatcctctgacctatgcagaaacgttgatagattaccatctatgctctcaccccaagtacaaattcaccaaagagtcccgccacgggtccagcattcctgtcacccaaaagcagtttctccatcacacggacattattcccggaataatgcactggaaaagcttccagtccctggttctctcctccctgccggacccctccaagatggagaccacaaagagctgcgattccttcaattcatttatgcttccgatagacgtccctgccatccttgatgccttaccagaagaggacagactagaaacagtagaacgtgagctctgtgagcagaatgtagaagttatgttgactccagaaatgatcaaagtggaattccctatgttgaactacaaggacatcaggaaggagaaagaagtgaaagatcaagcacaaccagcagagaaggccggagagaagctgctcgaggagatgaggaacctgcggggcaaagcactcaacacatacctgattctagaatgaaagtcaccagtaggtcagtcccttccatttgctttctgtgggccactgtggccccttgcgtccatttacatgccagccatctctgcaattaaagtttctggataaaaaaatgaaatgtagaggatgtatatatcttttaagtgataattataaatcttatatttaaaaataaaatggagttaggatgatgaaaaaaaaaaaaaaa

SEQ ID NO: 225 - protein, 554 aa, Homo sapiens
MHINFHRPPAKPKPQKVKEIEYQNLRFPVDLSNPFAVATVLNQEPGKLKIKELREVLDQGTEISKTRQMKEALFEQKVRQDIHEEMENHLKWQVHLGKDPMSFKLKKELTEEWQKACAKYKLDRGDPILDEEFQRLKTEVSHKRVVRNQEEKIKEFHPTFDPLINNTWLSRSRAQKRFQQVARKVMIQGRLFNMLSAVREMDKESILRKIGQAKQSIAQEANFFKFFLRRISQDDYTSRFSVSPKEVLPFAFPDCSPPQDSNELAPDGLGLVPIKSSEVQIKQSYSFFNLQVPQLYKIKRYQPFSVHKSSTSYRPQKLARALKQGAEDEVTTITALPKQDSTTQLSGKTSILSMKPPEALAMSLDYDPLYVFNPNPGLFAVMHPLTYAETLIDYHLCSHPKYKFTKESRHGSSIPVTQKQFLHHTDIIPGIMHWKSFQSLVLSSLPDPSKMETTKSCDSFNSFMLPIDVPAILDALPEEDRLETVERELCEQNVEVMLTPEMIKVEFPMLNYKDIRKEKEVKDQAQPAEKAGEKLLEEMRNLRGKALNTYLILE

SEQ ID NO: 226 - DNA, 448 bp, Homo sapiens
atgttggtggtggggcgcgaggagcggaaaagcgcactgcgcggcgtgagctggcggcacaccccctctcctaggccgcagcatagcaaccgaacatggcggctgcgcaggcgccgccagtcagtggccaggagcggcggcggcagcaacaggaggcgatctcgcgagaggcgaggccaaaaccctgcctcgctagcgcagggagaagtcgcaccagtcggagcgcagagggacacgcagacatttcagcagaggcctcaaaggcagaacaaaatagtgcaaggagccgcacatccgcacagtgctgagaccctgcccaggacaagcttggccgcagtattccctttggcacccccacccacctggaacaaagcctgatgtaaagtctgggtgcgactcagaccggcctgggaaagaatttatttaataaatggtggaaagtggcttc

SEQ ID NO: 227 - protein, 125 aa, Homo sapiens
MLVVGREERKSALRGVSWRHTPSPRPQHSNRTWRLRRRRQSVARSGGGSNRRRSRERRGQNPASLAQGEVAPVGAQRDTQTFQQRPQRQNKIVQGAAHPHSAETLPRTSLAAVFPLAPPPTWNKA

SEQ ID NO: 228 - DNA, 3963 bp, Homo sapiens
cctgcgtgtccctctgcgctccgactggtgcgacttctccctgcgctagcgaggcagggttttggcctcgcctctcgcgagatcgcctcctgttgctgccgccgccgctcctggccactgactggcggcgcctgcgcagccgccatgttcggttgctatgctgcggcctaggagagggggtgtgcttgagggaggaggaagagatagaggaggaggagggggaggaagaggaggtggagaaggaggggggtgactgagctcctcttgcactctcacacacaaacgctgcccaggattacccgccagctcacgccgcgcagtgcgcttttccgctcctcgcgccccaccaccaacattgttctctcaggactcctgggtcccaggggtcggaattgggcctgagcgggagaggaaagagacttggctttggccgcggggtcggaggattggggccaggccccctcccccacgcacttttgggggtgtggattatctcatccctgcagggaggtaggagaggtcgccggctgcccgcctccctgccacctccccagcggcgccggcccgcggctgcccagcagcatgaggtggtgctggcggctccgggtcgtggcgcgaccgctgcggcggcggctgctcggggggcgctgaggtagccccccggagcggcacggaggacgcgcttctcctctgcgcgccggggcctcgaggctttttttctccagccgagaggacgcggctgtgatatacgaagactttgtgtggacagtaatgacctcacgtttccgattgcctgctggcagaacctacaatgtacgagcatcagagttggcccgagacagacagcatactgaagtggtttgcaacatccttcttctggataacactgtacaagctttcaaagtcaataaacatgatcaggggcaagtcttgttggatgtcgtcttcaagcatctagatttgactgagcaggactattttggtttacagttggctgatgattccacagataacccaaggtggctggatccaaacaaaccaataaggaagcagctaaagagaggatctccttacagtttgaactttagagtcaaattttttgtaagtgaccccaacaagttacaagaagaatatacaaggtaccagtattttttgcaaattaaacaagacattcttactggaagattaccctgtccttctaatactgctgcccttttagcttcatttgctgttcagtctgaacttggagactacgatcagtcagagaacttgtcaggctacctctcagattattctttcattcctaatcaacctcaagattttgaaaaagaaattgcaaaattacatcagcaacacataggcttatctcctgcagaagcagaatttaattacctaaacacagcacgtaccttagaactctatggagttgaattccactatgcaagggatcagagtaacaatgaaattatgattggagtgatgtcaggaggaattctgatttataagaacagggtacgaatgaatacctttccatggttgaagattgtaaaaatttcttttaagtgcaaacagttttttattcaacttagaaaagaattgcatgaatctagagaaacattattgggatttaatatggtgaattacagagcatgtaaaaatttgtggaaagcatgtgtagaacatcacacattcttccgtttggacagaccacttccacctcaaaagaatttttttgcacattattttacattaggttcaaaattccggtactgtgggagaactgaagtccaatcagttcagtatggcaaagaaaaggcaaataaagacagggtatttgcaagatccccaagtaagcccttggcacggaaattaatggattgggaagtagtaagcagaaattcaatatctgatgacaggttagaaacacaaagtcttccatcacgatctccaccgggaactcctaatcatcgaaattctacattcacgcaggaaggaacccggttacgaccatcttcagttggtcatttggtagaccatatggttcatacttccccaagcgaagtgtttgtaaatcagagatctccgtcatcaacacaagctaatagcattgttctggaatcatcaccatcacaagagacccctggagatgggaagcctccagctttaccacccaaacagtcaaagaaaaacagttggaaccaaattcattattcacattcgcaacaagatctagaaagtcatattaatgaaacatttgatattccatcttctcctgaaaaacccactcctaatggtggtattccacatgataatcttgtcctaatcagaatgaaacctgatgaaaatgggaggtttggattcaatgtaaagggaggatatgatcagaagatgcctgtgattgtgtctcgagtagcaccaggaacacctgctgacctctgtgtccctagactgaatgaaggggaccaagttgtactgatcaatggtcgggacattgcagaacacactcatgatcaggttgtgctgtttattaaagctagttgtgagagacattctggggaactcatgcttctagttcgacctaatgctgtatatgatgtagtggaagaaaagctagaaaatgagccagatttccagtatattcctgagaaagccccactagatagtgtgcatcaggatgaccattccctgcgggagtcaatgatccagctagctgaggggcttatcactggaacagtcctgacacagtttgatcaactgtatcggaaaaaacctggaatgacaatgtcctgtgccaaattacctcagaatatttccaaaaatagatacagagatatttcgccttatgatgccacacgggtcattttaaaaggtaatgaagactacatcaatgcgaactatataaatatggaaattccttcttccagcattataaatcagtacattgcttgtcaagggccattaccacacacttgtacagatttttggcagatgacttgggaacaaggctcctctatggttgtaatgttgaccacacaagttgaacgtggcagagttaaatgtcaccaatattggccagaacccacaggcagttcatcttatggatgctaccaagttacctgccactctgaagaaggaaacactgcctatatcttcaggaagatgaccctatttaaccaagagaaaaatgaaagtcgtccactcactcagatccagtacatagcctggcctgaccatggagtccctgatgattcgagtgactttctagattttgtttgtcatgtacgaaacaagagggctggcaaggaagaacccgttgttgtccattgcagtgctggaatcggaagaactggggttcttattactatggaaacagccatgtgtctcattgaatgcaatcagccagtttatccactagatattgtaagaacaatgagagatcagcgagccatgatgatccaaacacctagtcaatacagatttgtatgtgaagctattttgaaagtttatgaagaaggctttgttaaacccttaacaacatcaacaaataaataagaaagcaaaaagatctgggatatgtgttggaaaactgctttcccttatgttcactgtgccataatgctgctcgcaggaaatggcattttacaaaaaaaaaatgaagaactcaaaaaaactttgaaaacttcagcactgttgcactttatgttttaaaaaatgtcactctttcaaaatctataactcatgtatttgaagactgtttcatgctttgctccgaacaaatagtaaataactgagtatgttcagggtaatttatgaaattttgtggtggtgccatgcaatccccttttggtagaattgccacaaacaaggctcaaaattctcatcatctctgttatacacctgtatcatgaaagcaaaaagaagtaaacatcaggagtcagctctgaaaaaaaaaaaaaaaaaaaa

SEQ ID NO: 229 - protein, 926 aa, Homo sapiens
MTSRFRLPAGRTYNVRASELARDRQHTEVVCNILLLDNTVQAFKVNKHDQGQVLLDVVFKHLDLTEQDYFGLQLADDSTDNPRWLDPNKPIRKQLKRGSPYSLNFRVKFFVSDPNKLQEEYTRYQYFLQIKQDILTGRLPCPSNTAALLASFAVQSELGDYDQSENLSGYLSDYSFIPNQPQDFEKEIAKLHQQHIGLSPAEAEFNYLNTARTLELYGVEFHYARDQSNNEIMIGVMSGGILIYKNRVRMNTFPWLKIVKISFKCKQFFIQLRKELHESRETLLGFNMVNYRACKNLWKACVEHHTFFRLDRPLPPQKNFFAHYFTLGSKFRYCGRTEVQSVQYGKEKANKDRVFARSPSKPLARKLMDWEVVSRNSISDDRLETQSLPSRSPPGTPNHRNSTFTQEGTRLRPSSVGHLVDHMVHTSPSEVFVNQRSPSSTQANSIVLESSPSQETPGDGKPPALPPKQSKKNSWNQIHYSHSQQDLESHINETFDIPSSPEKPTPNGGIPHDNLVLIRMKPDENGRFGFNVKGGYDQKMPVIVSRVAPGTPADLCVPRLNEGDQVVLINGRDIAEHTHDQVVLFIKASCERHSGELMLLVRPNAVYDVVEEKLENEPDFQYIPEKAPLDSVHQDDHSLRESMIQLAEGLITGTVLTQFDQLYRKKPGMTMSCAKLPQNISKNRYRDISPYDATRVILKGNEDYINANYINMEIPSSSIINQYIACQGPLPHTCTDFWQMTWEQGSSMVVMLTTQVERGRVKCHQYWPEPTGSSSYGCYQVTCHSEEGNTAYIFRKMTLFNQEKNESRPLTQIQYIAWPDHGVPDDSSDFLDFVCHVRNKRAGKEEPVVVHCSAGIGRTGVLITMETAMCLIECNQPVYPLDIVRTMRDQRAMMIQTPSQYRFVCEAILKVYEEGFVKPLTTSTNK

SEQ ID NO: 230 - DNA, 4513 bp, Homo sapiens
tgaatgaaggagcgggcggaggaggaagtgtcatggcgtcgggccgtggagcttcttctcgctggttctttactcgggaacagctggagaacacgccgagccgccgctgcggagtggaggcggataaagagctctcgtgccgccagcaggcggccaacctcatccaggagatgggacagcgtctcaatgtctctcagcttacaataaacactgcgattgtttatatgcacaggttttatatgcaccattctttcaccaaattcaacaaaaatataatatcgtctactgcattatttttggctgcaaaagtggaagaacaggctcgaaaacttgaacatgttatcaaagtagcacatgcttgtcttcatcctctagagccactgctggatactaaatgtgatgcttaccttcaacagactcaagaactggttatacttgaaaccataatgctacaaactctaggttttgagatcaccattgaacacccacacacagatgtggtgaaatgtacccagttagtaagagcaagcaaggatttggcacagacatcctatttcatggctaccaacagtctgcatcttacaaccttctgtcttcagtacaaaccaacagtgatagcatgtgtatgcattcatttggcttgcaaatggtccaattgggagatccctgtatcaactgatggaaagcattggtgggaatatgtggatcctacagttactctagaattattagatgagctaacacatgagtttctacaaatattggagaaaacgcctaataggttgaagaagattcgaaactggagggctaatcaggcagctaggaaaccaaaagtagatggacaggtatcagagacaccacttcttggttcatctttggtccagaattccattttagtagatagtgtcactggtgtgcctacaaacccaagttttcagaaaccatctacatcagcattccctgcgccagtacctctaaattcaggaaatatttctgttcaagacagccatacatctgataatttgtcaatgctagcaacaggaatgccaagtacttcatacggtttatcatcacaccaggaatggcctcaacatcaagactcagcaaggacagaacagctatattcacagaaacaggagacatctttgtctggtagccagtacaacatcaacttccagcagggaccttctatatcactgcattcaggattacatcacagacctgacaaaatttcagatcattcttctgttaagcaagaatatactcataaagcagggagcagtaaacaccatgggccaatttccactactccaggaataattcctcagaaaatgtctttagataaatatagagaaaagcgtaaactagaaactcttgatctcgatgtaagggatcattatatagctgcccaggtagaacagcagcacaaacaagggcagtcacaggcagccagcagcagttctgttacttctcccattaaaatgaaaatacctatcgcaaatactgaaaaatacatggcagataaaaaggaaaagagtgggtcactgaaattacggattccaataccacccactgataaaagcgccagtaaagaagaactgaaaatgaaaataaaagtttcttcttcagaaagacacagctcttctgatgaaggcagtgggaaaagcaaacattcaagcccacatattagcagagaccataaggagaagcacaaggagcatccttcaagccgccaccacaccagcagccacaagcattcccactcgcatagtggcagcagcagcggtggcagtaaacacagtgccgacggaataccacccactgttctgaggagtcctgttggcctgagcagtgatggcatttcctctagctccagctcttcaaggaagaggctgcatgtcaatgatgcatctcacaaccaccactccaaaatgagcaaaagttccaaaagttcaggtgggctacggacatctcagcaccctcgtgaaactggacaagaagccagtggagaccaacggtcctgatgccaatcacgagtacagtacaagcagccagcatatggactacaaagacacattcgacatgctggactcactgttaagtgcccaaggaatgaacatgtaataatttgtttaggtcaatttttcctttacttttttaatttaaaaattgttagaatggaaaaattccttctgatctagcagtggtaacccctgctgttgctgccactgcttcaatatttgtaagtgctgctttattcttcattctgaaaagaagagattatagtaaacaagtctttatctccacatatgatagtgttataaatactgtaaaagcatggaaggtgcaaaactcagtatttctacaattgcagctaagaacattaggatgaatggctggctgcttctaggaatataagatgcctcaagcattcattatttatgatttgaatactgtagctattttttgttgcttggcttttgaatgagtgtaaattgttttcttttgtgtatttatacttgtatgtatgatttgcatgtttcaatgataaagggataaaacagtatactgacaactgtttacaagaaagtggagaaaaatgtacatacatttttgtatgtttagatattaccgtaaatactcaggattggagctgcttgtaagtataacaatatacagaataactttattttatcttgtcagagtccatcactaatctaaaacaaaggtggcacttttttatgttaaccttaaactctaggccttactggaagccactgataggggaccattcactaccagatgtgtgcagtgcaacagatggtcatatacactgtgaggcactgaaattttgccttcagaggttctgaccagattggctgctgaaatagcccctaactttctgaaggcttgaagaggaaaaaataaagtttacatactcttgatgtgaagtgcatttaaatgtttgttggcttgttgcagttctatgaaacagagctgttaataatggttatgtggattactgtgatttgaaaactaaattcacaataacttacctagtagagatttagtgagttgtttcctttaaagaattttacactacatattttaatagtaaacagggatcacttttcctttagcattcagaatgacaccatattcttaaatatactccttccctgaagcgtgtttgtgtgtgatgccatatttctttttcaggtaaatgtagtcttccttataaaaatgaaattaaacctatgctctcaattcttttatattctaacaataaataaaaaagaaaagattactgactgtgcattgtacctgtatttatagtttatggttatcaggaagctctgtaagaaagaaaaggtcagcctcccaggcaaaccagtagtggaggttttacatttgtttgcacatctcagtatatttctgttgaggtaaagtttgcacagtcatctgacttctgatcaagcattagattttaacttgtttagattttgtcttaaacaccagtaatatggctcttgtttatcagctaatcttgaatttattctgtggtaaatcttttgagttgttgagtatatttgagattgattggattcgacctcttgttgaactgaaaacttaattttttctctgtatttttgttacaaagccactgatacgtgcacaattgtaattaagtatgttgcagttgtaaatattagagtttaatctcatgctctacctttatttagcaattacctaatttgccagtagctttataatttttaaagataattgttcattattttgtcaatgttatttgaacttggggtacttaggagcctctttgtagggactgtgcctaggtagcatgtcctaacatttgttctggtcttgcataacttcagtaatctttgtcattatatgtaactttgttgctctgtatggcataatattgtatccataaacatggtaattttgatacagttatacttttacagtggtacataatccaaggactagtatagaattaagctgagtgcaagatgagggagggaagggctttcttggtaatttagatgtgaaacctctacagagctatcatgtaaaaactacataaggtggttgtgctactgtataattgggggtgataataccaggaattttaataagattttgtaaagaatatccagaaaagtagtgaacttattttcagtagacatagaaaacaatgtgaatatttaaggtctgtgactatagttaaacttcactaagaatttgcagaattgttttgagatgtgtgaataaaggtaattttattgaatcttcattggtgctaatgatggacagttaaaaagatagctagtgtatattgttatgggtcagtacttattagtacttccaaaattgaatttgaaatgctatgtattcacttttcactctgtaaatgtaattctttacaatgactttatttattaaagggcagccagttgtcatttgtaaaaaaaaaaaaaaaaaaaaa

SEQ ID NO: 231 - protein, 663 aa, Homo sapiens
MASGRGASSRWFFTREQLENTPSRRCGVEADKELSCRQQAANLIQEMGQRLNVSQLTINTAIVYMHRFYMHHSFTKFNKNIISSTALFLAAKVEEQARKLEHVIKVAHACLHPLEPLLDTKCDAYLQQTQELVILETIMLQTLGFEITIEHPHTDVVKCTQLVRASKDLAQTSYFMATNSLHLTTFCLQYKPTVIACVCIHLACKWSNWEIPVSTDGKHWWEYVDPTVTLELLDELTHEFLQILEKTPNRLKKIRNWRANQAARKPKVDGQVSETPLLGSSLVQNSILVDSVTGVPTNPSFQKPSTSAFPAPVPLNSGNISVQDSHTSDNLSMLATGMPSTSYGLSSHQEWPQHQDSARTEQLYSQKQETSLSGSQYNINFQQGPSISLHSGLHHRPDKISDHSSVKQEYTHKAGSSKHHGPISTTPGIIPQKMSLDKYREKRKLETLDLDVRDHYIAAQVEQQHKQGQSQAASSSSVTSPIKMKIPIANTEKYMADKKEKSGSLKLRIPIPPTDKSASKEELKMKIKVSSSERHSSSDEGSGKSKHSSPHISRDHKEKHKEHPSSRHHTSSHKHSHSHSGSSSGGSKHSADGIPPTVLRSPVGLSSDGISSSSSSSRKRLHVNDASHNHHSKMSKSSKSSGGLRTSQHPRETGQEASGDQRS

SEQ ID NO: 232 - DNA, 4614 bp, Homo sapiens
tgaatgaaggagcgggcggaggaggaagtgtcatggcgtcgggccgtggagcttcttctcgctggttctttactcgggaacagctggagaacacgccgagccgccgctgcggagtggaggcggataaagagctctcgtgccgccagcaggcggccaacctcatccaggagatgggacagcgtctcaatgtctctcagcttacaataaacactgcgattgtttatatgcacaggttttatatgcaccattctttcaccaaattcaacaaaaatataatatcgtctactgcattatttttggctgcaaaagtggaagaacaggctcgaaaacttgaacatgttatcaaagtagcacatgcttgtcttcatcctctagagccactgctggatactaaatgtgatgcttaccttcaacagactcaagaactggttatacttgaaaccataatgctacaaactctaggttttgagatcaccattgaacacccacacacagatgtggtgaaatgtacccagttagtaagagcaagcaaggatttggcacagacatcctatttcatggctaccaacagtctgcatcttacaaccttctgtcttcagtacaaaccaacagtgatagcatgtgtatgcattcatttggcttgcaaatggtccaattgggagatccctgtatcaactgatggaaagcattggtgggaatatgtggatcctacagttactctagaattattagatgagctaacacatgagtttctacaaatattggagaaaacgcctaataggttgaagaagattcgaaactggagggctaatcaggcagctaggaaaccaaaagtagatggacaggtatcagagacaccacttcttggttcatctttggtccagaattccattttagtagatagtgtcactggtgtgcctacaaacccaagttttcagaaaccatctacatcagcattccctgcgccagtacctctaaattcaggaaatatttctgttcaagacagccatacatctgataatttgtcaatgctagcaacaggaatgccaagtacttcatacggtttatcatcacaccaggaatggcctcaacatcaagactcagcaaggacagaacagctatattcacagaaacaggagacatctttgtctggtagccagtacaacatcaacttccagcagggaccttctatatcactgcattcaggattacatcacagacctgacaaaatttcagatcattcttctgttaagcaagaatatactcataaagcagggagcagtaaacaccatgggccaatttccactactccaggaataattcctcagaaaatgtctttagataaatatagagaaaagcgtaaactagaaactcttgatctcgatgtaagggatcattatatagctgcccaggtagaacagcagcacaaacaagggcagtcacaggcagccagcagcagttctgttacttctcccattaaaatgaaaatacctatcgcaaatactgaaaaatacatggcagataaaaaggaaaagagtgggtcactgaaattacggattccaataccacccactgataaaagcgccagtaaagaagaactgaaaatgaaaataaaagtttcttcttcagaaagacacagctcttctgatgaaggcagtgggaaaagcaaacattcaagcccacatattagcagagaccataaggagaagcacaaggagcatccttcaagccgccaccacaccagcagccacaagcattcccactcgcatagtggcagcagcagcggtggcagtaaacacagtgccgacggaataccacccactgttctgaggagtcctgttggcctgagcagtgatggcatttcctctagctccagctcttcaaggaagaggctgcatgtcaatgatgcatctcacaaccaccactccaaaatgagcaaaagttccaaaagttcaggtagttcatctagttcttcctcctctgttaagcagtatatatcctctcacaactctgtttttaaccatcccttaccccctcctccccctgtcacataccaggtgggctacggacatctcagcaccctcgtgaaactggacaagaagccagtggagaccaacggtcctgatgccaatcacgagtacagtacaagcagccagcatatggactacaaagacacattcgacatgctggactcactgttaagtgcccaaggaatgaacatgtaataatttgtttaggtcaatttttcctttacttttttaatttaaaaattgttagaatggaaaaattccttctgatctagcagtggtaacccctgctgttgctgccactgcttcaatatttgtaagtgctgctttattcttcattctgaaaagaagagattatagtaaacaagtctttatctccacatatgatagtgttataaatactgtaaaagcatggaaggtgcaaaactcagtatttctacaattgcagctaagaacattaggatgaatggctggctgcttctaggaatataagatgcctcaagcattcattatttatgatttgaatactgtagctattttttgttgcttggcttttgaatgagtgtaaattgttttcttttgtgtatttatacttgtatgtatgatttgcatgtttcaatgataaagggataaaacagtatactgacaactgtttacaagaaagtggagaaaaatgtacatacatttttgtatgtttagatattaccgtaaatactcaggattggagctgcttgtaagtataacaatatacagaataactttattttatcttgtcagagtccatcactaatctaaaacaaaggtggcacttttttatgttaaccttaaactctaggccttactggaagccactgataggggaccattcactaccagatgtgtgcagtgcaacagatggtcatatacactgtgaggcactgaaattttgccttcagaggttctgaccagattggctgctgaaatagcccctaactttctgaaggcttgaagaggaaaaaataaagtttacatactcttgatgtgaagtgcatttaaatgtttgttggcttgttgcagttctatgaaacagagctgttaataatggttatgtggattactgtgatttgaaaactaaattcacaataacttacctagtagagatttagtgagttgtttcctttaaagaattttacactacatattttaatagtaaacagggatcacttttcctttagcattcagaatgacaccatattcttaaatatactccttccctgaagcgtgtttgtgtgtgatgccatatttctttttcaggtaaatgtagtcttccttataaaaatgaaattaaacctatgctctcaattcttttatattctaacaataaataaaaaagaaaagattactgactgtgcattgtacctgtatttatagtttatggttatcaggaagctctgtaagaaagaaaaggtcagcctcccaggcaaaccagtagtggaggttttacatttgtttgcacatctcagtatatttctgttgaggtaaagtttgcacagtcatctgacttctgatcaagcattagattttaacttgtttagattttgtcttaaacaccagtaatatggctcttgtttatcagctaatcttgaatttattctgtggtaaatcttttgagttgttgagtatatttgagattgattggattcgacctcttgttgaactgaaaacttaattttttctctgtatttttgttacaaagccactgatacgtgcacaattgtaattaagtatgttgcagttgtaaatattagagtttaatctcatgctctacctttatttagcaattacctaatttgccagtagctttataatttttaaagataattgttcattattttgtcaatgttatttgaacttggggtacttaggagcctctttgtagggactgtgcctaggtagcatgtcctaacatttgttctggtcttgcataacttcagtaatctttgtcattatatgtaactttgttgctctgtatggcataatattgtatccataaacatggtaattttgatacagttatacttttacagtggtacataatccaaggactagtatagaattaagctgagtgcaagatgagggagggaagggctttcttggtaatttagatgtgaaacctctacagagctatcatgtaaaaactacataaggtggttgtgctactgtataattgggggtgataataccaggaattttaataagattttgtaaagaatatccagaaaagtagtgaacttattttcagtagacatagaaaacaatgtgaatatttaaggtctgtgactatagttaaacttcactaagaatttgcagaattgttttgagatgtgtgaataaaggtaattttattgaatcttcattggtgctaatgatggacagttaaaaagatagctagtgtatattgttatgggtcagtacttattagtacttccaaaattgaatttgaaatgctatgtattcacttttcactctgtaaatgtaattctttacaatgactttatttattaaagggcagccagttgtcatttgtaaaaaaaaaaaaaaaaaaaaa

SEQ ID NO: 233 - protein, 730 aa, Homo sapiens
MASGRGASSRWFFTREQLENTPSRRCGVEADKELSCRQQAANLIQEMGQRLNVSQLTINTAIVYMHRFYMHHSFTKFNKNIISSTALFLAAKVEEQARKLEHVIKVAHACLHPLEPLLDTKCDAYLQQTQELVILETIMLQTLGFEITIEHPHTDVVKCTQLVRASKDLAQTSYFMATNSLHLTTFCLQYKPTVIACVCIHLACKWSNWEIPVSTDGKHWWEYVDPTVTLELLDELTHEFLQILEKTPNRLKKIRNWRANQAARKPKVDGQVSETPLLGSSLVQNSILVDSVTGVPTNPSFQKPSTSAFPAPVPLNSGNISVQDSHTSDNLSMLATGMPSTSYGLSSHQEWPQHQDSARTEQLYSQKQETSLSGSQYNINFQQGPSISLHSGLHHRPDKISDHSSVKQEYTHKAGSSKHHGPISTTPGIIPQKMSLDKYREKRKLETLDLDVRDHYIAAQVEQQHKQGQSQAASSSSVTSPIKMKIPIANTEKYMADKKEKSGSLKLRIPIPPTDKSASKEELKMKIKVSSSERHSSSDEGSGKSKHSSPHISRDHKEKHKEHPSSRHHTSSHKHSHSHSGSSSGGSKHSADGIPPTVLRSPVGLSSDGISSSSSSSRKRLHVNDASHNHHSKMSKSSKSSGSSSSSSSSVKQYISSHNSVFNHPLPPPPPVTYQVGYGHLSTLVKLDKKPVETNGPDANHEYSTSSQHMDYKDTFDMLDSLLSAQGMNM

SEQ ID NO: 234 - DNA, 1711 bp, Homo sapiens
ttcaaagaaacagcagcttttggacattttaatgagttctatgccaaaaccagaaagacatgctgagtcattgcttgacatttgtcatgatacaaactcttctccaactgatttgatgacagttaccaaaaatcaaaacatcatcttgcaaagcatcagcagaagtgaggagttcgaccaagatggtgactgcagtcattccacactggttaatgaagaagaagatcccagtggtggtagacaggactggcaacccaggacagaaggtgttgagatcactgtaacttttccaagagatgtcagtcctccccaagaaatgagccaagaagacttaaaagaaaagaatctgataaactcatcgcttcaagaatgggcacaagcacatgcagtttctcatccaaatgaaatagaaacggtggagctcaggaaaaagaagctgaccatgcggcccttagttttgcaaaaagaggaaagttccagggagctctgcaatgtgaacttgggctttttgctaccaagatcttgtttagaactgaacatttccaagtctgtaaccagagaagatgctcctcattttctgaaggagcagcaaagaaaatctgaagagttttcgacctctcatatgaagtacagtggccgaagcatcaagaggcatagtagtgggctcaggatatatgacagggaggagaaatttctcatctcaaatgaaaagaagatattttctgaaaatagtttaaagtctgaagaacctatcctatggaccaagggtgagattcttggaaagggagcctacggcacagtatactgtggtctcactagtcaaggacagctaatagctgtaaaacaggtggctttggatacctctaataaattagctgctgaaaaggaataccggaaactacaggaagaagtagatttgctcaaagcactgaaacatgtcaacattgtggcctatttggggacatgcttgcaagagaacactgtgagcattttcatggagtttgttcctggtggctcaatctctagtattataaaccgttttgggccattgcctgagatggtgttctgtaaatatacgaaacaaatacttcaaggtgttgcttatctccatgagaactgtgtggtacatcgcgatatcaaaggaaataatgttatgctcatgccaactggaataataaagctgattgactttggctgtgccaggcgtttggcctgggcaggtttaaatggcacccacagtgacatgcttaagtccatgcatgggactccatattggatggccccagaagtcatcaatgagtctggctatggacggaaatcagatatctggagcattggttgtactgtgtttgagatggctacagggaagcctccactggcttccatggacaggatggccgccatgttttacatcggagcacaccgagggctgatgcctcctttaccagaccacttctcagaaaatgcagcagactttgtgcgcatgtgcctgaccagggaccagcatgagcgaccttctgctctccagctcctgaagcactccttcttggagagaagtcactgaatatacatcaagactttcttcccagttccactgcagatgctcccttgcttaattgtggggaatgatggctaagggatctttgtttccccactgaaaattcagtctaacccagtttaagcagatcctatggagtcattaactgaaagt

SEQ ID NO: 235 - protein, 510 aa, Homo sapiens
MSSMPKPERHAESLLDICHDTNSSPTDLMTVTKNQNIILQSISRSEEFDQDGDCSHSTLVNEEEDPSGGRQDWQPRTEGVEITVTFPRDVSPPQEMSQEDLKEKNLINSSLQEWAQAHAVSHPNEIETVELRKKKLTMRPLVLQKEESSRELCNVNLGFLLPRSCLELNISKSVTREDAPHFLKEQQRKSEEFSTSHMKYSGRSIKRHSSGLRIYDREEKFLISNEKKIFSENSLKSEEPILWTKGEILGKGAYGTVYCGLTSQGQLIAVKQVALDTSNKLAAEKEYRKLQEEVDLLKALKHVNIVAYLGTCLQENTVSIFMEFVPGGSISSIINRFGPLPEMVFCKYTKQILQGVAYLHENCVVHRDIKGNNVMLMPTGIIKLIDFGCARRLAWAGLNGTHSDMLKSMHGTPYWMAPEVINESGYGRKSDIWSIGCTVFEMATGKPPLASMDRMAAMFYIGAHRGLMPPLPDHFSENAADFVRMCLTRDQHERPSALQLLKHSFLERSH

SEQ ID NO: 236 - DNA, 4165 bp, Homo sapiens
ttcaaagaaacagcagcttttggacattttaatgagttctatgccaaaaccagaaagacatgctgagtcattgcttgacatttgtcatgatacaaactcttctccaactgatttgatgacagttaccaaaaatcaaaacatcatcttgcaaagcatcagcagaagtgaggagttcgaccaagatggtgactgcagtcattccacactggttaatgaagaagaagatcccagtggtggtagacaggactggcaacccaggacagaaggtgttgagatcactgtaacttttccaagagatgtcagtcctccccaagaaatgagccaagaagacttaaaagaaaagaatctgataaactcatcgcttcaagaatgggcacaagcacatgcagtttctcatccaaatgaaatagaaacggtggagctcaggaaaaagaagctgaccatgcggcccttagttttgcaaaaagaggaaagttccagggagctctgcaatgtgaacttgggctttttgctaccaagatcttgtttagaactgaacatttccaagtctgtaaccagagaagatgctcctcattttctgaaggagcagcaaagaaaatctgaagagttttcgacctctcatatgaagtacagtggccgaagcatcaagttccttctgccaccactgtcactcttgcccacgcgatctggtgtccttactatcccccaaaatcacaagtttccaaaagaaaaagaaagaaacattccaagtctcacatcttttgtgcctaagctctcagtgtctgttcgtcaatctgatgagctcagcccatcaaacgagcctccgggagccctagttaagtcgttgatggatccgactctcaggtcttctgatggcttcatttggtcaagaaacatgtgctcttttcctaagactaaccatcacaggcaatgcctggagaaggaggaaaactggaaatccaaggaaatagaagaatgtaacaaaattgaaatcactcactttgaaaaagggcagtctttggtgtcttttgagaatttgaaggaaggcaatattcctgcagttagggaagaggatattgactgccatggtagtaaaacgcgaaaacctgaagaagagaactctcaatatctttcatcaagaaagaatgagagttcagtagccaaaaactatgaacaagatccagaaatagtatgtaccattccaagcaagttccaagaaacccagcattcagaaataactccaagccaggatgaagagatgagaaataataaagctgcttcaaaaagagtttcattacataaaaatgaagcaatggaaccaaacaatattttagaagagtgtactgtacttaaaagcttatccagtgtagtctttgatgaccccattgataaactcccagaaggttgtagcagcatggagacaaacataaaaatatcaatagcagaaagagccaaaccagaaatgagtaggatggtgcctcttatccacatcaccttccctgtggatggaagccccaaggaaccagtgatagccaaaccaagcctccaaacaagaaagggaaccattcataacaaccatagtgtcaacatacctgtacaccaagaaaatgacaagcataagatgaattcccataggagtaagttggattcaaagaccaagacaagtaagaagacacctcagaattttgtgatttctactgaaggtcccattaagcctaccatgcataaaaccagcataaaaacacaaattttcccggctttgggacttgtggaccccaggccttggcaattgcccaggtttcaaaagaaaatgccacagatagcaaagaagcaatcaactcaccggactcagaaacctaaaaagcaatcatttccttgcatctgtaaaaatccaggaacacagaagtcatgtgttcctctctctgttcaaccgacagagccaagactaaattacctagatcttaagtatagtgatatgttcaaagaaatcaattcaactgctaatggacctggaatctatgaaatgtttgggacccctgtttattgtcatgtgcgagagactgaaagggatgaaaacacgtattaccgtgagatatgttcggctccatcaggcagacgtatcaccaataaatgtcgatcttcacacagtgagaggaagagcaatatcagaacaagactttctcagaaaaaaacacatatgaaatgcccaaagacttcatttggcattaaacaagagcacaaagtcttaatttctaaagaaaagagttccaaggctgtacatagcaacctacatgacattgaaaatggtgatggtatttcagaaccagactggcagataaagtcttcaggaaatgagtttctatcttccaaagatgaaattcatcccatgaacttggctcagacacctgagcagtccatgaaacagaatgaattccctcctgtctcagatttatccattgttgaagaagtttctatggaagagtctactggtgatagagacatttctaacaatcaaatactcaccacaagcctcagagatctgcaagaacttgaagagctacatcaccagatcccatttatcccttcagaagacagctgggcagtgcccagtgagaagaattctaacaagtatgtacagcaagaaaagcagaatacagcatctcttagtaaagtaaatgccagccgaattttaactaatgatctagagtttgatagtgtttcagatcactctaaaacacttacaaatttctctttccaagcaaaacaagaaagtgcatcttcccagacatatcaatattgggtacattatttggatcatgatagtttagcaaataagtcaatcacatatcaaatgtttggaaaaaccttaagtggcacaaattcaatttcccaagaaattatggactctgtaaataatgaagaattgacagatgaactattaggttgtctagctgcagaattattagctcttgatgagaaagataacaactcttgccaaaaaatggcaaatgaaacagatcctgaaaacctaaatcttgtcctcagatggagaggaagtaccccaaaagaaatgggcagagagacaacaaaagtcaaaatacagaggcatagtagtgggctcaggatatatgacagggaggagaaatttctcatctcaaatgaaaagaagatattttctgaaaatagtttaaagtctgaagaacctatcctatggaccaagggtgagattcttggaaagggagcctacggcacagtatactgtggtctcactagtcaaggacagctaatagctgtaaaacaggtggctttggatacctctaataaattagctgctgaaaaggaataccggaaactacaggaagaagtagatttgctcaaagcactgaaacatgtcaacattgtggcctatttggggacatgcttgcaagagaacactgtgagcattttcatggagtttgttcctggtggctcaatctctagtattataaaccgttttgggccattgcctgagatggtgttctgtaaatatacgaaacaaatacttcaaggtgttgcttatctccatgagaactgtgtggtacatcgcgatatcaaaggaaataatgttatgctcatgccaactggaataataaagctgattgactttggctgtgccaggcgtttggcctgggcaggtttaaatggcacccacagtgacatgcttaagtccatgcatgggactccatattggatggccccagaagtcatcaatgagtctggctatggacggaaatcagatatctggagcattggttgtactgtgtttgagatggctacagggaagcctccactggcttccatggacaggatggccgccatgttttacatcggagcacaccgagggctgatgcctcctttaccagaccacttctcagaaaatgcagcagactttgtgcgcatgtgcctgaccagggaccagcatgagcgaccttctgctctccagctcctgaagcactccttcttggagagaagtcactgaatatacatcaagactttcttcccagttccactgcagatgctcccttgcttaattgtggggaatgatggctaagggatctttgtttccccactgaaaattcagtctaacccagtttaagcagatcctatggagtcattaactgaaagt

SEQ ID NO: 237 - protein, 1328 aa, Homo sapiens
MSSMPKPERHAESLLDICHDTNSSPTDLMTVTKNQNIILQSISRSEEFDQDGDCSHSTLVNEEEDPSGGRQDWQPRTEGVEITVTFPRDVSPPQEMSQEDLKEKNLINSSLQEWAQAHAVSHPNEIETVELRKKKLTMRPLVLQKEESSRELCNVNLGFLLPRSCLELNISKSVTREDAPHFLKEQQRKSEEFSTSHMKYSGRSIKFLLPPLSLLPTRSGVLTIPQNHKFPKEKERNIPSLTSFVPKLSVSVRQSDELSPSNEPPGALVKSLMDPTLRSSDGFIWSRNMCSFPKTNHHRQCLEKEENWKSKEIEECNKIEITHFEKGQSLVSFENLKEGNIPAVREEDIDCHGSKTRKPEEENSQYLSSRKNESSVAKNYEQDPEIVCTIPSKFQETQHSEITPSQDEEMRNNKAASKRVSLHKNEAMEPNNILEECTVLKSLSSVVFDDPIDKLPEGCSSMETNIKISIAERAKPEMSRMVPLIHITFPVDGSPKEPVIAKPSLQTRKGTIHNNHSVNIPVHQENDKHKMNSHRSKLDSKTKTSKKTPQNFVISTEGPIKPTMHKTSIKTQIFPALGLVDPRPWQLPRFQKKMPQIAKKQSTHRTQKPKKQSFPCICKNPGTQKSCVPLSVQPTEPRLNYLDLKYSDMFKEINSTANGPGIYEMFGTPVYCHVRETERDENTYYREICSAPSGRRITNKCRSSHSERKSNIRTRLSQKKTHMKCPKTSFGIKQEHKVLISKEKSSKAVHSNLHDIENGDGISEPDWQIKSSGNEFLSSKDEIHPMNLAQTPEQSMKQNEFPPVSDLSIVEEVSMEESTGDRDISNNQILTTSLRDLQELEELHHQIPFIPSEDSWAVPSEKNSNKYVQQEKQNTASLSKVNASRILTNDLEFDSVSDHSKTLTNFSFQAKQESASSQTYQYWVHYLDHDSLANKSITYQMFGKTLSGTNSISQEIMDSVNNEELTDELLGCLAAELLALDEKDNNSCQKMANETDPENLNLVLRWRGSTPKEMGRETTKVKIQRHSSGLRIYDREEKFLISNEKKIFSENSLKSEEPILWTKGEILGKGAYGTVYCGLTSQGQLIAVKQVALDTSNKLAAEKEYRKLQEEVDLLKALKHVNIVAYLGTCLQENTVSIFMEFVPGGSISSIINRFGPLPEMVFCKYTKQILQGVAYLHENCVVHRDIKGNNVMLMPTGIIKLIDFGCARRLAWAGLNGTHSDMLKSMHGTPYWMAPEVINESGYGRKSDIWSIGCTVFEMATGKPPLASMDRMAAMFYIGAHRGLMPPLPDHFSENAADFVRMCLTRDQHERPSALQLLKHSFLERSH

SEQ ID NO: 238 - DNA, 4179 bp, Homo sapiens
agcgccaggcccggcgctcctcaagatggctgccgacagtgagcccgaatccgaggtatttgagatcacggacttcaccactgcctcggaatgggaaaggtttatttccaaagttgaagaagtcttgaatgactggaaactgattggaaactctttgggaaagccactcgaaaagggtatatttacttctggcacatgggaagagaaatcagatgaaatttcctttgctgacttcaagttctcagtcactcatcattatcttgtacaagagtccactgataaagaaggaaaggatgagttattagaggatgttgttccacaatctatgcaagatttgctgggtatgaataatgactttcctccaagagcacattgcctggtaagatggtatgggctacgtgagttcgtggtgattgcccctgctgcacacagtgacgctgttctcagcgaatctaagtgcaaccttcttctgagttctgtttctattgccttgggaaacactggctgtcaggtgccactctttgtgcaaattcaccacaaatggcgaagaatgtatgtaggagaatgtcaaggtcctggtgtacgaactgatttcgaaatggttcatcttagaaaagtgccaaatcagtacactcacttatcaggtctgctggatatcttcaaatcaaagattggatgtcctttaactccattgcctccagttagtattgctattcgatttacctatgtacttcaagattggcagcagtatttttggcctcagcaacctccagacatagatgcccttgtaggaggagaagttggaggcttggagtttggcaagttaccatttggtgcctgcgaagatcctattagtgaactccatttagctactacatggcctcatctgaccgaagggatcattgtggataatgatgtttattctgatttggatcctattcaagctccacattggtctgttagagttcgaaaagctgagaatcctcagtgtttgctaggtgattttgtcactgaattttttaaaatttgccgtcgaaaggagtcaactgatgagattcttggacgatctgcatttgaggaagaaggcaaagaaactgctgatataactcatgctttgtcaaaattgacagagccggcatcagttccaattcataaattatcagtttcaaatatggtacacactgcaaagaagaaaatccgaaaacacagaggtgtagaggagtcaccgctaaataatgatgttcttaatactattctcctgttcttattccctgatgctgtttctgagaaaccattagatggaactacttcaacagataataataatcctccatcagagagtgaagactataatctctacaatcagttcaagtctgcaccatctgacagtttaacatacaaactggctttgtgtctctgtatgatcaatttttaccatggagggttgaaaggagtggcacacctctggcaggaatttgttcttgaaatgcgtttccgatgggaaaacaactttctgattccaggattagcaagtggacccccagatctgaggtgttgtttactgcatcagaaactacagatgttaaattgttgtattgaaagaaagaaggcacgtgatgaggggaaaaagacaagtgcttcagatgtcactaatatatatccaggggatgctggaaaagcaggagaccagttggtgccagataatctaaaagaaacagataaggaaaagggagaggtaggaaaatcttgggattcctggagtgacagcgaagaagaattttttgaatgcctaagtgatactgaagaacttaaaggaaatggacaagagagtggcaagaaaggaggacctaaggagatggcaaatttaaggccggaaggacggctctatcagcatgggaaacttacactgctgcataatggagaacctctctacattccagtaacccaggaaccagcacctatgacagaagatctgctagaagagcagtctgaagttttagctaaattaggtacatcggcagagggggctcaccttcgagcacgcatgcagagtgcctgtctgctctcagatatggagtcttttaaggcagctaatccaggttgctccctggaagattttgtgaggtggtattcaccccgggattatattgaagaggaggtgattgatgaaaagggcaatgtggtgctgaaaggagaactgagtgcccggatgaagattccaagcaatatgtgggtagaagcctgggaaacagctaagccaattcctgctagaaggcaaaggagactctttgatgatacacgggaagcagaaaaggtgctgcactatctggcaatccagaaacctgcagaccttgctcggcacctgttaccttgtgtgattcatgcagctgtactcaaggtaaaggaagaagaaagtctcgaaaacatttcttcagttaagaagatcataaagcagataatatcccattccagtaaagttttgcacttccccaatccagaagacaagaaattggaagaaatcattcaccagattactaatgtggaagctctcattgccagagctcggtcactaaaagccaagtttggaactgagaaatgtgaacaggaggaggaaaaggaagatcttgaaaggtttgtgagttgcctgctggagcagcctgaagtgttagtcaccggtgcaggaagaggacatgctggcaggatcattcacaagctgtttgtgaatgcccagagggctgcagctatgactccaccagaggaggaattgaagagaatgggctccccagaggaaagaaggcagaactccgtgtcagacttcccaccccctgctggccgggaattcattttgcgcaccactgtgccgcgccctgctccctactccaaagctctgcctcagcggatgtacagtgttctcaccaaagaggactttagacttgcaggtgccttttcatcagatacttccttcttctgattcttctagcattactcgttggtggcttcagagacagtgctgcctcctcctgagggagggaaggtaccagggagaacctgggaggtcctggagagggccctgtccagttgggtgatcaggaatcaaaccagcatcggaaagacttcccagcaccaagcttgagctgtgtcgtttcgtggagggggcagcgaggatgggcttgagctgttgagagatttctgccctagagatggcctttgtatatgggggggtggtggggggacacaaacacatcagacactccgtcctcacactggcaggacggtgttcatcgcattctcttctgtgaccagcctctaggctagcggctgcattcgtggtctgtgcaaacacttcgtggttctatatatcagcagcaagtgtgcaaaataaaggacctgttaactcagatttctggatattttggtggtagcttctagtcccagaatctgtgtttttaaaatactacatgacattctgtctattcaatcacctggtggtcatctttcttgtactaattaactgttgatgagcattttggatattctaggagaaagcctataatttcacatagtttctctttttcatgtaactgtaacctaaatgtattacttctgataaaactatatatcaaatgtcactgcaaattagttttatatctgtcatgtgagatttgtcttacttatttttcttttggttgccatggaagttatggccctgaaaatcgtctccctccccttctcttgctgtacagcatgcgttctctttttgtggttgctggctgggtactgtatttaatgaagtagagaatagcacttgcaaaaatacagtcttggtacctagagactgtcatgcagatagtataatttggtatatgtgctaatgcattgagtagaggattattttaacacactattttgcttttgtattttagttaaaataatcgatggggatgtgtagcccccccgtgtgaggatgacatcaccacatttctagtttcatggagctcaagatgtcttgtgtctgtgtggctagatggcctctgcttggtaatcttatttttaggcctaaaattcccacttaaatccaaagtaaaaatggttatactgaagcataaaccttgcctgtgtaattttaaaaaattaatagagctgtgcaaaccctgttatttttgtaaaaaaaaaaaaaaa

SEQ ID NO: 239 - protein, 981 aa, Homo sapiens
MAADSEPESEVFEITDFTTASEWERFISKVEEVLNDWKLIGNSLGKPLEKGIFTSGTWEEKSDEISFADFKFSVTHHYLVQESTDKEGKDELLEDVVPQSMQDLLGMNNDFPPRAHCLVRWYGLREFVVIAPAAHSDAVLSESKCNLLLSSVSIALGNTGCQVPLFVQIHHKWRRMYVGECQGPGVRTDFEMVHLRKVPNQYTHLSGLLDIFKSKIGCPLTPLPPVSIAIRFTYVLQDWQQYFWPQQPPDIDALVGGEVGGLEFGKLPFGACEDPISELHLATTWPHLTEGIIVDNDVYSDLDPIQAPHWSVRVRKAENPQCLLGDFVTEFFKICRRKESTDEILGRSAFEEEGKETADITHALSKLTEPASVPIHKLSVSNMVHTAKKKIRKHRGVEESPLNNDVLNTILLFLFPDAVSEKPLDGTTSTDNNNPPSESEDYNLYNQFKSAPSDSLTYKLALCLCMINFYHGGLKGVAHLWQEFVLEMRFRWENNFLIPGLASGPPDLRCCLLHQKLQMLNCCIERKKARDEGKKTSASDVTNIYPGDAGKAGDQLVPDNLKETDKEKGEVGKSWDSWSDSEEEFFECLSDTEELKGNGQESGKKGGPKEMANLRPEGRLYQHGKLTLLHNGEPLYIPVTQEPAPMTEDLLEEQSEVLAKLGTSAEGAHLRARMQSACLLSDMESFKAANPGCSLEDFVRWYSPRDYIEEEVIDEKGNVVLKGELSARMKIPSNMWVEAWETAKPIPARRQRRLFDDTREAEKVLHYLAIQKPADLARHLLPCVIHAAVLKVKEEESLENISSVKKIIKQIISHSSKVLHFPNPEDKKLEEIIHQITNVEALIARARSLKAKFGTEKCEQEEEKEDLERFVSCLLEQPEVLVTGAGRGHAGRIIHKLFVNAQRAAAMTPPEEELKRMGSPEERRQNSVSDFPPPAGREFILRTTVPRPAPYSKALPQRMYSVLTKEDFRLAGAFSSDTSFF

SEQ ID NO: 240 - DNA, 3717 bp, Homo sapiens
ccaatggtaaaactaggaggacagccattttgcccacttgtaaaagagctaccttttcccacgagttggagcctgaggtgcggagtttcgtgagtttttactgactcgaggatcatcatgcctagggttcataacataaaaaagtctcttacacctcacatttcttgtgtgacaaatgaatctgataatctgctggattttttgcctgacagactaagagcaaagctacttccattccagaaagatggcatcatttttgccctcaaaagaaatggcaggtgtatggtggctgatgaaatgggtctaggaaagacaatccaggcaattggaattacttacttctataaagaggaatggcctctgttaatagtggtcccttcgtctctgaggtacccttggacagaagaaattgaaaaatggatcccagagctaagtccagaagaaatcaatgttattcagaataaaactgatgttaggagaatgtcgaccagtaaagtgacagttctgggttatggtctcttaaccgcagatgcaaagactttgatagatgcactgaataatcagaacttcaaagtagttatagtggatgaatcacactacatgaaatccagaaatgcaactcgcagcaggattttattgccaatagtacagaaagccagacgagccattcttcttacaggaacaccagctttaggaaggcctgaagagctttttatgcagattgaagctctctttccacaaaaatttggaagatggaccgactatgcaaaaagatactgtaatgcacacatcagatattttggtaaaagacctcagtgggattgtagaggggcatcaaatcttaatgaacttcaccagctattaagtgacataatgattagaagattaaagactgaagttttaacccagctaccccctaaagtcagacagcgtattccatttgatcttccatcagcagctgccaaggaattgaataccagctttgaagagtgggaaaaaataatgagaactccaaattcaggtgccatggagacagtcatggggttgataactcgcatgtttaaacaaactgctattgccaaggcaggtgctgtaaaggattatattaagatgatgcttcagaatgattcgcttaaatttctggtttttgctcaccatttaagcatgctccaagcttgcacagaagcagtcatcgaaaataagactcgttacattaggatagatggaagtgtttcatcttcagaaagaatacatctggttaatcagtttcaaaaggatcctgacactcgcgtggctatcctaagcattcaggctgctggccagggattaacatttactgcagcaagtcatgttgtatttgctgagttgtactgggaccctggacatataaaacaagcagaagaccgagctcacagaattggccagtgcagttctgtgaatattcactaccttattgcaaatggaaccctagacacccttatgtggggaatgttgaatcgcaaggctcaagttacagggagcacactgaacggtaggaaagaaaaaattcaggctgaggaaggtgataaggaaaaatgggatttcctgcagtttgctgaagcttggactccaaatgacagttctgaagagttaaggaaggaagctttgttcactcacttcgaaaaagaaaaacagcatgatattcgatcattttttgtaccacaacctaaaaaaagacagttgatgacctcctgtgacgaatcaaagagattccgggaggaaaatactgtagtgtcatcagaccctacaaaaacagctgcaagagatatcatcgattatgaaagtgatgttgaacctgaaacgaaaagattgaaattggctgcctcggaagaccactgcagtccgtcggaagagacaccatcccagtccaagcaaatccgaactccactcgtggaaagtgtacaggaggccaaggcccagttaaccaccccagcctttcctgtagagggctggcaatgtagtctctgcacctatatcaataattcagagttaccttattgtgaaatgtgtgagactcctcaaggcagtgctgttatgcaaatagatagcctcaaccatatccaggataaaaacgagaaggatgattctcagaaagacacctccaaaaaggttcaaactatctcagactgtgaaaaacaagcccttgcacagtcagaacctggccagttggctgacagcaaggaagaaacaccaaaaattgagaaagaagacggacttacatcccagccaggtaatgaacagtggaagagttcagacactttgccagtgtatgacaccttaatgttctgtgcaagtaggaatactgaccggattcacatctatactaaggatggaaaacagatgagctgtaatttcattcctctggatataaaattagacctttgggaagatttaccagcaagctttcagctgaaacaatatcgctcactgattttgagatttgttcgagaatggagtagtctaactgccatgaagcaaaggataatcaggaaaagtggacagctattctgtagcccaattcttgctttggaagagatcacaaagcaacaaaccaaacaaaattgcaccaaaagatacataaccaaagaagatgttgccgtagcctcaatggacaaagtgaagaatgttgggggccatgtccgtctgatcacaaaggagtccaggccacgggatcctttcacaaaaaaacttcttgaagatggagcctgtgtcccatttctaaatccatacacagtccaggcagatctcactgtgaagccctctacatccaaaggctatttgcaagctgtggataatgaaggaaatccactttgccttcgctgtcagcaacccacttgccagactaagcaagcatgtaaagcgaactcttgggattcacggttttgctctctgaaatgtcaggaagagttttggattcgatctaataacagttacctgagagccaaagtatttgaaactgaacatggtgtgtgtcagctctgtaatgtgaacgcacaagaactctttttacgtctgagagatgcccctaaaagtcagaggaagaatcttctgtatgctacctggacttcaaagctcccattagaacagctaaatgaaatgataagaaacccaggggaaggacatttctggcaggtggatcacatcaagccagtgtatgggggaggaggacagtgttccctggacaacctgcagactctctgcacagtctgtcacaaagagagaactgccagacaagctaaggaaagaagccaggtgagaagacaatctctagcatcaaagcatggatcagacatcacacgatttttggtaaagaagtaaagtagaaaaatatatgaatgaatgacaaatggtttacatgtggaagactttaatacagaagttttccatgtttgtttaatatatcgagagtaaaaattttcagaacaaaaatcaagaattcaaattctcttctactaattacttttagtattaaatacattttgaaagtacttaacagaaactaagatacaatactgaatatttctgtggtctttttgatttgattcagactcgcaattatgtttcagcaatgttttgtaaagctctttacccctaatatgcctaatcactgtattgtgcatagattgtgtttaaaaaatgtactctcaattacctaaaaaaaaaaaaaaaaaaaaaaaa

SEQ ID NO: 241 - protein, 1079 aa, Homo sapiens
MPRVHNIKKSLTPHISCVTNESDNLLDFLPDRLRAKLLPFQKDGIIFALKRNGRCMVADEMGLGKTIQAIGITYFYKEEWPLLIVVPSSLRYPWTEEIEKWIPELSPEEINVIQNKTDVRRMSTSKVTVLGYGLLTADAKTLIDALNNQNFKVVIVDESHYMKSRNATRSRILLPIVQKARRAILLTGTPALGRPEELFMQIEALFPQKFGRWTDYAKRYCNAHIRYFGKRPQWDCRGASNLNELHQLLSDIMIRRLKTEVLTQLPPKVRQRIPFDLPSAAAKELNTSFEEWEKIMRTPNSGAMETVMGLITRMFKQTAIAKAGAVKDYIKMMLQNDSLKFLVFAHHLSMLQACTEAVIENKTRYIRIDGSVSSSERIHLVNQFQKDPDTRVAILSIQAAGQGLTFTAASHVVFAELYWDPGHIKQAEDRAHRIGQCSSVNIHYLIANGTLDTLMWGMLNRKAQVTGSTLNGRKEKIQAEEGDKEKWDFLQFAEAWTPNDSSEELRKEALFTHFEKEKQHDIRSFFVPQPKKRQLMTSCDESKRFREENTVVSSDPTKTAARDIIDYESDVEPETKRLKLAASEDHCSPSEETPSQSKQIRTPLVESVQEAKAQLTTPAFPVEGWQCSLCTYINNSELPYCEMCETPQGSAVMQIDSLNHIQDKNEKDDSQKDTSKKVQTISDCEKQALAQSEPGQLADSKEETPKIEKEDGLTSQPGNEQWKSSDTLPVYDTLMFCASRNTDRIHIYTKDGKQMSCNFIPLDIKLDLWEDLPASFQLKQYRSLILRFVREWSSLTAMKQRIIRKSGQLFCSPILALEEITKQQTKQNCTKRYITKEDVAVASMDKVKNVGGHVRLITKESRPRDPFTKKLLEDGACVPFLNPYTVQADLTVKPSTSKGYLQAVDNEGNPLCLRCQQPTCQTKQACKANSWDSRFCSLKCQEEFWIRSNNSYLRAKVFETEHGVCQLCNVNAQELFLRLRDAPKSQRKNLLYATWTSKLPLEQLNEMIRNPGEGHFWQVDHIKPVYGGGGQCSLDNLQTLCTVCHKERTARQAKERSQVRRQSLASKHGSDITRFLVKK

SEQ ID NO: 242 - DNA, 4666 bp, Homo sapiens
cggtgtccgggctggtgatggggttaattccctttcgtaagactcttacttgcacccacccagccccgccgtcgccccgccgcgccgcgctccaaccgcctcctcctcctcagtaacgcgggccacggaaaggtatgatatatttgatccaagacagtccattccagtccgggaatctacagtggtgacaaggacatgggactcctcctgccagattacagatggttcactacagttgacatcctggctgacaactgtgaaaaagaaccttggattattttattttatttttgtgggacaccacaatcccaaatccaaaggacgcatcaggcttcaagctccctgtagaattcgaaaataaccttttctaatgaggatgtctgatactgttactgtaaaagatgaaactgcaacaatgaaggatttggaggcagaagtgaaagatacaaccagagttgaaaatcttatcaaatcagaaaactatgggaagattttggtagagaagaatgaacattgtattgagaacaatatagatttgcagcggccattgcagtcatttggacagacaggaaaaaggtctaagtcaagctcaaagttaaagctagttcggagccttgcagtgtgtgaagaatctccaccaccccctgcaccagagatatcacaggagaaccaggagaaaattcagatccagttaacacaatcatttgagaaagaagagaagccctcaaaagatgaagcagaaaaagaaaaggccagtgataagttgcccagaaaaatgttatcaagagattccagtcaagaatacactgattcaactggcatagatctacatgaatttttagtaaatacattaaaaaacaatcccagggacagaatgatgctgctgaaattggaacaagaaattttagatttcattggtaataatgagtctccacgtaaaaaattccccccaatgacatcttaccataggatgctattacacagagtagccgcttactttggattagaccacaatgttgatcagagtgggaagtctgtcatagtaaacaaaactagcaatacaagaatacctgatcagaaatttaatgaacatattaaggatgataaaggtgaagactttcagaaacgttatatcctcaagagagataactctagctttgacaaagatgataaccagatgagaatacgtttgaaagatgacagaagaagcaaatctatagaagaaagagaagaagagtaccagagagccagagaccgaatattttcccaagattccctgtgttcccaagagaattacattattgacaaaagactccaagacgaggatgccagtagtacccagcagaggcgccagatatttagagttaataaagatgcttcagggagatctacaaatagccatcaaagcagcactgagaatgagttgaagtactcggaaccacgaccctggagcagcacagattcagacagctctcttcgaaacctgaaacctgctgtaaccaaagccagcagcttcagtggaatctcagtcctgacaagaggtgatagttctggaagcagcaaaagcataggcaggctttcaaaaacaggttctgagtcttctggtagtgtagggtcatctacaggctctctttctcacatccagcagcctcttccaggtacagctctcagccagtcttctcatggcgcacctgtcgtctatccaactgtcagcactcatagttctctttcctttgatggtggcctaaatgggcaagtcgcatctcctagcactagcttctttttgcttcccttggaagcggcaggcataccacctggcagtattctgatcaacccacaaacaggtcagcccttcataaacccagatgggagtccagttgtgtataatcctcctatgactcaacaaccagttagatcccaagtgcctggacctccacagccacctctgccagccccacctcaacaaccagcagctaatcacattttctcacaggataacctagggtctcagtttagccacatgagtcttgctcgccagccatctgctgatggttctgaccctcatgccgccatgttccagtccactgtggttcttcagtctccacagcagtctggttatatcatgacagcagcccctccaccacatcctcctccaccgccaccaccaccacctcctcctcctcccctaccacctgggcagccagtccctactgctggatatcctgcctctggtcatcctgtcagccagcctgtgctccagcagcagggatatattcagcagccatcaccacagatgccagcctgttattgcgctccaggccactatcactccagccaacctcagtatcgcccagtcccttctgttcattacaattcacatctaaaccaaccactgccacaacctgcgcagcagacaggttatcaagttatacccaaccagcagcaaaactaccaaggaatagttggagttcagcaaccccagagtcagagcctagtcagtggccaacccaacagcattggaaatcagattcaaggagtggtcatcccctatacttcagtgccaacatatcaggtttcactgcctcaaggttctcaaggaattccccatcagacttatcaacagcctgttatgttccctaatcagtctaatcaaggatctatgcccacaacaggaatgcctgtttactatagtgtcattccacctggtcaacaaaacaatttaagctcttcagtaggttacctgcaacatccaggatcagaacaagtacaatttcctcgaaccacttcaccatgcagttcccagcagcttcaaggccaccaatgtacagctggaccaccaccgccacctggtggggggatggtgatgatgcagctcagtgtaccaaacaatccacaatcttgtgcccactcacccccgcagtggaaacaaaacaaatattactgtgatcaccagagaggacagaagtgtgtagaatttagcagtgtagacaatattgtccagcacagccctcaactcagtagccccattatttcaccagctcagtcgccagcaccagctcagctgtccaccctgaaaactgtacgtccctctggaccaccactttccatcatgccccaattttctagaccttttgtccccgggcaaggagattccaggtatccattacttggccagccactgcagtacaatcctcctgctgttctgcacggacacattccaaaccaacagggtcagcctggcagcaggcatggaaaccgaggaaggagacaagctaaaaaagctgcatccacagaccttggagcaggagaaacagttgttgggaaggtcttggaaattactgaactaccagatggaataactcgcatggaagctgaaaagctttttggggaactctttaaaattggcgccaagatccggtggctccgggacccccagtcccaaccacgtcgtcaccccctctgctgtggcagtggggacaacactgccaaccctgaacgctctaaacccagtgacttggcctccacctacaccgtcttagccacattcccctccatttcagctgcacagaatgcactgaagaaacaaattaactcagttaacaagtttaagctgagaacaagcaagaagcactatgactttcacattttggaaagggcaagttctcagtaacagccacctttggacccttcgcctttatggttcccctgccctctcccatctttgattggcttggtatttggagcttctgttaacattatagagactcctaggatgtgtgttcatggcattatagcctttgaagaaaggccagtgatccagcaaagggggaaaaatatgcatttcaccccacatgactaggaatccacatcagaatgatacagagttagcaggtttttctaaggaaatgccattcaaatgcctcctaacttttatagttattttgttttatatttctaaattcttgtatcagatccaaagctctattgtacagcaaattattcttcaaaatgattataaccagttgcaccctgtatttctttttgcagccagcacaatgtgacccaacttaaaatttgggggaaaaagaatgcaggagtgaaataaccaagtcaaaaccatgtactatctccttgggggttagggatgctaagaagagcccacaaatagaggattactcttcccctgaatctctaaactcagaaacaattaccaaaaaatacataactcttccttgtagggccctttccttattcatttaggtagtgtgaacattaagtataaaataaattatgttcttaatgcctcttaaaccacttacattcaaaggggaacagaaatcattctaagcaggaaaatacttccactttttttttttcaagtatctctctaataactaaatgccacttatttgcattctccttgtggattttttgtcacctaaggaaatgcatttgatgagtgctggaaacttcttaagtgctttacagtttgttttcattgtttgcagcggatcactggacatcaaagattcattgcacttatgaacaaggaaccttcttttcaatttctgtgtaatttgcaaggctgtacaatgtgtgctgatgcaagcctttttcagttcaagagaataaatgtttacaaatataaaaaaaaaaaaaaaaaaaa

SEQ ID NO: 243 - protein, 1099 aa, Homo sapiens
MRMSDTVTVKDETATMKDLEAEVKDTTRVENLIKSENYGKILVEKNEHCIENNIDLQRPLQSFGQTGKRSKSSSKLKLVRSLAVCEESPPPPAPEISQENQEKIQIQLTQSFEKEEKPSKDEAEKEKASDKLPRKMLSRDSSQEYTDSTGIDLHEFLVNTLKNNPRDRMMLLKLEQEILDFIGNNESPRKKFPPMTSYHRMLLHRVAAYFGLDHNVDQSGKSVIVNKTSNTRIPDQKFNEHIKDDKGEDFQKRYILKRDNSSFDKDDNQMRIRLKDDRRSKSIEEREEEYQRARDRIFSQDSLCSQENYIIDKRLQDEDASSTQQRRQIFRVNKDASGRSTNSHQSSTENELKYSEPRPWSSTDSDSSLRNLKPAVTKASSFSGISVLTRGDSSGSSKSIGRLSKTGSESSGSVGSSTGSLSHIQQPLPGTALSQSSHGAPVVYPTVSTHSSLSFDGGLNGQVASPSTSFFLLPLEAAGIPPGSILINPQTGQPFINPDGSPVVYNPPMTQQPVRSQVPGPPQPPLPAPPQQPAANHIFSQDNLGSQFSHMSLARQPSADGSDPHAAMFQSTVVLQSPQQSGYIMTAAPPPHPPPPPPPPPPPPPLPPGQPVPTAGYPASGHPVSQPVLQQQGYIQQPSPQMPACYCAPGHYHSSQPQYRPVPSVHYNSHLNQPLPQPAQQTGYQVIPNQQQNYQGIVGVQQPQSQSLVSGQPNSIGNQIQGVVIPYTSVPTYQVSLPQGSQGIPHQTYQQPVMFPNQSNQGSMPTTGMPVYYSVIPPGQQNNLSSSVGYLQHPGSEQVQFPRTTSPCSSQQLQGHQCTAGPPPPPGGGMVMMQLSVPNNPQSCAHSPPQWKQNKYYCDHQRGQKCVEFSSVDNIVQHSPQLSSPIISPAQSPAPAQLSTLKTVRPSGPPLSIMPQFSRPFVPGQGDSRYPLLGQPLQYNPPAVLHGHIPNQQGQPGSRHGNRGRRQAKKAASTDLGAGETVVGKVLEITELPDGITRMEAEKLFGELFKIGAKIRWLRDPQSQPRRHPLCCGSGDNTANPERSKPSDLASTYTVLATFPSISAAQNALKKQINSVNKFKLRTSKKHYDFHILERASSQ

SEQ ID NO: 244 - DNA, 4018 bp, Homo sapiens
ttcctccacttcctggactgcgcgaccggaggcctagcgggcgcgcgcccgcaccatcgactcgccaacgagagaaggtcctggggcacggacaccgacgggttgcgactgtgacgtgaggtgttctcgcgcgcgctagcgcgcgtctccgggtgccgctgacgggcgtgcgcgcttgtgcggagccggaggtgggggccgaaccagccaaggttgcgggggccgcagagccggacgaagacggagggcggagccggcttcgggactgcggagactacacaccgagcgagcgcctgggcccgaagggagcgatgctgtggttccagggcgccattccggccgccatcgcgacggccaaaaggagcggcgcggtcttcgtggtgttcgtggcaggtgatgatgaacagtctacacagatggctgcaagttgggaagatgataaagttacagaagcatcttcaaacagttttgttgctattaaaatcgataccaaaagtgaagcctgcctacagttttcacaaatctatcctgtagtgtgtgttccatccagtttctttattggagacagtggaattcccttggaagtaatagcaggaagtgtttctgcagatgaacttgttacaagaattcacaaggtccgacagatgcatttgctaaaaagtgaaacatcagtagcaaatggcagtcagtcagaaagttcagtgtctactccatctgcgtcatttgaacctaacaacacttgtgaaaactctcagtccagaaatgcagagctttgtgagataccacccacttctgatacaaagtcagatactgcaacaggaggagaaagtgcaggccatgccacttcctctcaggagcctagtggatgctcagatcagagacctgcagaggacctcaacatccgagtggaaagactaacaaaaaaacttgaagaaaggagagaagagaaaagaaaagaggaagaacagagagaaattaagaaggaaattgagaggagaaaaactggaaaagaaatgttggattataaaagaaaacaagaagaagaattaacaaaaagaatgctggaggaaagaaacagagagaaagcagaagatagggcagctcgagaacgtataaaacagcagattgcattggaccgtgcagagagagctgctcgttttgcaaagacaaaggaagaagtagaggctgccaaagctgctgccttgctagcaaaacaggcagaaatggaagtcaagagggaatcttatgcaagagaaagaagcactgttgcaagaattcaattccgtcttcctgatggttcttcctttacaaatcagttcccttctgatgctcctctagaagaggcaaggcagtttgctgcacagactgttggcaacacttacggtaatttttcgttagcaaccatgtttcccaggagggaatttaccaaagaagattataaaaagaagttactggatttggaacttgccccaagcgcttcggtggtactgttgccagcaggaagaccaactgcatccattgtacactcttccagcggagacatttggaccttgttgggaacagtgctttatccattccttgccatctggagattaattagcaatttcttgtttagtaatccgcctcccacacagacttcagtgagagtaacatcgtcagaacccccaaaccctgcatcatctagcaaatcagaaaaaagggaaccagtgagaaaaagagtgctggaaaaacgtggagacgactttaaaaaggaggggaaaatttatagattaaggactcaagatgatggtgaagatgaaaacaacacttggaatggaaattccactcaacagatgtagtgtgacaagtataatatgtgcaataatcattgtttctcttatgatttaattcaactaaaattctactggagaagtgggactgctttatattttccaactggtctataaaatgtctctttattcctgcttagtgggtgtgggttgaaggtgtttaactcagaaaagtaaagacaggaaataactctctgctaggtccttgcttatatggcaaccactgctagaaccctaaaagaaccaaaaatctgccacagcctgcctccatcagcttcttatttagtatttcatatgcccattagccctatgcttcagatgacacgttttgtttagagctactttgctccaagactcttaagcccaaagtaactggtatgtcactgagtaacttgactcggtgtcagagcattttaactagccactcagatgagaatttatgtttaacttctctttttactcatcagctgcaagcaaaatcttgtagtttttaatcttaaacactgaataaaaaaactttcccctaaattggaatgatcttagttttgctttgagttttgttatctagcatctttttgttgcacagggctctattgaggtcctatgtctctgatttttttttttccccagtattgccctggagctgtctctggaaagtagctggcgaggttaccttaactatcactgaagaaagaaattttctgacacactgatggcatgtgacttgtctcctaagtcagtgaggcatcactttgtttgcataaagtatacggtttgttaaggcctttgttcttgtgagatgcaaaacagctgctagtctgcaacctagttttccctctcacctttaactgacgttttgtcctcaataattacacaaggacctagagtacctataggacaaaaagtatagaataaaaatatgcctttagtcatttggtttttcttaaaaagttgagattcttaatctgacttacatgttactttatccgtatgtctttgttagtggagaccgctaaactaatgatgtttgaaaacagttcctctgttttagattggaagatagcactctagagtggacatacggaaagactgtgactttattttgtaatgggaggaagaaattttctcagagcaaactttctattttttacctgtgaaataacagtgactttttaaaatggtgacagtgttggcaaggaaacagcaacacaggctgcgctgttggtaggagtgaaaaccagtataattcttctgaaaaacatttatcagaaacttaaaatatttcataccgtttgatccagtagcttcttctaaatcataaatgcagacaatgtttaggtaaagacatactcattaagtgttatttattttactcaagaactggaaaccaactaaatgccttctatagaagtaatttttgatgaggagaaatggtacaatactaattaacaacttggtttaacatgtttactgagcatctgttaagtgttgggggaaaaagcagcaggatccagagctataggtacagtgtgatctcagctttgcaaacacattttctacatagatagtactaggtattaatagatatgtaaagaaagaaatcacaccattaataatggtaagattggtttatgtgattttagtggtatttttggcacccttatatatgttttccaaactttcagcagtgatattatttccataacttaaaaagtgagtttgaaaaagaaaatctccagcaagcatctcatttaaataaaggtttgtcatctttaaaaatacagcaatatgtgactttttaaaaaagctgtcaaataggtgtgaccctactaataattattagaaatacatttaaaaacatcgagtacctcaagtcagtttgccttgaaaaatatcaaatataactcttagagaaatgtacataaaagaatgcttcgtaattttggagtaggaggttccctcctcaattttgtatttttaaaaagtacatggtaaaaaaaaaaattcacaacagtatataaggctgtaaaatgagaattctgccccctcacctcttaccccagtactattctccagaggtaatctattaacaatttcttatgtaattttcagaaaatttgtatgcgtatataagcaaatatgtaatctttattttttaaataaatgggatcatattatatattctaaaa

SEQ ID NO: 245 - protein, 508 aa, Homo sapiens
MLWFQGAIPAAIATAKRSGAVFVVFVAGDDEQSTQMAASWEDDKVTEASSNSFVAIKIDTKSEACLQFSQIYPVVCVPSSFFIGDSGIPLEVIAGSVSADELVTRIHKVRQMHLLKSETSVANGSQSESSVSTPSASFEPNNTCENSQSRNAELCEIPPTSDTKSDTATGGESAGHATSSQEPSGCSDQRPAEDLNIRVERLTKKLEERREEKRKEEEQREIKKEIERRKTGKEMLDYKRKQEEELTKRMLEERNREKAEDRAARERIKQQIALDRAERAARFAKTKEEVEAAKAAALLAKQAEMEVKRESYARERSTVARIQFRLPDGSSFTNQFPSDAPLEEARQFAAQTVGNTYGNFSLATMFPRREFTKEDYKKKLLDLELAPSASVVLLPAGRPTASIVHSSSGDIWTLLGTVLYPFLAIWRLISNFLFSNPPPTQTSVRVTSSEPPNPASSSKSEKREPVRKRVLEKRGDDFKKEGKIYRLRTQDDGEDENNTWNGNSTQQM

SEQ ID NO: 246 - DNA, 767 bp, Homo sapiens
ttaatacttctatttcttacaaaacaaccgtataggggttaaagtatcagtgcaaagtcccgttcaaatattgactcagtaatgagctctacaagccagcctttgtggcatgttaaattcaaaacaagcttagcatttttttttttttttttggatagaaactggtgggggtggggaaagaaagagggaactgggaagagaaggaggggaacttaaaccttgcttcctgctctgtctttctcagaaaaccaaatatggcatcttccatgaggagcttgttttctgaccacgggaaatatgttgaatctttccggaggtttctcaaccattccacggaacaccagtgcatgcaggaattcatggacaagaagctgccaggcataataggaagataccagaattgctgttaacaaataaaatactggccagatgtgttggttcacgcctgtaatcctagcacttcgggaggctgaggcgggaggattacttgagcctaggagtttgagaccagcctgggcaacatagcaagatcccatctctacaaaaaagtgaaaaagttagctgaacaaggcggcatgcacatgctactccagacgctgaagtgggaagatcacttaagtccgagagatcgaggcttcagtgagatatggctgagacactgctctcagcctggatgacagagtgagaacctgtctcaaacaagagaaaaaaataaatcaaatgctattcaaaattctcaaaaaaaaaaaaaaaaaaaaaaaaaaaaa

SEQ ID NO: 247 - protein, 51 aa, Homo sapiens
MASSMRSLFSDHGKYVESFRRFLNHSTEHQCMQEFMDKKLPGIIGRYQNCC

SEQ ID NO: 248 - DNA, 907 bp, Homo sapiens
ttaatacttctatttcttacaaaacaaccgtataggggttaaagtatcagtgcaaagtcccgttcaaatattgactcagtaatgagctctacaagccagcctttgtggcatgttaaattcaaaacaagcttagcatttttttttttttttttggatagaaactggtgggggtggggaaagaaagagggaactgggaagagaaggaggggaacttaaaccttgcttcctgctctgtctttctcagaaaaccaaatatggcatcttccatgaggagcttgttttctgaccacgggaaatatgttgaatctttccggaggtttctcaaccattccacggaacaccagtgcatgcaggaattcatggacaagaagctgccaggcataataggaaggattggagacacaaaatcagaaattaagattctaagcataggcggaggtgcagattgtctcattcggggaagctccagggttctcaagcggaattcgtgtttcattttgtgtagcacccgtcagaaagacaagccaggcatgaggatccatgatgagcgctcttctgagttgccatttggagctgcccgtttagaaagcaaatctgcatttccctcattcctagtttccttcatcctcttttaagtgtcatcttttccatgaagcctactagatcacacagttgaaaattgcaaagtcttcacaccgcagcttcccctttctttgttgctttggttttctccgtgggacttcccaccatccgtaaaattaggtgtttttgcctgttttattcactgctacgtctccaatggttagaacctgacatttagtgggtgctcaataatatttgttgaagtaatgtataataacttcactttcttgagtaattactatatatcatgaactgtggtaaatta

SEQ ID NO: 249 - protein, 126 aa, Homo sapiens
MASSMRSLFSDHGKYVESFRRFLNHSTEHQCMQEFMDKKLPGIIGRIGDTKSEIKILSIGGGADCLIRGSSRVLKRNSCFILCSTRQKDKPGMRIHDERSSELPFGAARLESKSAFPSFLVSFILF

SEQ ID NO: 250 - DNA, 3373 bp, Homo sapiens
ttaatacttctatttcttacaaaacaaccgtataggggttaaagtatcagtgcaaagtcccgttcaaatattgactcagtaatgagctctacaagccagcctttgtggcatgttaaattcaaaacaagcttagcatttttttttttttttttggatagaaactggtgggggtggggaaagaaagagggaactgggaagagaaggaggggaacttaaaccttgcttcctgctctgtctttctcagaaaaccaaatatggcatcttccatgaggagcttgttttctgaccacgggaaatatgttgaatctttccggaggtttctcaaccattccacggaacaccagtgcatgcaggaattcatggacaagaagctgccaggcataataggaaggattggagacacaaaatcagaaattaagattctaagcataggcggaggtgcaggtgaaattgatcttcaaattctctccaaagttcaggctcaatacccaggagtttgtatcaacaatgaagttgttgagccaagtgctgaacaaattgccaaatacaaagagcttgtagccaagacatcgaacctcgagaacgtaaagtttgcttggcataaggagacatcatctgaataccaaagtagaatgttggagaaaaaggagcttcaaaagtgggactttattcatatgattcaaatgctgtattatgtaaaagacatcccagctaccctgaaattcttccatagtctcttaggtaccaatgctaagatgctcattattgttgtgtcaggaagcagtggctgggacaagctgtggaaaaagtacggatcacgctttccccaggatgacctctgccagtatatcacatcagatgacctcactcagatgctggacaacctagggcttaagtatgagtgctatgaccttttgtccaccatggatatatctgactgctttattgatggtaatgaaaatggagacctgctttgggattttttgactgaaacctgcaactttaatgccacagcaccacctgatctcagagcagagcttgggaaagatctacaagagcctgaatttagtgctaagaaagaggggaaggttctttttaataatactctgagtttcatagtgattgaggcataactatcaatcacaaaagtatattcaaaaattatattttgaacaactcgaatcactcatttatttccatattaaaatcacaaactcatccattaatgtagataaagcactgtttggatatgagatgtagcaaattccaatacattattggacttccatttggaatcatatgggatactgctggtcttatcctgtccctcctccaggtagagagaccacaagcaggctcaacataacataagctagaaaaattagatgactgaatttctatggcatattgataataaaattcattccatttgctgattgtctgaaattttctagaatactaataaaatacatactatagattctttattagtgaagtatgcactaatcaatactttgaacacaaagcctgtgttactgatttggccgttttgtgaagaaacatttatctttgtacgttcttctattgtgctttctatctaatttttattaatttgtaagagtaagcacctttagaatattaaaaattaattctttatcacatgttgtcatttcttcccattgtgttttctcttgtaattttatctgtgaattaatagctttttgtttgtctttttgatatactgaagttttctattatattcagccagatttttttttaagtctcggcttctgatacattttaaaagaccttctaaaaccaaggttttagaatactaacattttatcaaaataatattatagttttgctttttttaaaaaatgaaatctttactatgtttgaaatttagataagtataaacagtgagaacaaactgtttcccctcaaaataatagccagatgtataaacaaaatttattgaagaacaaagaaacacaaaactaaacctgttctagcttaaaatgcagcttttaccagatttctaggaattgggtaaatgcaaggttctagaaaaccttcaatgcattttgatactttatagtttcttatgtcactctcaagaactcctataagaccaagagtcatctttggactgtaggatttcaggggggttttgaaaacaaatttgatgtttcttatttttaataataacgctctgttatttttgacataaacagtacatttaataattaataaataaatattttaagtatgtaaataattagtactccctgtcacaaacaaaacaaaagtaaggttttactaaacagctcatgagccctcattctgccagtgaggaagccttcaaccccgtgtgatactcactctttcatgcaatagggcttccatgtaatgttgccgtataatcactttaaaaagttaaacgacccatctcaatcacctagtttatccccagggaatacactggcatagagagcctatttacactaataaactaccaagctttgttgttcataataagtaaaatggacttgcattgctctcttttttggacaacttcatcaatgctttttgaattatatgtttcaacaaatgaaacgacagttatccaatcagattcctgaaaatgaacactgaaccgttaatcatactgatatgtactactgacaaaggaaatctgtgaggcacacatgattgatgggtatggggccatgaagaccttgaagagcttcaccagaagtatggaaatcaagactttacagagtcttttgtataaagcacacgtgcaaaaacaaacaaaattagaactaacaatgctattgaaagatacaaaagaattgcagtccatagattggtgtttgtaaatatggcctttttctcgtccttattaaacccttagtatacaaggataaataaattctcacctgcttaattttagtgcaattgaaacacataagcctttttaaagagagaaattcccatgaaaacctactagtcagcaatgggaagttgtataaattcaagggataaacctatccctgttttcttcctgcactgtatgataataccaaaatttgggacagtcacatactaacttttcagatttgttcttgtgtttcagaaaaaagtgctcagcatgaatttggaatgttgttttatgtattgttgtggatctctcagtgtttaacatggtgccttgcatatggtaaatgctaagtaaagcgggatcaatgaattatttccttctcaaacatttatcttataccttgtgtgttcatattattattataaacagagctcaagaaacccaataaagttatgtgttgccagtgtaaaccttaacttaaaaaaa

SEQ ID NO: 251 - protein, 292 aa, Homo sapiens
MASSMRSLFSDHGKYVESFRRFLNHSTEHQCMQEFMDKKLPGIIGRIGDTKSEIKILSIGGGAGEIDLQILSKVQAQYPGVCINNEVVEPSAEQIAKYKELVAKTSNLENVKFAWHKETSSEYQSRMLEKKELQKWDFIHMIQMLYYVKDIPATLKFFHSLLGTNAKMLIIVVSGSSGWDKLWKKYGSRFPQDDLCQYITSDDLTQMLDNLGLKYECYDLLSTMDISDCFIDGNENGDLLWDFLTETCNFNATAPPDLRAELGKDLQEPEFSAKKEGKVLFNNTLSFIVIEA

SEQ ID NO: 252 - DNA, 836 bp, Homo sapiens
atgcgcctgcggccgctgcccctcgtggtggtccctggcttgctgcagctgctattttgtgacagtaaggaagtggtgcatgccacggaggggctggattgggaagacaaagatgctccagggacgttggtcggcaacgtggtgcactcaaggatcatcagtcccctgcgcctgtttgttaaacagtctccggtgcccaagcccggccccatggcgtatgcagacagcatggaaaacttttgggattggctggccaacatcacggagattcaggagccattggcaagaactaaacggaggccaatagtaaaaacaggaaaatttaagaaaatgtttggatggggtgactttcattccaacattaaaactgtcaaactcaatctcctcatcacagggaaaattgttgaccatggaaatggaaccttcagtgtgtatttccgacataattcaacaggcctgggcaatgtttcagtgagcttggtaccaccctccaaggtggtggaatttgaagtttccccccagtctaccttggagaccaaggaatccaaatctttcaattgtcgcattgagtatgaaaaaacagatcgggcgaaaaagaccgccctgtgcaactttgacccatccaagatctgctaccaggagcagactcagagccatgtgtcttggttgtgctccaagcccttcaaggtcatttgcatttacattgccttttacagtgttgattataaactcgtgcaaaaggtgtgccctgactacaattaccatagtgagaccccatacttatcttctggctgatcttcctgctgtggtggaaatgagggatacatatgtatttg

SEQ ID NO: 253 - protein, 264 aa, Homo sapiens
MRLRPLPLVVVPGLLQLLFCDSKEVVHATEGLDWEDKDAPGTLVGNVVHSRIISPLRLFVKQSPVPKPGPMAYADSMENFWDWLANITEIQEPLARTKRRPIVKTGKFKKMFGWGDFHSNIKTVKLNLLITGKIVDHGNGTFSVYFRHNSTGLGNVSVSLVPPSKVVEFEVSPQSTLETKESKSFNCRIEYEKTDRAKKTALCNFDPSKICYQEQTQSHVSWLCSKPFKVICIYIAFYSVDYKLVQKVCPDYNYHSETPYLSSG

SEQ ID NO: 254 - DNA, 1853 bp, Homo sapiens
atagggtgtgaccacccacaccacctggccaggatctgctgcagccattcctcacgacgacctcacccaggttcaccaccaccaggaggtgatcctggtgcaggcatgccaggaggtggtgggtagcgacgacttggatggggaaccagatactcatcctggtgccagagctggccagcggcgaccaccaccaccacctcgagcaggccctggtcaccatcgtgggggctggcaagggtggatgtggcaccatcttgggcaacaagaagtgggggcagaagcgagtgcagatcaggaacctggagggcaagttatctgtctccatgtggtactcggatgaaaacaaaaagacattaaccataaaatagtggttgagaaacagatcactggagagaactcacctcctgattattcagagtatatgacaggaaagaaacttcctccttggaggaatacctggcattgacagctcagatcccaaaaaactgcagaattcgccagaatgaagccaagaaaaatttaaaagatgatgttccatgaacaatagctggccctcgccaaggctgcacaaagatgttcaaggataactgacatgagaaaacatctgcacactcactgtcacggagtccacttctgcacagaatgtagaagagcttttgttgagagctcaaaacaaaaaccacacaaactggttcacactggagagaagctgtttcagttcacgtttgaagaccgtgggaaatgcttttcactggacttcaatttccacacacatgaattttaaaaaggctttaaaagatgctttatcttgctctctaatcttgtttcaaaaacatggtttttttgtaaagtgtgttcccaacaggacaactcgtagatgcaaaagacaattctttatacaacagtgctaaaaatgggacttctgtttacattcttgcaagtatgaagctcatttgttgcttataattttttaaattttttattttctaagtgtgcatattgtacactttttgaagatatgcttagtaatgctatgtgtgatttttctggaggttgataattttgcttgcaatagattttctttgaaagaatgggcagttacatgcatgcttcaaaaatattttcctgtaaaaaaagttatataggatttgtttgctatatgaattttggttatattctttgatgttaacacattttgtataattgtatcatatagctgtatagagtcatgtagtatcaaatattagatgtgatttaatagtgttcatttaaatccattttagtcacgtttttcccaaaaaatactgccagatgctgatgttcagtgtaatttctttgcctgttcagtttctgaaagtggcactcagttatagaaatgttgtaccttttaaaacctgttgtgcacattccatgtaacaaaaagggcaacaataaaatagccatcctaaagaaagaatatggcagaacaagctctgtaagcacagtcttattttcttttgttgtccagaatacttataattcttgagtctcccagaaattggaagctaaataaagcatcttctttcctttattttgaactcagttacaatgatttgttattaaagtgatgcatagatatttcaatactaaaaataattatatagtatgtacccttgtatcaagttttgtttactgtacagaatgcttttgagatacagctagactattgtatttatgcataggtttttatttatttatttatttatttatttattttactagttttgttttgccattcatgacttgatgggtatttgggttgtacccaatttggggctgttatgaataaagttgctataaatacttatgtatac

SEQ ID NO: 255 - DNA, 1284 bp, Homo sapiens
atgtctgacaaactgccctacaaagtcgcagcctggggacgcaaggccctggacattgcagagaacaagatgccaggcctgatgcgcatatgggagcggtactccgcctccaagccactgaacggcgcccgcatccctggctgtctgcacaggaccgtggagactgccgtcctaatgagcctcatcaccctgggtactgaggtgcagtggtccagctgcaacatcttctctacccaggaccatgcggctgctgccattgccaaagctggcatttcagccagctggcatgcctggaagggcgaaacagacgaggagtacctgtggtgcattgagcagatgatgtacctcaaggacgggccccttaacatgattctggaagacgggcgaccttaccaacctcatccacagcgagtactcgcagctcctgctgagcttccgaggtatatccaaagagaccacaatcggggtccacaacctgtacaagatgatggtcaatgggattctgaaggtgcctgccatcgatgtcaatgactccgccaccaagagcaagtttgacaacctctatggctgtgggagcccctcataggtggtatcaagcaggccacagacgtgatgattgccggcaaggtagcggtggtagcaggctatggcgataagggcaagagctgtgcccaggccctgcggggtttcagggccagcgtcatcatcaccaagactgaccccatcaaggcactgcaggctgccatggagggctatgaggtgactaccatggatgaggcctgtcaggagggcgacgtctttgtcaccaccacaggttgtgttgacatcatccttggccagcactttgagcagacgaaggatgataccattgtgtgtaacactggatactttgatgtggaaatggatgtcaagtggctcaacaagaacactgtggagaaggtgaacgtcaagctgcaggtggacccgtaccggctgaagaatgggcggggcatcatcctgctggctgagggtcggctggttaacctggcttgtgccatgggtcaccctagcttcgtgaggagtaactccttcaccagccaggtgatggcgcagatcaagctgtggacccacccagacaagtaccccgttggggttcacttcctgcccaagaagctggatgagtcagtggctgaagcccacctgggcaagttgaacatgaagttgaccaagctgactgagaagcaggcccagtacctgggcatgtcttgttactgccccttcaagccagatcactaccgctactga

SEQ ID NO: 256 - DNA, 4225 bp, Homo sapiens
ggccccctccggaaggtgaggggaatggattggactccggtggggaaagcgggtgtctagaagtggtgctaatgggaagagaattctggtttcaaaagaggatgctctgccacaaagagcggctcgcgcgctggcctgggctctagccgaggagagatcccgggagaactccagagctccgggggagcgctcctcggaagaccggggccaacatgcctgtgcgcagggggcatgtggcaccacaaaatacatttctggggaccatcattcggaaatttgaagggcaaaataaaaaatttatcattgcaaatgccagagtgcagaactgtgccatcatttattgcaacgatgggttctgtgagatgactggtttctccaggccagatgtcatgcaaaagccatgcacctgcgactttctccatggacccgagaccaagaggcatgatattgcccaaattgcccaggcattgctggggtcagaagagaggaaagtggaggtcacctactatcacaaaaatgggtccacttttatttgtaacactcacataattccagtgaaaaaccaagagggcgtggctatgatgttcatcattaattttgaatatgtgacggataatgaaaacgctgccaccccagagagggtaaacccaatattaccaatcaaaactgtaaaccggaaattttttgggttcaaattccctggtctgagagttctcacttacagaaagcagtccttaccacaagaagaccccgatgtggtggtcatcgattcatctaaacacagtgatgattcagtagccatgaagcattttaagtctcctacaaaagaaagctgcagcccctctgaagcagatgacacaaaagctttgatacagcccagcaaatgttctcccttggtgaatatatccggacctcttgaccattcctctcccaaaaggcaatgggaccgactctaccctgacatgctgcagtcaagttcccagctgtcccattccagatcaagggaaagcttatgtagtatacggagagcatcttcggtccatgatatagaaggattcggcgtccaccccaagaacatatttagagaccgacatgccagcgaagacaatggtcgcaatgtcaaagggccttttaatcatatcaagtcaagcctcctgggatccacatcagattcaaacctcaacaaatacagcaccattaacaagattccacagctcactctgaatttttcagaggtcaaaactgagaaaaagaattcatcacctccttcttcagataaaaccattattgcacccaaggttaaagatcgaacacacaatgtgactgagaaagtgacccaggttctctctttaggagcagatgtcctacctgaatacaaactgcagacaccacgcatcaacaagtttacgatattgcactacagccctttcaaggcagtctgggactggcttatcctgctgttggtcatatacactgctatatttactccctactctgcagccttcctcctcaatgacagagaagaacagaaaagacgagaatgtggctattcttgtagccctttgaatgtggtagacttgattgtggatattatgtttatcatagatattttaataaacttcagaacaacatatgtaaatcagaatgaagaagtggtaagtgatcccgccaaaatagcaatacactacttcaaaggctggttcctgattgacatggttgcagcaattccttttgacttgctgatttttggatcaggttctgatgagacaacaacattaattggtcttttgaagactgcccgactcctccgtcttgtgcgcgtggccaggaaactggatcgatattcagaatatggcgctgctgttctaatgctcttaatgtgcatctttgccctgattgctcactggctggcttgcatttggtatgcgattgggaatgtagaaaggccttacctgactgacaaaatcggatggttggattccttaggacagcaaattgggaaacgttacaatgacagtgactcaagttctggaccatccattaaagacaaatacgtcacagcactttattttaccttcagcagtttaaccagtgtaggattcgggaatgtgtctcctaacacgaattcggagaaaatcttttcaatttgtgtcatgttgattggctcactaatgtatgcaagcatttttgggaatgtatctgcaattatccaaagactatactcgggaactgccaggtaccacatgcagatgctgcgagtaaaagagttcattcgctttcaccaaatccccaaccctctgaggcaacgtcttgaagaatatttccagcacgcatggacttacaccaatggcattgacatgaacatggtcctaaagggtttcccagaatgcttacaagcagacatttgtctacatctcaaccagacattgctgcaaaactgcaaagcctttcggggggcaagtaaaggttgccttagagctttggcaatgaagttcaaaaccacccatgcacctccaggagacaccctcgttcactgtggggatgtcctcactgcactttatttcttatccagaggctccattgaaattctcaaagatgacattgtggtggctattctgggaaaaaatgatatatttggagaaatggttcatctttatgccaaacctggaaagtctaatgcagatgtaagagccctcacatactgtgacttgcataagattcagcgagaagacttgttagaggttttggatatgtatcctgagttttctgatcactttctaacaaacctagagttgactttcaacctaaggcatgagagcgcaaaggctgatctcctacgatcacaatccatgaatgattcagaaggagacaactgtaaactaagaagaaggaaattgtcatttgaaagtgaaggagagaaagaaaacagtacaaatgatcctgaagactctgcagataccataagacattatcagagttccaagagacactttgaagagaaaaaaagcagatcctcatctttcatctcctccattgatgatgaacaaaagccgctcttctcaggaatagtagactcttctccaggaatagggaaagcatctgggctcgattttgaagaaacagtgcccacctcaggaagaatgcacatagataaaagaagtcactcttgcaaagatatcactgacatgcgaagctgggaacgagaaaatgcacatccccagcctgaagactccagtccatctgcacttcagcgagctgcctggggtatctctgaaaccgaaagcgacctcacctacggggaagtggaacaaagattagatctgctccaggagcaacttaacaggcttgaatcccaaatgaccactgacatccagaccatcttacagttgctgcagaaacaaaccactgtggtccccccagcctacagtatggtaacagcaggatcagaatatcagagacccatcatccagctgatgagaaccagtcaaccggaagcatccatcaaaactgaccgaagtttcagcccttcctcacaatgtcctgaatttctagaccttgaaaaatctaaacttaaatccaaagaatccctttcaagtggggtgcatctgaacacagcttcagaagacaacttgacttcacttttaaaacaagacagtgatctctctttagagcttcacctgcggcaaagaaaaacttacgttcatccaattaggcatccttctttgccagattcatccctaagcactgtaggaatcgtgggtcttcataggcatgtttctgatcctggtcttccagggaaataatcattttgtactatttactccacatacaatgtaagtgcttttaatggctgttttcctttttctatttaaatcctctctacttgactcaggggctcacaaggtaccattatatgcaaaagtactgtatattttcctaaattgaagcttgtaaggtaaaactgagcagttaggatgtaaatatacataagaacttttggttccaaatgttaaaactgccagcatctcacggcaccttattttttatttttattttttaaatcacatgcatgttaggaaactccaatttctcttgcatggagactcctatttactgcttttactaaaccagtacttcgttatgaaaatgccttccacgcaaataagaaaccaagggataaaactgttcatggatgcaactcaaattcagatgatcctcaactcat

SEQ ID NO: 257 - protein, 1196 aa, Homo sapiens
MPVRRGHVAPQNTFLGTIIRKFEGQNKKFIIANARVQNCAIIYCNDGFCEMTGFSRPDVMQKPCTCDFLHGPETKRHDIAQIAQALLGSEERKVEVTYYHKNGSTFICNTHIIPVKNQEGVAMMFIINFEYVTDNENAATPERVNPILPIKTVNRKFFGFKFPGLRVLTYRKQSLPQEDPDVVVIDSSKHSDDSVAMKHFKSPTKESCSPSEADDTKALIQPSKCSPLVNISGPLDHSSPKRQWDRLYPDMLQSSSQLSHSRSRESLCSIRRASSVHDIEGFGVHPKNIFRDRHASEDNGRNVKGPFNHIKSSLLGSTSDSNLNKYSTINKIPQLTLNFSEVKTEKKNSSPPSSDKTIIAPKVKDRTHNVTEKVTQVLSLGADVLPEYKLQTPRINKFTILHYSPFKAVWDWLILLLVIYTAIFTPYSAAFLLNDREEQKRRECGYSCSPLNVVDLIVDIMFIIDILINFRTTYVNQNEEVVSDPAKIAIHYFKGWFLIDMVAAIPFDLLIFGSGSDETTTLIGLLKTARLLRLVRVARKLDRYSEYGAAVLMLLMCIFALIAHWLACIWYAIGNVERPYLTDKIGWLDSLGQQIGKRYNDSDSSSGPSIKDKYVTALYFTFSSLTSVGFGNVSPNTNSEKIFSICVMLIGSLMYASIFGNVSAIIQRLYSGTARYHMQMLRVKEFIRFHQIPNPLRQRLEEYFQHAWTYTNGIDMNMVLKGFPECLQADICLHLNQTLLQNCKAFRGASKGCLRALAMKFKTTHAPPGDTLVHCGDVLTALYFLSRGSIEILKDDIVVAILGKNDIFGEMVHLYAKPGKSNADVRALTYCDLHKIQREDLLEVLDMYPEFSDHFLTNLELTFNLRHESAKADLLRSQSMNDSEGDNCKLRRRKLSFESEGEKENSTNDPEDSADTIRHYQSSKRHFEEKKSRSSSFISSIDDEQKPLFSGIVDSSPGIGKASGLDFEETVPTSGRMHIDKRSHSCKDITDMRSWERENAHPQPEDSSPSALQRAAWGISETESDLTYGEVEQRLDLLQEQLNRLESQMTTDIQTILQLLQKQTTVVPPAYSMVTAGSEYQRPIIQLMRTSQPEASIKTDRSFSPSSQCPEFLDLEKSKLKSKESLSSGVHLNTASEDNLTSLLKQDSDLSLELHLRQRKTYVHPIRHPSLPDSSLSTVGIVGLHRHVSDPGLPGK

SEQ ID NO: 258 - DNA, 2488 bp, Homo sapiens
ggccccctccggaaggtgaggggaatggattggactccggtggggaaagcgggtgtctagaagtggtgctaatgggaagagaattctggtttcaaaagaggatgctctgccacaaagagcggctcgcgcgctggcctgggctctagccgaggagagatcccgggagaactccagagctccgggggagcgctcctcggaagaccggggccaacatgcctgtgcgcagggggcatgtggcaccacaaaatacatttctggggaccatcattcggaaatttgaagggcaaaataaaaaatttatcattgcaaatgccagagtgcagaactgtgccatcatttattgcaacgatgggttctgtgagatgactggtttctccaggccagatgtcatgcaaaagccatgcacctgcgactttctccatggacccgagaccaagaggcatgatattgcccaaattgcccaggcattgctggggtcagaagagaggaaagtggaggtcacctactatcacaaaaatgggtccacttttatttgtaacactcacataattccagtgaaaaaccaagagggcgtggctatgatgttcatcattaattttgaatatgtgacggataatgaaaacgctgccaccccagagagggtaaacccaatattaccaatcaaaactgtaaaccggaaattttttgggttcaaattccctggtctgagagttctcacttacagaaagcagtccttaccacaagaagaccccgatgtggtggtcatcgattcatctaaacacagtgatgattcagtagccatgaagcattttaagtctcctacaaaagaaagctgcagcccctctgaagcagatgacacaaaagctttgatacagcccagcaaatgttctcccttggtgaatatatccggacctcttgaccattcctctcccaaaaggcaatgggaccgactctaccctgacatgctgcagtcaagttcccagctgtcccattccagatcaagggaaagcttatgtagtatacggagagcatcttcggtccatgatatagaaggattcggcgtccaccccaagaacatatttagagaccgacatgccagcgaagggccttttaatcatatcaagtcaagcctcctgggatccacatcagattcaaacctcaacaaatacagcaccattaacaagattccacagctcactctgaatttttcagaggtcaaaactgagaaaaagaattcatcacctccttcttcagataaaaccattattgcacccaaggttaaagatcgaacacacaatgtgactgagaaagtgacccaggttctctctttaggagcagatgtcctacctgaatacaaactgcagacaccacgcatcaacaagtttacgatattgcactacagccctttcaaggcagtctgggactggcttatcctgctgttggtcatatacactgctatatttactccctactctgcagccttcctcctcaatgacagagaagaacagaaaagacgagaatgtggctattcttgtagccctttgaatgtggtagacttgattgtggatattatgtttatcatagatattttaataaacttcagaacaacatatgtaaatcagaatgaagaagtggtaagtgatcccgccaaaatagcaatacactacttcaaaggctggttcctgattgacatggttgcagcaattccttttgacttgctgatttttggatcaggttctgatgagacaacaacattaattggtcttttgaagactgcccgactcctccgtcttgtgcgcgtggccaggaaactggatcgatattcagaatatggcgctgctgttctaatgctcttaatgtgcatctttgccctgattgctcactggctggcttgcatttggtatgcgattgggaatgtagaaaggccttacctgactgacaaaatcggatggttggattccttaggacagcaaattgggaaacgttacaatgacagtgactcaagttctggaccatccattaaagacaaatacgtcacagcactttattttaccttcagcagtttaaccagtgtaggattcgggaatgtgtctcctaacacgaattcggagaaaatcttttcaatttgtgtcatgttgattggctcactaatgtatgcaagcatttttgggaatgtatctgcaattatccaaagactatactcgggaactgccaggtaccacatgcagatgctgcgagtaaaagagttcattcgctttcaccaaatccccaaccctctgaggcaacgtcttgaagaatatttccagcacgcatggacttacaccaatggcattgacatgaacatggtatgtatgtctgttttccaaaatgaaagtgccgcaggcattatagtgatagccaaaatggaataaaagccggaatcaccagctttgaaaaaaaaaaaaaaaaaaaaaaaaaaaaaaaaaaaaaaaaaaaaaaaaaaaaaaaa

SEQ ID NO: 259 - protein, 732 aa, Homo sapiens
MPVRRGHVAPQNTFLGTIIRKFEGQNKKFIIANARVQNCAIIYCNDGFCEMTGFSRPDVMQKPCTCDFLHGPETKRHDIAQIAQALLGSEERKVEVTYYHKNGSTFICNTHIIPVKNQEGVAMMFIINFEYVTDNENAATPERVNPILPIKTVNRKFFGFKFPGLRVLTYRKQSLPQEDPDVVVIDSSKHSDDSVAMKHFKSPTKESCSPSEADDTKALIQPSKCSPLVNISGPLDHSSPKRQWDRLYPDMLQSSSQLSHSRSRESLCSIRRASSVHDIEGFGVHPKNIFRDRHASEGPFNHIKSSLLGSTSDSNLNKYSTINKIPQLTLNFSEVKTEKKNSSPPSSDKTIIAPKVKDRTHNVTEKVTQVLSLGADVLPEYKLQTPRINKFTILHYSPFKAVWDWLILLLVIYTAIFTPYSAAFLLNDREEQKRRECGYSCSPLNVVDLIVDIMFIIDILINFRTTYVNQNEEVVSDPAKIAIHYFKGWFLIDMVAAIPFDLLIFGSGSDETTTLIGLLKTARLLRLVRVARKLDRYSEYGAAVLMLLMCIFALIAHWLACIWYAIGNVERPYLTDKIGWLDSLGQQIGKRYNDSDSSSGPSIKDKYVTALYFTFSSLTSVGFGNVSPNTNSEKIFSICVMLIGSLMYASIFGNVSAIIQRLYSGTARYHMQMLRVKEFIRFHQIPNPLRQRLEEYFQHAWTYTNGIDMNMVCMSVFQNESAAGIIVIAKME

SEQ ID NO: 260 - DNA, 8810 bp, Homo sapiens
atgctgttttctaacagacattgggtaccatcgaatgactgtcagaacagaaagctaaggcaaaggagggaggatgctgtggtcatcctttcttgtttttttcttctttaatgaggatagagcacatgtgagattttactttctactccagtaaaaattctgaagaattgcattggagactgttatattcaacacatacgtggattctgtgttatgatttacatttttctttatttcagcactttcttatgcaaggagctaaacagtgattaaaggagcaggatgaaaagatggcacagtcagtgctggtaccgccaggacctgacagcttccgcttctttaccagggaatcccttgctgctattgaacaacgcattgcagaagagaaagctaagagacccaaacaggaacgcaaggatgaggatgatgaaaatggcccaaagccaaacagtgacttggaagcaggaaaatctcttccatttatttatggagacattcctccagagatggtgtcagtgcccctggaggatctggacccctactatatcaataagaaaacgtttatagtattgaataaagggaaagcaatctctcgattcagtgccacccctgccctttacattttaactcccttcaaccctattagaaaattagctattaagattttggtacattctttattcaatatgctcattatgtgcacgattcttaccaactgtgtatttatgaccatgagtaaccctccagactggacaaagaatgtggagtatacctttacaggaatttatacttttgaatcacttattaaaatacttgcaaggggcttttgtttagaagatttcacatttttacgggatccatggaattggttggatttcacagtcattacttttgcatatgtgacagagtttgtggacctgggcaatgtctcagcgttgagaacattcagagttctccgagcattgaaaacaatttcagtcattccaggcctgaagaccattgtgggggccctgatccagtcagtgaagaagctttctgatgtcatgatcttgactgtgttctgtctaagcgtgtttgcgctaataggattgcagttgttcatgggcaacctacgaaataaatgtttgcaatggcctccagataattcttcctttgaaataaatatcacttccttctttaacaattcattggatgggaatggtactactttcaataggacagtgagcatatttaactgggatgaatatattgaggataaaagtcacttttattttttagaggggcaaaatgatgctctgctttgtggcaacagctcagatgcaggccagtgtcctgaaggatacatctgtgtgaaggctggtagaaaccccaactatggctacacgagctttgacacctttagttgggcctttttgtccttatttcgtctcatgactcaagacttctgggaaaacctttatcaactgacactacgtgctgctgggaaaacgtacatgatattttttgtgctggtcattttcttgggctcattctatctaataaatttgatcttggctgtggtggccatggcctatgaggaacagaatcaggccacattggaagaggctgaacagaaggaagctgaatttcagcagatgctcgaacagttgaaaaagcaacaagaagaagctcaggcggcagctgcagccgcatctgctgaatcaagagacttcagtggtgctggtgggataggagttttttcagagagttcttcagtagcatctaagttgagctccaaaagtgaaaaagagctgaaaaacagaagaaagaaaaagaaacagaaagaacagtctggagaagaagagaaaaatgacagagtccgaaaatcggaatctgaagacagcataagaagaaaaggtttccgtttttccttggaaggaagtaggctgacatatgaaaagagattttcttctccacaccagtccttactgagcatccgtggctcccttttctctccaagacgcaacagtagggcgagccttttcagcttcagaggtcgagcaaaggacattggctctgagaatgactttgctgatgatgagcacagcacctttgaggacaatgacagccgaagagactctctgttcgtgccgcacagacatggagaacggcgccacagcaatgtcagccaggccagccgtgcctccagggtgctccccatcctgcccatgaatgggaagatgcatagcgctgtggactgcaatggtgtggtctccctggtcgggggcccttctaccctcacatctgctgggcagctcctaccagagggcacaactactgaaacagaaataagaaagagacggtccagttcttatcatgtttccatggatttattggaagatcctacatcaaggcaaagagcaatgagtatagccagtattttgaccaacaccatggaagaacttgaagaatccagacagaaatgcccaccatgctggtataaatttgctaatatgtgtttgatttgggactgttgtaaaccatggttaaaggtgaaacaccttgtcaacctggttgtaatggacccatttgttgacctggccatcaccatctgcattgtcttaaatacactcttcatggctatggagcactatcccatgacggagcagttcagcagtgtactgtctgttggaaacctggtcttcacagggatcttcacagcagaaatgtttctcaagataattgccatggatccatattattactttcaagaaggctggaatatttttgatggttttattgtgagccttagtttaatggaacttggtttggcaaatgtggaaggattgtcagttctccgatcattccggctgctccgagttttcaagttggcaaaatcttggccaactctaaatatgctaattaagatcattggcaattctgtgggggctctaggaaacctcaccttggtattggccatcatcgtcttcatttttgctgtggtcggcatgcagctctttggtaagagctacaaagaatgtgtctgcaagatttccaatgattgtgaactcccacgctggcacatgcatgactttttccactccttcctgatcgtgttccgcgtgctgtgtggagagtggatagagaccatgtgggactgtatggaggtcgctggccaaaccatgtgccttactgtcttcatgatggtcatggtgattggaaatctagtggttctgaacctcttcttggccttgcttttgagttccttcagttctgacaatcttgctgccactgatgatgataacgaaatgaataatctccagattgctgtgggaaggatgcagaaaggaatcgattttgttaaaagaaaaatacgtgaatttattcagaaagcctttgttaggaagcagaaagctttagatgaaattaaaccgcttgaagatctaaataataaaaaagacagctgtatttccaaccataccaccatagaaataggcaaagacctcaattatctcaaagacggaaatggaactactagtggcataggcagcagtgtagaaaaatatgtcgtggatgaaagtgattacatgtcatttataaacaaccctagcctcactgtgacagtaccaattgctgttggagaatctgactttgaaaatttaaatactgaagaattcagcagcgagtcagatatggaggaaagcaaagagaagctaaatgcaactagttcatctgaaggcagcacggttgatattggagctcccgccgagggagaacagcctgaggttgaacctgaggaatcccttgaacctgaagcctgttttacagaagactgtgtacggaagttcaagtgttgtcagataagcatagaagaaggcaaagggaaactctggtggaatttgaggaaaacatgctataagatagtggagcacaattggttcgaaaccttcattgtcttcatgattctgctgagcagtggggctctggcctttgaagatatatacattgagcagcgaaaaaccattaagaccatgttagaatatgctgacaaggttttcacttacatattcattctggaaatgctgctaaagtgggttgcatatggttttcaagtgtattttaccaatgcctggtgctggctagacttcctgattgttgatgtctcactggttagcttaactgcaaatgccttgggttactcagaacttggtgccatcaaatccctcagaacactaagagctctgaggccactgagagctttgtcccggtttgaaggaatgagggttgttgtaaatgctcttttaggagccattccatctatcatgaatgtacttctggtttgtctgatcttttggctaatattcagtatcatgggagtgaatctctttgctggcaagttttaccattgtattaattacaccactggagagatgtttgatgtaagcgtggtcaacaactacagtgagtgcaaagctctcattgagagcaatcaaactgccaggtggaaaaatgtgaaagtaaactttgataacgtaggacttggatatctgtctctacttcaagtagccacgtttaagggatggatggatattatgtatgcagctgttgattcacgaaatgtagaattacaacccaagtatgaagacaacctgtacatgtatctttattttgtcatctttattatttttggttcattctttaccttgaatcttttcattggtgtcatcatagataacttcaaccaacagaaaaagaagtttggaggtcaagacatttttatgacagaagaacagaagaaatactacaatgcaatgaaaaaactgggttcaaagaaaccacaaaaacccatacctcgacctgctaacaaattccaaggaatggtctttgattttgtaaccaaacaagtctttgatatcagcatcatgatcctcatctgccttaacatggtcaccatgatggtggaaaccgatgaccagagtcaagaaatgacaaacattctgtactggattaatctggtgtttattgttctgttcactggagaatgtgtgctgaaactgatctctcttcgttactactatttcactattggatggaatatttttgattttgtggtggtcattctctccattgtaggaatgtttctggctgaactgatagaaaagtattttgtgtcccctaccctgttccgagtgatccgtcttgccaggattggccgaatcctacgtctgatcaaaggagcaaaggggatccgcacgctgctctttgctttgatgatgtcccttcctgcgttgtttaacatcggcctccttcttttcctggtcatgttcatctacgccatctttgggatgtccaattttgcctatgttaagagggaagttgggatcgatgacatgttcaactttgagacctttggcaacagcatgatctgcctgttccaaattacaacctctgctggctgggatggattgctagcacctattcttaatagtggacctccagactgtgaccctgacaaagatcaccctggaagctcagttaaaggagactgtgggaacccatctgttgggattttcttttttgtcagttacatcatcatatccttcctggttgtggtgaacatgtacatcgcggtcatcctggagaacttcagtgttgctactgaagaaagtgcagagcctctgagtgaggatgactttgagatgttctatgaggtttgggagaagtttgatcccgatgcgacccagtttatagagtttgccaaactttctgattttgcagatgccctggatcctcctcttctcatagcaaaacccaacaaagtccagctcattgccatggatctgcccatggtgagtggtgaccggatccactgtcttgacatcttatttgcttttacaaagcgtgttttgggtgagagtggagagatggatgcccttcgaatacagatggaagagcgattcatggcatcaaacccctccaaagtctcttatgagcccattacgaccacgttgaaacgcaaacaagaggaggtgtctgctattattatccagagggcttacagacgctacctcttgaagcaaaaagttaaaaaggtatcaagtatatacaagaaagacaaaggcaaagaatgtgatggaacacccatcaaagaagatactctcattgataaactgaatgagaattcaactccagagaaaaccgatatgacgccttccaccacgtctccaccctcgtatgatagtgtgaccaaaccagaaaaagaaaaatttgaaaaagacaaatcagaaaaggaagacaaagggaaagatatcagggaaagtaaaaagtaaaaagaaaccaagaattttccattttgtgatcaattgtttacagcccgtgatggtgatgtgtttgtgtcaacaggactcccacaggaggtctatgccaaactgactgtttttacaaatgtatacttaaggtcagtgcctataacaagacagagacctctggtcagcaaactggaactcagtaaactggagaaatagtatcgatgggaggtttctattttcacaaccagctgacactgctgaagagcagaggcgtaatggctactcagacgataggaaccaatttaaaggggggagggaagttaaatttttatgtaaattcaacatgtgacacttgataatagtaattgtcaccagtgtttatgttttaactgccacacctgccatatttttacaaaacgtgtgctgtgaatttatcacttttctttttaattcacaggttgtttactattatatgtgactatttttgtaaatgggtttgtgtttggggagagggattaaagggagggaattctacatttctctattgtattgtataactggatatattttaaatggaggcatgctgcaattctcattcacacataaaaaaatcacatcacaaaagggaagagtttacttcttgtttcaggatgtttttagatttttgaggtgcttaaatagctattcgtatttttaaggtgtctcatccagaaaaaatttaatgtgcctgtaaatgttccatagaatcacaagcattaaagagttgttttatttttacataacccattaaatgtacatgtatatatgtatatatgtatatgtgcgtgtatatacatatatatgtatacacacatgcacacacagagatatacacataccattacattgtcattcacagtcccagcagcatgactatcacatttttgataagtgtcctttggcataaaataaaaatatcctatcagtcctttctaagaagcctgaattgaccaaaaaacatccccaccaccactttataaagttgattctgctttatcctgcagtattgtttagccatcttctgctcttggtaaggttgacatagtatatgtcaatttaaaaaataaaagtctgctttgtaaatagtaattttacccagtggtgcatgtttgagcaaacaaaaatgatgatttaagcacactacttattgcatcaaatatgtaccacagtaagtatagtttgcaagctttcaacaggtaatatgatgtaattggttccattatagtttgaagctgtcactgctgcatgtttatcttgcctatgctgctgtatcttattccttccactgttcagaagtctaatatgggaagccatatatcagtggtaaagtgaagcaaattgttctaccaagacctcattcttcatgtcattaagcaataggttgcagcaaacaaggaagagcttcttgctttttattcttccaaccttaattgaacactcaatgatgaaaagcccgactgtacaaacatgttgcaagctgcttaaatctgtttaaaatatatggttagagttttctaagaaaatataaatactgtaaaaagttcattttattttatttttcagccttttgtacgtaaaatgagaaattaaaagtatcttcaggtggatgtcacagtcactattgttagtttctgttcctagcacttttaaattgaagcacttcacaaaataagaagcaaggactaggatgcagtgtaggtttctgcttttttattagtactgtaaacttgcacacatttcaatgtgaaacaaatctcaaactgagttcaatgtttatttgctttcaatagtaatgccttatcattgaaagaggcttaaagaaaaaaaaaatcagctgatactcttggcattgcttgaatccaatgtttccacctagtctttttattcagtaatcatcagtcttttccaatgtttgtttacacagatagatcttattgacccatatggcactagaactgtatcagatataatatgggatcccagctttttttcctctcccacaaaaccaggtagtgaagttatattaccagttacagcaaaatactttgtgtttcacaagcaacaataaatgtagattctttatactgaagctattgacttgtagtgtgttggtgaaatgcatgcaggaaaatgctgttaccataaagaacggtaaaccacattacaatcaagccaaaagaataaaggtttcgcttttgtttttgtatttaattgttgtctttgtttctatctttgaaatgccatttaaaggtagatttctatcatgtaaaaataatctatctgaaaaacaaatgtaaagaacacacattaattactataattcatctttcaattttttcatggaatggaagttaattaagaagagtgtattggataactactttaatattggccaaaaagctagatatggcatcaggtagactagtggaaagttacaaaaattaataaaaaattgactaacattttaaaaaaaaaaaaaaaaaa

SEQ ID NO: 261 - protein, 2005 aa, Homo sapiens
MAQSVLVPPGPDSFRFFTRESLAAIEQRIAEEKAKRPKQERKDEDDENGPKPNSDLEAGKSLPFIYGDIPPEMVSVPLEDLDPYYINKKTFIVLNKGKAISRFSATPALYILTPFNPIRKLAIKILVHSLFNMLIMCTILTNCVFMTMSNPPDWTKNVEYTFTGIYTFESLIKILARGFCLEDFTFLRDPWNWLDFTVITFAYVTEFVDLGNVSALRTFRVLRALKTISVIPGLKTIVGALIQSVKKLSDVMILTVFCLSVFALIGLQLFMGNLRNKCLQWPPDNSSFEINITSFFNNSLDGNGTTFNRTVSIFNWDEYIEDKSHFYFLEGQNDALLCGNSSDAGQCPEGYICVKAGRNPNYGYTSFDTFSWAFLSLFRLMTQDFWENLYQLTLRAAGKTYMIFFVLVIFLGSFYLINLILAVVAMAYEEQNQATLEEAEQKEAEFQQMLEQLKKQQEEAQAAAAAASAESRDFSGAGGIGVFSESSSVASKLSSKSEKELKNRRKKKKQKEQSGEEEKNDRVRKSESEDSIRRKGFRFSLEGSRLTYEKRFSSPHQSLLSIRGSLFSPRRNSRASLFSFRGRAKDIGSENDFADDEHSTFEDNDSRRDSLFVPHRHGERRHSNVSQASRASRVLPILPMNGKMHSAVDCNGVVSLVGGPSTLTSAGQLLPEGTTTETEIRKRRSSSYHVSMDLLEDPTSRQRAMSIASILTNTMEELEESRQKCPPCWYKFANMCLIWDCCKPWLKVKHLVNLVVMDPFVDLAITICIVLNTLFMAMEHYPMTEQFSSVLSVGNLVFTGIFTAEMFLKIIAMDPYYYFQEGWNIFDGFIVSLSLMELGLANVEGLSVLRSFRLLRVFKLAKSWPTLNMLIKIIGNSVGALGNLTLVLAIIVFIFAVVGMQLFGKSYKECVCKISNDCELPRWHMHDFFHSFLIVFRVLCGEWIETMWDCMEVAGQTMCLTVFMMVMVIGNLVVLNLFLALLLSSFSSDNLAATDDDNEMNNLQIAVGRMQKGIDFVKRKIREFIQKAFVRKQKALDEIKPLEDLNNKKDSCISNHTTIEIGKDLNYLKDGNGTTSGIGSSVEKYVVDESDYMSFINNPSLTVTVPIAVGESDFENLNTEEFSSESDMEESKEKLNATSSSEGSTVDIGAPAEGEQPEVEPEESLEPEACFTEDCVRKFKCCQISIEEGKGKLWWNLRKTCYKIVEHNWFETFIVFMILLSSGALAFEDIYIEQRKTIKTMLEYADKVFTYIFILEMLLKWVAYGFQVYFTNAWCWLDFLIVDVSLVSLTANALGYSELGAIKSLRTLRALRPLRALSRFEGMRVVVNALLGAIPSIMNVLLVCLIFWLIFSIMGVNLFAGKFYHCINYTTGEMFDVSVVNNYSECKALIESNQTARWKNVKVNFDNVGLGYLSLLQVATFKGWMDIMYAAVDSRNVELQPKYEDNLYMYLYFVIFIIFGSFFTLNLFIGVIIDNFNQQKKKFGGQDIFMTEEQKKYYNAMKKLGSKKPQKPIPRPANKFQGMVFDFVTKQVFDISIMILICLNMVTMMVETDDQSQEMTNILYWINLVFIVLFTGECVLKLISLRYYYFTIGWNIFDFVVVILSIVGMFLAELIEKYFVSPTLFRVIRLARIGRILRLIKGAKGIRTLLFALMMSLPALFNIGLLLFLVMFIYAIFGMSNFAYVKREVGIDDMFNFETFGNSMICLFQITTSAGWDGLLAPILNSGPPDCDPDKDHPGSSVKGDCGNPSVGIFFFVSYIIISFLVVVNMYIAVILENFSVATEESAEPLSEDDFEMFYEVWEKFDPDATQFIEFAKLSDFADALDPPLLIAKPNKVQLIAMDLPMVSGDRIHCLDILFAFTKRVLGESGEMDALRIQMEERFMASNPSKVSYEPITTTLKRKQEEVSAIIIQRAYRRYLLKQKVKKVSSIYKKDKGKECDGTPIKEDTLIDKLNENSTPEKTDMTPSTTSPPSYDSVTKPEKEKFEKDKSEKEDKGKDIRESKK

SEQ ID NO: 262 - DNA, 8571 bp, Homo sapiens
cactttcttatgcaaggagctaaacagtgattaaaggagcaggatgaaaagatggcacagtcagtgctggtaccgccaggacctgacagcttccgcttctttaccagggaatcccttgctgctattgaacaacgcattgcagaagagaaagctaagagacccaaacaggaacgcaaggatgaggatgatgaaaatggcccaaagccaaacagtgacttggaagcaggaaaatctcttccatttatttatggagacattcctccagagatggtgtcagtgcccctggaggatctggacccctactatatcaataagaaaacgtttatagtattgaataaagggaaagcaatctctcgattcagtgccacccctgccctttacattttaactcccttcaaccctattagaaaattagctattaagattttggtacattctttattcaatatgctcattatgtgcacgattcttaccaactgtgtatttatgaccatgagtaaccctccagactggacaaagaatgtggagtatacctttacaggaatttatacttttgaatcacttattaaaatacttgcaaggggcttttgtttagaagatttcacatttttacgggatccatggaattggttggatttcacagtcattacttttgcgtatgtaacagaatttgtaaacctaggcaatgtttcagctcttcgaactttcagagtcttgagagctttgaaaactatttctgtaattccaggcctgaagaccattgtgggggccctgatccagtcagtgaagaagctttctgatgtcatgatcttgactgtgttctgtctaagcgtgtttgcgctaataggattgcagttgttcatgggcaacctacgaaataaatgtttgcaatggcctccagataattcttcctttgaaataaatatcacttccttctttaacaattcattggatgggaatggtactactttcaataggacagtgagcatatttaactgggatgaatatattgaggataaaagtcacttttattttttagaggggcaaaatgatgctctgctttgtggcaacagctcagatgcaggccagtgtcctgaaggatacatctgtgtgaaggctggtagaaaccccaactatggctacacgagctttgacacctttagttgggcctttttgtccttatttcgtctcatgactcaagacttctgggaaaacctttatcaactgacactacgtgctgctgggaaaacgtacatgatattttttgtgctggtcattttcttgggctcattctatctaataaatttgatcttggctgtggtggccatggcctatgaggaacagaatcaggccacattggaagaggctgaacagaaggaagctgaatttcagcagatgctcgaacagttgaaaaagcaacaagaagaagctcaggcggcagctgcagccgcatctgctgaatcaagagacttcagtggtgctggtgggataggagttttttcagagagttcttcagtagcatctaagttgagctccaaaagtgaaaaagagctgaaaaacagaagaaagaaaaagaaacagaaagaacagtctggagaagaagagaaaaatgacagagtccgaaaatcggaatctgaagacagcataagaagaaaaggtttccgtttttccttggaaggaagtaggctgacatatgaaaagagattttcttctccacaccagtccttactgagcatccgtggctcccttttctctccaagacgcaacagtagggcgagccttttcagcttcagaggtcgagcaaaggacattggctctgagaatgactttgctgatgatgagcacagcacctttgaggacaatgacagccgaagagactctctgttcgtgccgcacagacatggagaacggcgccacagcaatgtcagccaggccagccgtgcctccagggtgctccccatcctgcccatgaatgggaagatgcatagcgctgtggactgcaatggtgtggtctccctggtcgggggcccttctaccctcacatctgctgggcagctcctaccagagggcacaactactgaaacagaaataagaaagagacggtccagttcttatcatgtttccatggatttattggaagatcctacatcaaggcaaagagcaatgagtatagccagtattttgaccaacaccatggaagaacttgaagaatccagacagaaatgcccaccatgctggtataaatttgctaatatgtgtttgatttgggactgttgtaaaccatggttaaaggtgaaacaccttgtcaacctggttgtaatggacccatttgttgacctggccatcaccatctgcattgtcttaaatacactcttcatggctatggagcactatcccatgacggagcagttcagcagtgtactgtctgttggaaacctggtcttcacagggatcttcacagcagaaatgtttctcaagataattgccatggatccatattattactttcaagaaggctggaatatttttgatggttttattgtgagccttagtttaatggaacttggtttggcaaatgtggaaggattgtcagttctccgatcattccggctgctccgagttttcaagttggcaaaatcttggccaactctaaatatgctaattaagatcattggcaattctgtgggggctctaggaaacctcaccttggtattggccatcatcgtcttcatttttgctgtggtcggcatgcagctctttggtaagagctacaaagaatgtgtctgcaagatttccaatgattgtgaactcccacgctggcacatgcatgactttttccactccttcctgatcgtgttccgcgtgctgtgtggagagtggatagagaccatgtgggactgtatggaggtcgctggccaaaccatgtgccttactgtcttcatgatggtcatggtgattggaaatctagtggttctgaacctcttcttggccttgcttttgagttccttcagttctgacaatcttgctgccactgatgatgataacgaaatgaataatctccagattgctgtgggaaggatgcagaaaggaatcgattttgttaaaagaaaaatacgtgaatttattcagaaagcctttgttaggaagcagaaagctttagatgaaattaaaccgcttgaagatctaaataataaaaaagacagctgtatttccaaccataccaccatagaaataggcaaagacctcaattatctcaaagacggaaatggaactactagtggcataggcagcagtgtagaaaaatatgtcgtggatgaaagtgattacatgtcatttataaacaaccctagcctcactgtgacagtaccaattgctgttggagaatctgactttgaaaatttaaatactgaagaattcagcagcgagtcagatatggaggaaagcaaagagaagctaaatgcaactagttcatctgaaggcagcacggttgatattggagctcccgccgagggagaacagcctgaggttgaacctgaggaatcccttgaacctgaagcctgttttacagaagactgtgtacggaagttcaagtgttgtcagataagcatagaagaaggcaaagggaaactctggtggaatttgaggaaaacatgctataagatagtggagcacaattggttcgaaaccttcattgtcttcatgattctgctgagcagtggggctctggcctttgaagatatatacattgagcagcgaaaaaccattaagaccatgttagaatatgctgacaaggttttcacttacatattcattctggaaatgctgctaaagtgggttgcatatggttttcaagtgtattttaccaatgcctggtgctggctagacttcctgattgttgatgtctcactggttagcttaactgcaaatgccttgggttactcagaacttggtgccatcaaatccctcagaacactaagagctctgaggccactgagagctttgtcccggtttgaaggaatgagggttgttgtaaatgctcttttaggagccattccatctatcatgaatgtacttctggtttgtctgatcttttggctaatattcagtatcatgggagtgaatctctttgctggcaagttttaccattgtattaattacaccactggagagatgtttgatgtaagcgtggtcaacaactacagtgagtgcaaagctctcattgagagcaatcaaactgccaggtggaaaaatgtgaaagtaaactttgataacgtaggacttggatatctgtctctacttcaagtagccacgtttaagggatggatggatattatgtatgcagctgttgattcacgaaatgtagaattacaacccaagtatgaagacaacctgtacatgtatctttattttgtcatctttattatttttggttcattctttaccttgaatcttttcattggtgtcatcatagataacttcaaccaacagaaaaagaagtttggaggtcaagacatttttatgacagaagaacagaagaaatactacaatgcaatgaaaaaactgggttcaaagaaaccacaaaaacccatacctcgacctgctaacaaattccaaggaatggtctttgattttgtaaccaaacaagtctttgatatcagcatcatgatcctcatctgccttaacatggtcaccatgatggtggaaaccgatgaccagagtcaagaaatgacaaacattctgtactggattaatctggtgtttattgttctgttcactggagaatgtgtgctgaaactgatctctcttcgttactactatttcactattggatggaatatttttgattttgtggtggtcattctctccattgtaggaatgtttctggctgaactgatagaaaagtattttgtgtcccctaccctgttccgagtgatccgtcttgccaggattggccgaatcctacgtctgatcaaaggagcaaaggggatccgcacgctgctctttgctttgatgatgtcccttcctgcgttgtttaacatcggcctccttcttttcctggtcatgttcatctacgccatctttgggatgtccaattttgcctatgttaagagggaagttgggatcgatgacatgttcaactttgagacctttggcaacagcatgatctgcctgttccaaattacaacctctgctggctgggatggattgctagcacctattcttaatagtggacctccagactgtgaccctgacaaagatcaccctggaagctcagttaaaggagactgtgggaacccatctgttgggattttcttttttgtcagttacatcatcatatccttcctggttgtggtgaacatgtacatcgcggtcatcctggagaacttcagtgttgctactgaagaaagtgcagagcctctgagtgaggatgactttgagatgttctatgaggtttgggagaagtttgatcccgatgcgacccagtttatagagtttgccaaactttctgattttgcagatgccctggatcctcctcttctcatagcaaaacccaacaaagtccagctcattgccatggatctgcccatggtgagtggtgaccggatccactgtcttgacatcttatttgcttttacaaagcgtgttttgggtgagagtggagagatggatgcccttcgaatacagatggaagagcgattcatggcatcaaacccctccaaagtctcttatgagcccattacgaccacgttgaaacgcaaacaagaggaggtgtctgctattattatccagagggcttacagacgctacctcttgaagcaaaaagttaaaaaggtatcaagtatatacaagaaagacaaaggcaaagaatgtgatggaacacccatcaaagaagatactctcattgataaactgaatgagaattcaactccagagaaaaccgatatgacgccttccaccacgtctccaccctcgtatgatagtgtgaccaaaccagaaaaagaaaaatttgaaaaagacaaatcagaaaaggaagacaaagggaaagatatcagggaaagtaaaaagtaaaaagaaaccaagaattttccattttgtgatcaattgtttacagcccgtgatggtgatgtgtttgtgtcaacaggactcccacaggaggtctatgccaaactgactgtttttacaaatgtatacttaaggtcagtgcctataacaagacagagacctctggtcagcaaactggaactcagtaaactggagaaatagtatcgatgggaggtttctattttcacaaccagctgacactgctgaagagcagaggcgtaatggctactcagacgataggaaccaatttaaaggggggagggaagttaaatttttatgtaaattcaacatgtgacacttgataatagtaattgtcaccagtgtttatgttttaactgccacacctgccatatttttacaaaacgtgtgctgtgaatttatcacttttctttttaattcacaggttgtttactattatatgtgactatttttgtaaatgggtttgtgtttggggagagggattaaagggagggaattctacatttctctattgtattgtataactggatatattttaaatggaggcatgctgcaattctcattcacacataaaaaaatcacatcacaaaagggaagagtttacttcttgtttcaggatgtttttagatttttgaggtgcttaaatagctattcgtatttttaaggtgtctcatccagaaaaaatttaatgtgcctgtaaatgttccatagaatcacaagcattaaagagttgttttatttttacataacccattaaatgtacatgtatatatgtatatatgtatatgtgcgtgtatatacatatatatgtatacacacatgcacacacagagatatacacataccattacattgtcattcacagtcccagcagcatgactatcacatttttgataagtgtcctttggcataaaataaaaatatcctatcagtcctttctaagaagcctgaattgaccaaaaaacatccccaccaccactttataaagttgattctgctttatcctgcagtattgtttagccatcttctgctcttggtaaggttgacatagtatatgtcaatttaaaaaataaaagtctgctttgtaaatagtaattttacccagtggtgcatgtttgagcaaacaaaaatgatgatttaagcacactacttattgcatcaaatatgtaccacagtaagtatagtttgcaagctttcaacaggtaatatgatgtaattggttccattatagtttgaagctgtcactgctgcatgtttatcttgcctatgctgctgtatcttattccttccactgttcagaagtctaatatgggaagccatatatcagtggtaaagtgaagcaaattgttctaccaagacctcattcttcatgtcattaagcaataggttgcagcaaacaaggaagagcttcttgctttttattcttccaaccttaattgaacactcaatgatgaaaagcccgactgtacaaacatgttgcaagctgcttaaatctgtttaaaatatatggttagagttttctaagaaaatataaatactgtaaaaagttcattttattttatttttcagccttttgtacgtaaaatgagaaattaaaagtatcttcaggtggatgtcacagtcactattgttagtttctgttcctagcacttttaaattgaagcacttcacaaaataagaagcaaggactaggatgcagtgtaggtttctgcttttttattagtactgtaaacttgcacacatttcaatgtgaaacaaatctcaaactgagttcaatgtttatttgctttcaatagtaatgccttatcattgaaagaggcttaaagaaaaaaaaaatcagctgatactcttggcattgcttgaatccaatgtttccacctagtctttttattcagtaatcatcagtcttttccaatgtttgtttacacagatagatcttattgacccatatggcactagaactgtatcagatataatatgggatcccagctttttttcctctcccacaaaaccaggtagtgaagttatattaccagttacagcaaaatactttgtgtttcacaagcaacaataaatgtagattctttatactgaagctattgacttgtagtgtgttggtgaaatgcatgcaggaaaatgctgttaccataaagaacggtaaaccacattacaatcaagccaaaagaataaaggtttcgcttttgtttttgtatttaattgttgtctttgtttctatctttgaaatgccatttaaaggtagatttctatcatgtaaaaataatctatctgaaaaacaaatgtaaagaacacacattaattactataattcatctttcaattttttcatggaatggaagttaattaagaagagtgtattggataactactttaatattggccaaaaagctagatatggcatcaggtagactagtggaaagttacaaaaattaataaaaaattgactaacattttaaaaaaaaaaaaaaaaaa

SEQ ID NO: 263 - protein, 2005 aa, Homo sapiens
MAQSVLVPPGPDSFRFFTRESLAAIEQRIAEEKAKRPKQERKDEDDENGPKPNSDLEAGKSLPFIYGDIPPEMVSVPLEDLDPYYINKKTFIVLNKGKAISRFSATPALYILTPFNPIRKLAIKILVHSLFNMLIMCTILTNCVFMTMSNPPDWTKNVEYTFTGIYTFESLIKILARGFCLEDFTFLRDPWNWLDFTVITFAYVTEFVNLGNVSALRTFRVLRALKTISVIPGLKTIVGALIQSVKKLSDVMILTVFCLSVFALIGLQLFMGNLRNKCLQWPPDNSSFEINITSFFNNSLDGNGTTFNRTVSIFNWDEYIEDKSHFYFLEGQNDALLCGNSSDAGQCPEGYICVKAGRNPNYGYTSFDTFSWAFLSLFRLMTQDFWENLYQLTLRAAGKTYMIFFVLVIFLGSFYLINLILAVVAMAYEEQNQATLEEAEQKEAEFQQMLEQLKKQQEEAQAAAAAASAESRDFSGAGGIGVFSESSSVASKLSSKSEKELKNRRKKKKQKEQSGEEEKNDRVRKSESEDSIRRKGFRFSLEGSRLTYEKRFSSPHQSLLSIRGSLFSPRRNSRASLFSFRGRAKDIGSENDFADDEHSTFEDNDSRRDSLFVPHRHGERRHSNVSQASRASRVLPILPMNGKMHSAVDCNGVVSLVGGPSTLTSAGQLLPEGTTTETEIRKRRSSSYHVSMDLLEDPTSRQRAMSIASILTNTMEELEESRQKCPPCWYKFANMCLIWDCCKPWLKVKHLVNLVVMDPFVDLAITICIVLNTLFMAMEHYPMTEQFSSVLSVGNLVFTGIFTAEMFLKIIAMDPYYYFQEGWNIFDGFIVSLSLMELGLANVEGLSVLRSFRLLRVFKLAKSWPTLNMLIKIIGNSVGALGNLTLVLAIIVFIFAVVGMQLFGKSYKECVCKISNDCELPRWHMHDFFHSFLIVFRVLCGEWIETMWDCMEVAGQTMCLTVFMMVMVIGNLVVLNLFLALLLSSFSSDNLAATDDDNEMNNLQIAVGRMQKGIDFVKRKIREFIQKAFVRKQKALDEIKPLEDLNNKKDSCISNHTTIEIGKDLNYLKDGNGTTSGIGSSVEKYVVDESDYMSFINNPSLTVTVPIAVGESDFENLNTEEFSSESDMEESKEKLNATSSSEGSTVDIGAPAEGEQPEVEPEESLEPEACFTEDCVRKFKCCQISIEEGKGKLWWNLRKTCYKIVEHNWFETFIVFMILLSSGALAFEDIYIEQRKTIKTMLEYADKVFTYIFILEMLLKWVAYGFQVYFTNAWCWLDFLIVDVSLVSLTANALGYSELGAIKSLRTLRALRPLRALSRFEGMRVVVNALLGAIPSIMNVLLVCLIFWLIFSIMGVNLFAGKFYHCINYTTGEMFDVSVVNNYSECKALIESNQTARWKNVKVNFDNVGLGYLSLLQVATFKGWMDIMYAAVDSRNVELQPKYEDNLYMYLYFVIFIIFGSFFTLNLFIGVIIDNFNQQKKKFGGQDIFMTEEQKKYYNAMKKLGSKKPQKPIPRPANKFQGMVFDFVTKQVFDISIMILICLNMVTMMVETDDQSQEMTNILYWINLVFIVLFTGECVLKLISLRYYYFTIGWNIFDFVVVILSIVGMFLAELIEKYFVSPTLFRVIRLARIGRILRLIKGAKGIRTLLFALMMSLPALFNIGLLLFLVMFIYAIFGMSNFAYVKREVGIDDMFNFETFGNSMICLFQITTSAGWDGLLAPILNSGPPDCDPDKDHPGSSVKGDCGNPSVGIFFFVSYIIISFLVVVNMYIAVILENFSVATEESAEPLSEDDFEMFYEVWEKFDPDATQFIEFAKLSDFADALDPPLLIAKPNKVQLIAMDLPMVSGDRIHCLDILFAFTKRVLGESGEMDALRIQMEERFMASNPSKVSYEPITTTLKRKQEEVSAIIIQRAYRRYLLKQKVKKVSSIYKKDKGKECDGTPIKEDTLIDKLNENSTPEKTDMTPSTTSPPSYDSVTKPEKEKFEKDKSEKEDKGKDIRESKK

SEQ ID NO: 264 - DNA, 8876 bp, Homo sapiens
ggctgcttcagacatatgtctgtgtgtacgctgtgaaggtgtttctcttcacagttccccgccctctagtggtagttacaataatgccattttgtagtccctgtacaggaaatgcctcttcttacttcagttaccagaatccttttacaggaagttaggtgtggtctttgaaggagaattaaaaaaaaaaaaaaaaaaaaaaaaaaaagatttttttttttttaaagcatgatggaattttagctgcagtcttcttggtgccagcttatcaatcccaaactctgggtgtaaaagattctacagggcactttcttatgcaaggagctaaacagtgattaaaggagcaggatgaaaagatggcacagtcagtgctggtaccgccaggacctgacagcttccgcttctttaccagggaatcccttgctgctattgaacaacgcattgcagaagagaaagctaagagacccaaacaggaacgcaaggatgaggatgatgaaaatggcccaaagccaaacagtgacttggaagcaggaaaatctcttccatttatttatggagacattcctccagagatggtgtcagtgcccctggaggatctggacccctactatatcaataagaaaacgtttatagtattgaataaagggaaagcaatctctcgattcagtgccacccctgccctttacattttaactcccttcaaccctattagaaaattagctattaagattttggtacattctttattcaatatgctcattatgtgcacgattcttaccaactgtgtatttatgaccatgagtaaccctccagactggacaaagaatgtggagtatacctttacaggaatttatacttttgaatcacttattaaaatacttgcaaggggcttttgtttagaagatttcacatttttacgggatccatggaattggttggatttcacagtcattacttttgcatatgtgacagagtttgtggacctgggcaatgtctcagcgttgagaacattcagagttctccgagcattgaaaacaatttcagtcattccaggcctgaagaccattgtgggggccctgatccagtcagtgaagaagctttctgatgtcatgatcttgactgtgttctgtctaagcgtgtttgcgctaataggattgcagttgttcatgggcaacctacgaaataaatgtttgcaatggcctccagataattcttcctttgaaataaatatcacttccttctttaacaattcattggatgggaatggtactactttcaataggacagtgagcatatttaactgggatgaatatattgaggataaaagtcacttttattttttagaggggcaaaatgatgctctgctttgtggcaacagctcagatgcaggccagtgtcctgaaggatacatctgtgtgaaggctggtagaaaccccaactatggctacacgagctttgacacctttagttgggcctttttgtccttatttcgtctcatgactcaagacttctgggaaaacctttatcaactgacactacgtgctgctgggaaaacgtacatgatattttttgtgctggtcattttcttgggctcattctatctaataaatttgatcttggctgtggtggccatggcctatgaggaacagaatcaggccacattggaagaggctgaacagaaggaagctgaatttcagcagatgctcgaacagttgaaaaagcaacaagaagaagctcaggcggcagctgcagccgcatctgctgaatcaagagacttcagtggtgctggtgggataggagttttttcagagagttcttcagtagcatctaagttgagctccaaaagtgaaaaagagctgaaaaacagaagaaagaaaaagaaacagaaagaacagtctggagaagaagagaaaaatgacagagtccgaaaatcggaatctgaagacagcataagaagaaaaggtttccgtttttccttggaaggaagtaggctgacatatgaaaagagattttcttctccacaccagtccttactgagcatccgtggctcccttttctctccaagacgcaacagtagggcgagccttttcagcttcagaggtcgagcaaaggacattggctctgagaatgactttgctgatgatgagcacagcacctttgaggacaatgacagccgaagagactctctgttcgtgccgcacagacatggagaacggcgccacagcaatgtcagccaggccagccgtgcctccagggtgctccccatcctgcccatgaatgggaagatgcatagcgctgtggactgcaatggtgtggtctccctggtcgggggcccttctaccctcacatctgctgggcagctcctaccagagggcacaactactgaaacagaaataagaaagagacggtccagttcttatcatgtttccatggatttattggaagatcctacatcaaggcaaagagcaatgagtatagccagtattttgaccaacaccatggaagaacttgaagaatccagacagaaatgcccaccatgctggtataaatttgctaatatgtgtttgatttgggactgttgtaaaccatggttaaaggtgaaacaccttgtcaacctggttgtaatggacccatttgttgacctggccatcaccatctgcattgtcttaaatacactcttcatggctatggagcactatcccatgacggagcagttcagcagtgtactgtctgttggaaacctggtcttcacagggatcttcacagcagaaatgtttctcaagataattgccatggatccatattattactttcaagaaggctggaatatttttgatggttttattgtgagccttagtttaatggaacttggtttggcaaatgtggaaggattgtcagttctccgatcattccggctgctccgagttttcaagttggcaaaatcttggccaactctaaatatgctaattaagatcattggcaattctgtgggggctctaggaaacctcaccttggtattggccatcatcgtcttcatttttgctgtggtcggcatgcagctctttggtaagagctacaaagaatgtgtctgcaagatttccaatgattgtgaactcccacgctggcacatgcatgactttttccactccttcctgatcgtgttccgcgtgctgtgtggagagtggatagagaccatgtgggactgtatggaggtcgctggccaaaccatgtgccttactgtcttcatgatggtcatggtgattggaaatctagtggttctgaacctcttcttggccttgcttttgagttccttcagttctgacaatcttgctgccactgatgatgataacgaaatgaataatctccagattgctgtgggaaggatgcagaaaggaatcgattttgttaaaagaaaaatacgtgaatttattcagaaagcctttgttaggaagcagaaagctttagatgaaattaaaccgcttgaagatctaaataataaaaaagacagctgtatttccaaccataccaccatagaaataggcaaagacctcaattatctcaaagacggaaatggaactactagtggcataggcagcagtgtagaaaaatatgtcgtggatgaaagtgattacatgtcatttataaacaaccctagcctcactgtgacagtaccaattgctgttggagaatctgactttgaaaatttaaatactgaagaattcagcagcgagtcagatatggaggaaagcaaagagaagctaaatgcaactagttcatctgaaggcagcacggttgatattggagctcccgccgagggagaacagcctgaggttgaacctgaggaatcccttgaacctgaagcctgttttacagaagactgtgtacggaagttcaagtgttgtcagataagcatagaagaaggcaaagggaaactctggtggaatttgaggaaaacatgctataagatagtggagcacaattggttcgaaaccttcattgtcttcatgattctgctgagcagtggggctctggcctttgaagatatatacattgagcagcgaaaaaccattaagaccatgttagaatatgctgacaaggttttcacttacatattcattctggaaatgctgctaaagtgggttgcatatggttttcaagtgtattttaccaatgcctggtgctggctagacttcctgattgttgatgtctcactggttagcttaactgcaaatgccttgggttactcagaacttggtgccatcaaatccctcagaacactaagagctctgaggccactgagagctttgtcccggtttgaaggaatgagggttgttgtaaatgctcttttaggagccattccatctatcatgaatgtacttctggtttgtctgatcttttggctaatattcagtatcatgggagtgaatctctttgctggcaagttttaccattgtattaattacaccactggagagatgtttgatgtaagcgtggtcaacaactacagtgagtgcaaagctctcattgagagcaatcaaactgccaggtggaaaaatgtgaaagtaaactttgataacgtaggacttggatatctgtctctacttcaagtagccacgtttaagggatggatggatattatgtatgcagctgttgattcacgaaatgtagaattacaacccaagtatgaagacaacctgtacatgtatctttattttgtcatctttattatttttggttcattctttaccttgaatcttttcattggtgtcatcatagataacttcaaccaacagaaaaagaagtttggaggtcaagacatttttatgacagaagaacagaagaaatactacaatgcaatgaaaaaactgggttcaaagaaaccacaaaaacccatacctcgacctgctaacaaattccaaggaatggtctttgattttgtaaccaaacaagtctttgatatcagcatcatgatcctcatctgccttaacatggtcaccatgatggtggaaaccgatgaccagagtcaagaaatgacaaacattctgtactggattaatctggtgtttattgttctgttcactggagaatgtgtgctgaaactgatctctcttcgttactactatttcactattggatggaatatttttgattttgtggtggtcattctctccattgtaggaatgtttctggctgaactgatagaaaagtattttgtgtcccctaccctgttccgagtgatccgtcttgccaggattggccgaatcctacgtctgatcaaaggagcaaaggggatccgcacgctgctctttgctttgatgatgtcccttcctgcgttgtttaacatcggcctccttcttttcctggtcatgttcatctacgccatctttgggatgtccaattttgcctatgttaagagggaagttgggatcgatgacatgttcaactttgagacctttggcaacagcatgatctgcctgttccaaattacaacctctgctggctgggatggattgctagcacctattcttaatagtggacctccagactgtgaccctgacaaagatcaccctggaagctcagttaaaggagactgtgggaacccatctgttgggattttcttttttgtcagttacatcatcatatccttcctggttgtggtgaacatgtacatcgcggtcatcctggagaacttcagtgttgctactgaagaaagtgcagagcctctgagtgaggatgactttgagatgttctatgaggtttgggagaagtttgatcccgatgcgacccagtttatagagtttgccaaactttctgattttgcagatgccctggatcctcctcttctcatagcaaaacccaacaaagtccagctcattgccatggatctgcccatggtgagtggtgaccggatccactgtcttgacatcttatttgcttttacaaagcgtgttttgggtgagagtggagagatggatgcccttcgaatacagatggaagagcgattcatggcatcaaacccctccaaagtctcttatgagcccattacgaccacgttgaaacgcaaacaagaggaggtgtctgctattattatccagagggcttacagacgctacctcttgaagcaaaaagttaaaaaggtatcaagtatatacaagaaagacaaaggcaaagaatgtgatggaacacccatcaaagaagatactctcattgataaactgaatgagaattcaactccagagaaaaccgatatgacgccttccaccacgtctccaccctcgtatgatagtgtgaccaaaccagaaaaagaaaaatttgaaaaagacaaatcagaaaaggaagacaaagggaaagatatcagggaaagtaaaaagtaaaaagaaaccaagaattttccattttgtgatcaattgtttacagcccgtgatggtgatgtgtttgtgtcaacaggactcccacaggaggtctatgccaaactgactgtttttacaaatgtatacttaaggtcagtgcctataacaagacagagacctctggtcagcaaactggaactcagtaaactggagaaatagtatcgatgggaggtttctattttcacaaccagctgacactgctgaagagcagaggcgtaatggctactcagacgataggaaccaatttaaaggggggagggaagttaaatttttatgtaaattcaacatgtgacacttgataatagtaattgtcaccagtgtttatgttttaactgccacacctgccatatttttacaaaacgtgtgctgtgaatttatcacttttctttttaattcacaggttgtttactattatatgtgactatttttgtaaatgggtttgtgtttggggagagggattaaagggagggaattctacatttctctattgtattgtataactggatatattttaaatggaggcatgctgcaattctcattcacacataaaaaaatcacatcacaaaagggaagagtttacttcttgtttcaggatgtttttagatttttgaggtgcttaaatagctattcgtatttttaaggtgtctcatccagaaaaaatttaatgtgcctgtaaatgttccatagaatcacaagcattaaagagttgttttatttttacataacccattaaatgtacatgtatatatgtatatatgtatatgtgcgtgtatatacatatatatgtatacacacatgcacacacagagatatacacataccattacattgtcattcacagtcccagcagcatgactatcacatttttgataagtgtcctttggcataaaataaaaatatcctatcagtcctttctaagaagcctgaattgaccaaaaaacatccccaccaccactttataaagttgattctgctttatcctgcagtattgtttagccatcttctgctcttggtaaggttgacatagtatatgtcaatttaaaaaataaaagtctgctttgtaaatagtaattttacccagtggtgcatgtttgagcaaacaaaaatgatgatttaagcacactacttattgcatcaaatatgtaccacagtaagtatagtttgcaagctttcaacaggtaatatgatgtaattggttccattatagtttgaagctgtcactgctgcatgtttatcttgcctatgctgctgtatcttattccttccactgttcagaagtctaatatgggaagccatatatcagtggtaaagtgaagcaaattgttctaccaagacctcattcttcatgtcattaagcaataggttgcagcaaacaaggaagagcttcttgctttttattcttccaaccttaattgaacactcaatgatgaaaagcccgactgtacaaacatgttgcaagctgcttaaatctgtttaaaatatatggttagagttttctaagaaaatataaatactgtaaaaagttcattttattttatttttcagccttttgtacgtaaaatgagaaattaaaagtatcttcaggtggatgtcacagtcactattgttagtttctgttcctagcacttttaaattgaagcacttcacaaaataagaagcaaggactaggatgcagtgtaggtttctgcttttttattagtactgtaaacttgcacacatttcaatgtgaaacaaatctcaaactgagttcaatgtttatttgctttcaatagtaatgccttatcattgaaagaggcttaaagaaaaaaaaaatcagctgatactcttggcattgcttgaatccaatgtttccacctagtctttttattcagtaatcatcagtcttttccaatgtttgtttacacagatagatcttattgacccatatggcactagaactgtatcagatataatatgggatcccagctttttttcctctcccacaaaaccaggtagtgaagttatattaccagttacagcaaaatactttgtgtttcacaagcaacaataaatgtagattctttatactgaagctattgacttgtagtgtgttggtgaaatgcatgcaggaaaatgctgttaccataaagaacggtaaaccacattacaatcaagccaaaagaataaaggtttcgcttttgtttttgtatttaattgttgtctttgtttctatctttgaaatgccatttaaaggtagatttctatcatgtaaaaataatctatctgaaaaacaaatgtaaagaacacacattaattactataattcatctttcaattttttcatggaatggaagttaattaagaagagtgtattggataactactttaatattggccaaaaagctagatatggcatcaggtagactagtggaaagttacaaaaattaataaaaaattgactaacattttaaaaaaaaaaaaaaaaaa

SEQ ID NO: 265 - protein, 2005 aa, Homo sapiens; identical to SEQ ID NO: 261

SEQ ID NO: 266 - DNA, 724 bp, Homo sapiens
atgaagatggaaccagggctgggtgtgggcagtagactgttccaccaggagccaaagatgacagtgaatatacacttgacatcagtcaccaatgacaacctaattctacgtggcatactggcctggatcaatgagtctcctgaagttgaatttgacaaagatggaacaattgtgctcaggggctgcttattgttgctttatggtcatcctcttccctggctccattgccttgaagaaggtgaaattccatgaatacattcataacttcaaaatactacaagcagtatttttaagagggtgggtgatgacaaagtaatttctgtggacaattaggaaaaggaaactttcaggacaattttgaattcattcagtactttaagaagttttttgatgcaaactgcaatgaaaaagactataaccctgtggctgccggacaaggtcaagaaactgaagtggctccctctattgttgctccagttctgaataaaccgaagtaacctctcagctctagcaatccagtcagtgtattgaaacttggcattgaagccttggagaaagagatttctacttcagaaagctaaggaacaatgaattgatttgccagcagaacgaggggcaaaatgaccctgtattgcagaggactgtagacatgctctgtgccacagatgaagacttcgtgatatccgatgaaaggggcccacaggaggaacaagaagagttttaa

SEQ ID NO: 267 - DNA, 4916 bp, Homo sapiens
gcgaccccgcccctcccgctggggcccggggcgctagagcgctccgggaggctaggggagctgaattctgcgtcttcctttaggctgcggcgagacaatccccagagccccgcggcccggcctcggggcagccatggactcgcaggaattgaagactttgattaattactattgtcaagagagatatttccatcatgtattactggttgccagtgaaggaattaagaggtatggaagtgatccagtcttcaggttttatcatgcctatggcacattaatggaaggtaaaactcaagaagctcttcgagaatttgaggctattaaaaataaacaagatgtatcactttgttctctacttgcactgatatatgcccataaaatgagtcctaatccagatagagaagctattctggaatcagatgccagagtgaaggaacaacgtaaaggagctggagagaaagccttataccatgcaggcttatttttatggcacattggtcgccatgataaagcaagggaatatattgacagaatgatcaaaatatcagatggtagtaaacagggacacgttttgaaagcatggcttgatattacaagaggaaaagagccttacactaaaaaagcactgaagtattttgaagagggactccaagatgggaatgatacttttgctctgctgggtaaggcacaatgccttgagatgcgccagaattattcaggtgccctggagactgtgaaccagataatcgtgaattttccgagcttccttcctgcttttgttaagaaaatgaaattacaactagccttgcaggattgggaccagacagttgagacagcacaaaggttgctgctccaagatagccaaaatgtggaagcactgagaatgcaggcactctactatgtgtgtagagagggggatatagagaaggcttccaccaagctggaaaacttgggaaatacattggatgccatggaaccacagaatgctcaacttttctataacattacactcgccttcagcagaacttgtggacgtagtcaacttattcttcaaaaaattcaaacgttacttgagagagcttttagtttaaaccctcagcaatcagaatttgctacagaacttggataccaaatgattttacaaggaagagttaaagaggcactgaagtggtataagaccgccatgacacttgatgagactagtgtgtctgccctagttggatttatccaatgtcagttgatagaagggcaattacaggatgcagatcagcagctagaatttttaaatgaaatccagcaatccattggaaaatctgcggaattaatctatttacatgcagttcttgccatgaagaaaaataaacgacaagaagaagttattaatttgttaaatgatgtcctggacactcacttttcacaattagaaggtttgcctcttggcatacagtattttgaaaagctaaatcctgatttcttgttagaaattgttatggagtatctgagcttctgtccaatgcagcctgcaagtcctgggcaacctctttgtccacttctcaggcgttgcatctcagtcctggagactgtagtaagaactgttccaggtcttctgcaaacagtcttcctaatagcaaaagtgaaatatttgtcaggtgatattgaagcagctttcaataaccttcagcactgcttagaacacaatccctcttatgctgatgctcatctgctgctagctcaggtttacttgtctcaagaaaaagtcaaattgtgttctcagtctcttgaactttgtctgagctatgattttaaggtgagagactatcctttataccatttgataaaagctcagtcacaaaagaaaatgggagaaatagcagacgcaattaaaacactgcatatggcaatgagtttaccaggaatgaaaagaattggagcttccacaaaatcaaaagacagaaaaactgaagttgatacaagccatcgtttatcgatctttcttgaattgatagacgttcaccgcttaaatggagagcagcatgaggcaaccaaagttttacaagatgccatccatgaattttctggaacatctgaagaagtgcgggttaccattgctaatgcagaccttgctctagcccaaggagatattgaacgggctttaagcatccttcagaatgttacagccgaacagccttattttatagaggccagagaaaaaatggcagatatttatctgaagcacagaaaagataaaatgttatatatcacttgttttagagaaattgctgaaagaatggctaaccctcggtcttttcttctccttggtgatgcatacatgaatattctagagcctgaagaagccatagtagcatatgagcaagcattaaatcagaacccgaaagatggaacattggcaagcaaaatgggcaaagcacttatcaaaactcataactactcaatggcaatcacttactatgaagctgctctgaaaactggacaaaagaattatctttgctatgacctggctgagctcttattaaaattgaaatggtatgacaaagcagaaaaagttcttcagcatgctctggctcatgaacctgtaaatgaactgtcagctctcatggaggatggacgttgtcaagttcttctagcaaaagtttatagtaaaatggaaaaacttggtgatgcgatcactgcattacaacaggctcgagaattacaagctcgggtactaaaacgtgttcagatggaacagccagatgcagttcctgcacagaaacatttagcagctgaaatttgtgcagagattgcaaaacattctgttgctcagcgagactatgaaaaagcaattaagttttatagagaggctctggttcactgcgaaacagataataagattatgttggaactggcacgattatacctggcacaagatgaccctgattcctgcctgcggcagtgtgctctactgcttcagagtgaccaggataacgaagctgctaccatgatgatggctgatctcatgttcagaaaacaagactatgaacaagcagtgtttcatttacagcagcttttagaacgtaagccagataattatatgacattatctcgtttgattgatctcctaagaagatgtggaaaactcgaggatgtcccaagatttttctcaatggctgagaaacgtaactccagagcaaaattggaaccaggatttcagtattgtaaaggactgtatctttggtacactggagaaccaaatgatgcccttcgacattttaataaagctcggaaagatcgtgactggggccaaaatgccctttataatatgatagagatctgtttgaatccagataatgaaactgttggaggtgaagtatttgaaaacctggatggagacctgggtaattcaactgagaagcaagaatctgtgcaactggcagtaagaacagcagaaaaacttcttaaggaactaaaacctcagactgttcagggtcacgtacagcttcgcataatggaaaactattgcttaatggctaccaaacagaaatctaatgttgaacaagcattaaataccttcactgaaatagcagcatctgagaaggagcatatcccagcgctcttgggaatggcaacggcttatatgatcttgaaacagactccacgagccagaaaccagctgaagcgtattgcgaaaatgaattggaatgctattgatgctgaagagtttgagaagagttggctgctacttgctgatatttacattcaatcagcaaaatatgacatggcagaagacctgttaaaacggtgcctgcgtcataatagatcttgctgcaaagcttatgaatatatgggatacattatggaaaaagagcaagcatatacagatgctgccttgaactatgagatggcatggaaatatagcaatcggacaaatccggcagtaggatacaaactggcatttaattacttaaaagcaaaaagatatgtggattcaattgacatatgtcaccaggttcttgaagcacatccaacttatccaaaaatcagaaaggatatacttgataaggcccgtgcgtctttaagaccttgaaaataattttaacttaggtgttggtttaacaggaaatgaaagaaatctaactttcagttcttcctgttcaaaacaggtttgagctcagtgctttgttattagaagtatacccttttttctccagcagaggttgctgctgtacatcaagagaagtactatgtgaaattggtgtttcctaatggagttgaatgagagctggtctatttgactctgttttgattgggtacagatttggtgactctgtggtaaagactataattatttctataaagaatattttgttaaaatctaggtaattaaataccctgtatcttttctaaggaatattatttcaggaaatatatttaaaatgcattgttctcttttaaagtgtttttgttatattcttttatttatttatttatttttaaagacagagccttgatctgccgcccaggctggagtgcagtggcacgatcttggctcactgcaacctccgcctcctgggtttacgcgattctcctgcttcagcctcccgagtagctgggactaaaggcatgtgccatcacacccggctaattttttgtatttttagtagagatgggatttcaccgtgttagccaggaggggcttgatctcttgaccttgtgatccacctgcctcggcctcccaaagtgctgggattacaggcatgagccaccgcacccagcctgtttttgttgtattctgtgttgtttcaaaaattggaataaatctccctgtaaataactcatgaaaaagacaatatatatattttaaatatatattttaataaaggttttataaatagatgaaaaaaaaaaaaaaaaaaaaa

SEQ ID NO: 268 - protein, 1316 aa, Homo sapiens
MDSQELKTLINYYCQERYFHHVLLVASEGIKRYGSDPVFRFYHAYGTLMEGKTQEALREFEAIKNKQDVSLCSLLALIYAHKMSPNPDREAILESDARVKEQRKGAGEKALYHAGLFLWHIGRHDKAREYIDRMIKISDGSKQGHVLKAWLDITRGKEPYTKKALKYFEEGLQDGNDTFALLGKAQCLEMRQNYSGALETVNQIIVNFPSFLPAFVKKMKLQLALQDWDQTVETAQRLLLQDSQNVEALRMQALYYVCREGDIEKASTKLENLGNTLDAMEPQNAQLFYNITLAFSRTCGRSQLILQKIQTLLERAFSLNPQQSEFATELGYQMILQGRVKEALKWYKTAMTLDETSVSALVGFIQCQLIEGQLQDADQQLEFLNEIQQSIGKSAELIYLHAVLAMKKNKRQEEVINLLNDVLDTHFSQLEGLPLGIQYFEKLNPDFLLEIVMEYLSFCPMQPASPGQPLCPLLRRCISVLETVVRTVPGLLQTVFLIAKVKYLSGDIEAAFNNLQHCLEHNPSYADAHLLLAQVYLSQEKVKLCSQSLELCLSYDFKVRDYPLYHLIKAQSQKKMGEIADAIKTLHMAMSLPGMKRIGASTKSKDRKTEVDTSHRLSIFLELIDVHRLNGEQHEATKVLQDAIHEFSGTSEEVRVTIANADLALAQGDIERALSILQNVTAEQPYFIEAREKMADIYLKHRKDKMLYITCFREIAERMANPRSFLLLGDAYMNILEPEEAIVAYEQALNQNPKDGTLASKMGKALIKTHNYSMAITYYEAALKTGQKNYLCYDLAELLLKLKWYDKAEKVLQHALAHEPVNELSALMEDGRCQVLLAKVYSKMEKLGDAITALQQARELQARVLKRVQMEQPDAVPAQKHLAAEICAEIAKHSVAQRDYEKAIKFYREALVHCETDNKIMLELARLYLAQDDPDSCLRQCALLLQSDQDNEAATMMMADLMFRKQDYEQAVFHLQQLLERKPDNYMTLSRLIDLLRRCGKLEDVPRFFSMAEKRNSRAKLEPGFQYCKGLYLWYTGEPNDALRHFNKARKDRDWGQNALYNMIEICLNPDNETVGGEVFENLDGDLGNSTEKQESVQLAVRTAEKLLKELKPQTVQGHVQLRIMENYCLMATKQKSNVEQALNTFTEIAASEKEHIPALLGMATAYMILKQTPRARNQLKRIAKMNWNAIDAEEFEKSWLLLADIYIQSAKYDMAEDLLKRCLRHNRSCCKAYEYMGYIMEKEQAYTDAALNYEMAWKYSNRTNPAVGYKLAFNYLKAKRYVDSIDICHQVLEAHPTYPKIRKDILDKARASLRP

SEQ ID NO: 269 - DNA, 7969 bp, Homo sapiens
atggcggcggcggccgcggcggccgtcgggggccagcagccgtcacagcccgagctgcccgcgccggggctggccctagacaaggcggccaccgccgcgcacctcaaggcggccctcagccggccggacaaccgcgcaggtgctgaggagctgcaggcgctgctggagcgggtgctgagcgccgagcggccgctggccgcggctgccggcggcgaggacgcggcggcggccggaggcgggggcggtccgggggcggccgaggaggaggccctggagtggtgtaagtgccttctggcgggcggcggcggctacgacgagttctgcgcggcggtgcgggcctacgatcccgcggcgctctgcggcctggtctggacagccaacttcgtggcctaccgctgccggacgtgcggcatctcgccctgcatgtcgctgtgcgccgagtgcttccaccagggcgaccacaccggacacgacttcaacatgttccgcagccaggccgggggcgcctgcgactgcggggacagcaacgtgatgcgggagagcgggttttgcaaaaggcatcaaattaaatcaagttcaaatattccctgtgtccctaaagacttactgatgatgtctgaatttgttcttccaagatttatattttgtcttattcagtacttaagagaaggctataatgaaccagcagctgatggaccatcagaaaaggaccttaacaaagtccttcagcttttggaacctcaaatttcctttttagaagacctgactaaaatgggaggagcaatgcggtctgttcttactcaggttttgacaaaccaacaaaactacaaagatctgacttctggtcttggagaaaatgcttgtgtaaagaaaagtcatgaaaagtaccttatagctttaaagagctctggacttacatatcctgaggataagcttgtatatggtgtgcaggagccatctgctggtactagttctctggctgttcaaggtttcataggcgcaacaggaactttgggacaagtggattcttcagatgaggatgatcaggatggtagtcaaggtctgggcaagagaaaaagggtaaaactaagcagtggcaccaaagatcaatccataatggatgttttgaagcataaaagcttcctagaagaactattattttggactataaaatatgaattccctcaaaagatggtaactttcttactcaacatgcttccagatcaagagtataaggttgcttttacaaaaacttttgttcagcattatgctttcattatgaaaacactgaagaaaagtcatgaatcagacacaatgtctaacagaattgtgcatattagtgttcagttgttcagcaatgaggagctagccagacaggtaacagaagaatgtcagctgctggatattatggtcactgtgctattatacatgatggaaagttgccttattaaaagtgagctacaagatgaagaaaatagtttacatgtggtagtgaactgtggagaagcattactgaagaataacacttactggcctcttgttagtgattttattaatattctttctcatcaaagtgtggccaagagatttttggaggatcacggtttgttagttacatggatgaactttgtatctttctttcaaggtatgaacttaaacaagcgagaactaaacgagcatgtggaatttgagtctcagacctactatgctgcctttgctgctgaacttgaggcctgtgcacagccaatgtgggggcttttatcacattgtaaagttagggaaactcaagagtatacccgaaatgttgttagatattgccttgaagctcttcaagactggtttgatgctattaacttcgtagacgagccagcacctaaccaagtcacttttcatctgccactacatcgttactatgctatgtttttgagtaaggctgtgaaatgtcaagaactagatttggattctgttttaccagatcaggaaatgttaatgaaactaatgattcacccactccaaattcaagcaagtcttgcagaaatccacagcaatatgtgggtaagaaatggtctgcaaatcaaaggacaagccatgacgtatgtccagtctcatttctgtaattccatgattgatcctgacatttacctgttacaggtttgtgcttctagacttgacccagattattttatttcatccgtctttgaaagatttaaggtagtggatttgttgacaatggcatcacaacatcaaaatacagtacttgatgcagagcatgagaggtcgatgttagaaggcgctcttacatttcttgtgattcttttgagtcttcgtttacatttaggaatgtctgatgatgagattctcagggccgagatggtagcccagctgtgtatgaatgacaggacacacagttcattgctggacctcattccagaaaatcctaatcccaaaagtggcattattccaggcagttacagctttgaatcagttttatcagctgtagctgattttaaggctcctgtttttgaacctggaggttctatgcaacaaggcatgtatactcccaaagctgaagtctgggatcaagagtttgaccccgtcatggtcattcttcgaacagtttaccgtagagatgtgcagtctgcaatggacagatatactgcatttttaaaacagagtggaaaatttcctggaaatccctggcctccatataagaaaaggacatcactccatcctagctataaaggtcttatgagacttttgcactgtaaaactttacacattgtgctattcactctgctttacaagattttgatggatcatcaaaatctgtcagaacatgtactctgcatggttttatatctgattgaattaggacttgaaaattctgctgaagaagaatcagatgaagaggcatcagtgggtggaccagaacgttgtcatgacagttggtttcctggcagtaacttagtgtcaaacatgcgacactttataaactatgttagagtaagagttccagagactgctcctgaagtaaagagagactcacctgcaagtactagctctgataacttgggttctttacaaaattctggtacagctcaagttttcagtttagtagcagaacgtagaaagaaatttcaggaaatcatcaatcgcagtagcagtgaagcaaatcaggtggttcgtcccaaaacttcaagtaaatggtctgctcctggttcagctccacagttaactacagccattttggaaattaaagaaagcatattgtctttgctaattaaacttcaccacaaactctcaggaaaacaaaactcctactatcctccttggcttgatgacatagaaattttaatccaaccagaaattcctaaatacagtcatggagatggtataactgccgtggaaagaattttactaaaagctgcatcgcaaagtagaatgaacaaacgcatcattgaagagatatgtagaaaagtgacccctcctgtaccacctaaaaaagtcactgcagcagagaagaaaacattggacaaagaagaaaggcgacagaaggctagagagaggcagcagaaattgcttgcggagtttgcttcacgacagaaaagctttatggaaactgcaatggatgttgattctcctgagaatgatattcctatggagatcaccacggcagaaccacaggtttccgaggcagtatatgactgtgttatttgtggacagagtggcccctcctctgaagatcgacctactggattagttgtactgttacaagcatcctcagttttggggcagtgccgtgacaatgttgagccaaaaaagttgccgatcagtgaagaggagcagatttacccttgggatacctgtgcagccgttcatgatgtgaggctttcattattacagcgttattttaaggatagttcatgtctcttggcagtatcaattggctgggaaggaggtgtttatgtacaaacctgtggtcacacattacatatagattgtcataaatcttacatggaatcattacggaatgaccaggttcttcagggcttctcggtggacaaaggagaattcacgtgtccactctgtaggcagtttgctaacagtgttcttccatgttatcctggaagcaatgtggaaaataacccttggcaacgtcctagcaacaaaagcatacaagatctcataaaggaagtggaggagctgcagggacgaccgggagctttcccatcagaaacaaatttaagtaaagaaatggaatctgtaatgaaagatataaaaaataccactcagaagaaatatagagactatagcaagaccccgggctcaccagacaatgattttctctttatgtactctgttgctagaaccaatttagaacttgaattgattcatcgaggaggcaatttgtgttcaggtggtgcaagcacagctggcaaaaggtcttgtttaaatcagctgtttcatgtattagccttgcacatgcggctttatagcattgactctgagtataatccctggagaaagctcacccagttagaagagatgaatccacagctgggatatgaagaacaacagcctgaggttccaattctttatcatgatgtaacatcccttttgctcatccagatcttaatgatgccacaacccttacgcaaagaccactttacctgcattgtgaaggtactttttaccctactgtacacacaggctcttgcagcactctcagttaaatgcagcgaagaagataggtcagcctggaaacacgcgggagctctcaaaaagagtacatgtgatgcagaaaagtcttacgaagtattactgagctttgtgataagtgaactatttaaaggaaagttataccatgaagaaggaactcaggaatgtgcaatggttaaccctattgcttggtctcctgaatccatggaaaaatgcttacaggacttctgcttaccttttctcagaatcaccagccttcttcagcaccacctttttggggaagatttacctagctgccaggaagaagaagaattttcagttcttgccagctgcctgggacttctgccaacgttttaccaaacagaacatccattcatcagtgcctcctgtctggattggccagttccagcatttgatattataactcagtggtgttttgagataaaatcatttactgaaagacatgcagaacaaggaaaggccttgcttatccaagagtcaaaatggaaattaccacacctactacagttgcctgagaattataacaccatttttcagtactaccacagaaaaacctgtagtgtctgcaccaaggttcctaaagatcctgctgtttgccttgtgtgtggtacttttgtatgcctgaaaggactttgctgcaagcaacaaagttactgtgaatgtgtactgcactctcagaactgtggtgcaggaacaggtattttccttttgatcaatgcatcggtaattatcatcattcgaggtcaccgcttctgcctctggggttccgtgtatttggatgctcatggagaggaagaccgggatcttaggcgaggcaaacctctctacatttgtaaggaaagatacaaagttcttgagcaacagtggatttctcatacttttgatcacatcaataaaagatggggtccacattacaatgggctgtgactctccacctcagcattgcatcgtatcatcattttcgctacgaatttatttttcaacaataagctttaacttaatttgggggattaacacttttgctgagggagaaaaagaaaacatacattatgaagcctttccaaaattaggtgcttggtaatcacgttaatggtataattttttttttttaatatctggagaacattaataacaagttaaattattctttagtggtcattttttaagtgcacaattaataagaagcacaacttgttcacaaactcattcagaaatgattctcccaacaatgcgtatcagctattcattgatacttagagtgggtgtgatttatttgacattttactgcttctttctgtctgtgtgttttaatttgcatctgccaagcataatgcatcttttttcctctgccattcttgtgttgattggagaatttttctgtatgtaattagaaaaaaatgtaaaacatgatttatgtgaaatactgtatagtaaaagttggtctaatagtagaactttaaaattttttcttattgtgaggaatctgttaaaagtttaaagctttgctgaaaactgaattcattctcaggaatttcataaatcttctccccaggtaaataattgaaatagctgtaaaataagtagatagctgctgttaatataatacagtacattttggggggcatatgtgtggttggggggtccttaaaaatcaaaatttgccatttcagttggatgaattactagaggtaataacaaatcttactataaaatcaagaggtttaagaacatacactgggcagatgttgattccgtgcatgcccaccttttattaccaaacaaggttttgtttatatgattgtattagaaatgctcagacttccccagaaatgaaccataaattttggaacttcctttcagctcaagaggttcagctatattgtatttgtgcagtgtaatcactactatttctgctcggtttcctaaaaggaaaaaaaaggcgcagtggtgatgaccctcatgaatgagccacgcttctgcattcttcttagaaactgctgtgaaaaacaatttatgtttgcagggtttaaaaatcagtaaaaatgggaatgattgagctaaaacccactctatgagaaggaagattactgaaaagcatgtgacatattgctacaaagattttttttcctaaatgattcagtaattgaatgattatttaatatatagtgctatcaagcaatccctggtactttggacttccatggcttgttatataaaattacatttttacatgtaaaaataaactaaacaaatctaatgataaaatatgtcagatccatgttctaaaaaatttttgtaatgacatgacattacaagagtataaaaatggacattaaatcatggccttgcattaaaatatggaaagcagagcagtacatattcaaatgtattcagaaagtcaaaagattacctatcgttctacaataaaatacatggaaatagcttgctatttttatatacatttccaaaatattaagataactttctgtaagagtcaatgattctgttcgactaaatagctgtcctttccaacacattgctacttttttaaatactgtatcataagttcagcctgtcatactttttgcattgatcgttatgaataccagaccatttgtaagtgtggttgaagagcaaaatgctaattgacatctctagtaaatactgttacaggattcatgaacttgaataattctacagtttgaaactctgatgctatatatacatggtataatgtattcagactttgattactacttatttaaaatggaatgttttatggttgtgcatatggatgtgaagtgaaaatattagccttaactttaaaatttgggtgtttgatagtgtttattttgatattggtgaattagtcaccagtaaattttaaaaaagcacttggttgaaaattgtacttgaatacatacatgcatgctgctaaactagaactttaatttttccccataacttttataagtcccatttataaacccacttttaaaaataacaggtccaagttagagtgatgtgtgtatattattcaaaaaaatgtactggtgtgatatcttgtatgaatgatcatttaaatacagtacattactgtagaagctaaattgatctttataattaagcagaaattacaaaactaggaataatcaacattgtaagatatgttaataaaaacctgctgtcatttggtttgtgaaaggtccttaaaaaaaaaaaaaaaaaa

SEQ ID NO: 270 - protein, 1888 aa, Homo sapiens
MAAAAAAAVGGQQPSQPELPAPGLALDKAATAAHLKAALSRPDNRAGAEELQALLERVLSAERPLAAAAGGEDAAAAGGGGGPGAAEEEALEWCKCLLAGGGGYDEFCAAVRAYDPAALCGLVWTANFVAYRCRTCGISPCMSLCAECFHQGDHTGHDFNMFRSQAGGACDCGDSNVMRESGFCKRHQIKSSSNIPCVPKDLLMMSEFVLPRFIFCLIQYLREGYNEPAADGPSEKDLNKVLQLLEPQISFLEDLTKMGGAMRSVLTQVLTNQQNYKDLTSGLGENACVKKSHEKYLIALKSSGLTYPEDKLVYGVQEPSAGTSSLAVQGFIGATGTLGQVDSSDEDDQDGSQGLGKRKRVKLSSGTKDQSIMDVLKHKSFLEELLFWTIKYEFPQKMVTFLLNMLPDQEYKVAFTKTFVQHYAFIMKTLKKSHESDTMSNRIVHISVQLFSNEELARQVTEECQLLDIMVTVLLYMMESCLIKSELQDEENSLHVVVNCGEALLKNNTYWPLVSDFINILSHQSVAKRFLEDHGLLVTWMNFVSFFQGMNLNKRELNEHVEFESQTYYAAFAAELEACAQPMWGLLSHCKVRETQEYTRNVVRYCLEALQDWFDAINFVDEPAPNQVTFHLPLHRYYAMFLSKAVKCQELDLDSVLPDQEMLMKLMIHPLQIQASLAEIHSNMWVRNGLQIKGQAMTYVQSHFCNSMIDPDIYLLQVCASRLDPDYFISSVFERFKVVDLLTMASQHQNTVLDAEHERSMLEGALTFLVILLSLRLHLGMSDDEILRAEMVAQLCMNDRTHSSLLDLIPENPNPKSGIIPGSYSFESVLSAVADFKAPVFEPGGSMQQGMYTPKAEVWDQEFDPVMVILRTVYRRDVQSAMDRYTAFLKQSGKFPGNPWPPYKKRTSLHPSYKGLMRLLHCKTLHIVLFTLLYKILMDHQNLSEHVLCMVLYLIELGLENSAEEESDEEASVGGPERCHDSWFPGSNLVSNMRHFINYVRVRVPETAPEVKRDSPASTSSDNLGSLQNSGTAQVFSLVAERRKKFQEIINRSSSEANQVVRPKTSSKWSAPGSAPQLTTAILEIKESILSLLIKLHHKLSGKQNSYYPPWLDDIEILIQPEIPKYSHGDGITAVERILLKAASQSRMNKRIIEEICRKVTPPVPPKKVTAAEKKTLDKEERRQKARERQQKLLAEFASRQKSFMETAMDVDSPENDIPMEITTAEPQVSEAVYDCVICGQSGPSSEDRPTGLVVLLQASSVLGQCRDNVEPKKLPISEEEQIYPWDTCAAVHDVRLSLLQRYFKDSSCLLAVSIGWEGGVYVQTCGHTLHIDCHKSYMESLRNDQVLQGFSVDKGEFTCPLCRQFANSVLPCYPGSNVENNPWQRPSNKSIQDLIKEVEELQGRPGAFPSETNLSKEMESVMKDIKNTTQKKYRDYSKTPGSPDNDFLFMYSVARTNLELELIHRGGNLCSGGASTAGKRSCLNQLFHVLALHMRLYSIDSEYNPWRKLTQLEEMNPQLGYEEQQPEVPILYHDVTSLLLIQILMMPQPLRKDHFTCIVKVLFTLLYTQALAALSVKCSEEDRSAWKHAGALKKSTCDAEKSYEVLLSFVISELFKGKLYHEEGTQECAMVNPIAWSPESMEKCLQDFCLPFLRITSLLQHHLFGEDLPSCQEEEEFSVLASCLGLLPTFYQTEHPFISASCLDWPVPAFDIITQWCFEIKSFTERHAEQGKALLIQESKWKLPHLLQLPENYNTIFQYYHRKTCSVCTKVPKDPAVCLVCGTFVCLKGLCCKQQSYCECVLHSQNCGAGTGIFLLINASVIIIIRGHRFCLWGSVYLDAHGEEDRDLRRGKPLYICKERYKVLEQQWISHTFDHINKRWGPHYNGL

SEQ ID NO: 271 - DNA, 5529 bp, Homo sapiens
ctagatcgaaagtcctttggtaatgatgtgtcatacattctagtcatcaaagacaccattttctgggcctgaagtgttctgctggtttttggaggaatgagaatccaatctctcataagccggattcagaaaataggtcatcgatgaaacatctgtatggattatttcactataatcctatgatgcttggacttgaatcacttccagatcccacagacacctgggaaattatagagaccattggtaaaggcacctatggcaaagtctacaaggtaactaacaagagagatgggagcctggctgcagtgaaaattctggatccagtcagtgatatggatgaagaaattgaggcagaatacaacattttgcagttccttcctaatcatcccaatgttgtaaagttttatgggatgttttacaaagcggatcactgtgtagggggacagctgtggctggtcctggagctgtgtaatgggggctcagtcactgagcttgtcaaaggtctactcagatgtggccagcggttggatgaagcaatgatctcatacatcttgtacggggccctcttgggccttcagcatttgcacaacaaccgaatcatccaccgtgatgtgaaggggaataacattcttctgacaacagaaggaggagttaagctcgttgactttggtgtttcagctcaactcaccagtacacgtctgcggagaaacacatctgttggcaccccattctggatggcccctgaggtcattgcctgtgagcagcagtatgactcttcctatgacgctcgctgtgacgtctggtccttggggatcacagctattgaactgggggatggagaccctcccctctttgacatgcatcctgtgaaaacactctttaagattccaagaaatcctccacctactttacttcatccagaaaaatggtgtgaagaattcaaccactttatttcacagtgtcttattaaggattttgaaaggcgaccttccgtcacacatctccttgaccacccatttattaaaggagtacatggaaaagttctgtttctgcaaaaacagctggccaaggttctccaagaccagaagcatcaaaatcctgttgctaaaaccaggcatgagaggatgcataccagaagaccttatcatgtggaagatgctgaaaaatactgccttgaggatgatttggtcaacctagaggttctggatgaggatacaattatccatcagttgcagaaacgttatgcagacttgctaatttacacatatgttggagacatcttaattgccttaaaccccttccagaatctaagcatatactctccacagttttccagactttatcatggggtgaaacgcgcctccaatcccccccacatatttgcatcagcagatgctgcttaccagtgcatggttactctcagcaaagaccagtgcattgtcatcagcggagagagtggctctgggaagacagaaagcgcccacctgattgttcaacatttgactttcttgggaaaggccaataatcagaccttgagagagaaaattctacaagtcaactccctggtggaagcctttgggaactcatgcactgccatcaatgacaactcgagccgttttggaaaatatctggaaatgatgtttacaccaactggagttgtgatgggggcaagaatctctgaatatctcctggaaaaatccagagttataaaacaggcagcgagagagaaaaattttcatatattttactatatttatgctggtcttcatcaccaaaagaagctttctgatttcagacttcctgaggaaaaacctcctaggtacatagctgatgaaactggaagggtgatgcacgacataacttccaaggagtcttacagaagacaattcgaagcaattcagcattgcttcaggattatagggttcacggacaaagaggtgcactcagtgtacagaattttggctgggattttgaatattgggaacattgagttcgcagctatttcctctcaacatcagactgataaaagtgaggtgcccaatgctgaagctttgcaaaatgctgcctctgttctgtgcattagccctgaagagctccaggaggccctcacctcccactgtgtggtcacccggggcgagaccatcatccgtgccaacactgtagacagggctgcggacgttcgagacgccatgtccaaagccctgtatgggaggctcttcagctggattgtgaatcgcattaatacactcctgcagccagacgaaaacatatgtagtgcaggaggtggaatgaatgtggggatcttggatatctttggattcgagaattttcagagaaattcatttgagcagctctgcataaacatcgccaatgagcaaatccagtactatttcaatcagcatgtttttgctcttgagcagatggaatatcagaatgaaggcattgatgctgtacccgtggaatatgaggacaaccgcccgctcttggacatgttcctccagaaacccctgggactgcttgcacttttggatgaggaaagtcggtttccccaagcaactgaccagaccctggttgataaatttgaagataatctacgatgcaaatacttctggaggcccaaaggagtggaactgtgctttggcattcagcattatgctggaaaggtattatatgatgcttctggggttcttgagaaaaatagagacactctccctgccgatgtggttgtggtcctgagaacgtcagaaaacatgcttcttcagcagctcttctcaatccctctgaccaaaacaggtaatttggcccagacaagagctaggataacagtggcctcaagttctttgcctccacatttcagtgctgggaaagccaaggtggacactctggaggtgatacggcatccggaagaaaccaccaacatgaagaggcaaactgtggcttcttacttccggtattctctgatggacctgctctccaaaatggtggttggacagccccactttgtgcgctgcattaaacccaatgatgaccgagaggccctgcagttctctcgagagagggtgctggcccagctccgctccacagggattctggagacagtcagcatccgccgccagggctattcccaccgcatcctttttgaagaatttgtgaaaaggtattattacttggcattcacagcacatcaaacacctcttgctagcaaagagagctgtgtggctatcttggaaaagtccagattagatcactgggtgctgggaaaaacaaaggtttttctcaaatattaccatgttgagcaattaaatttgctgcttcgagaagtcataggcagagtggttgtgctgcaggcatataccaaggggtggcttggagccaggagatacaaaaaggtcagagagaagagagagaagggagccattgccatccagtcagcctggagaggatatgatgctcggaggaaatttaagaaaataagcaacagaaggaatgagtctgctgctcataatcaagcaggggacacttcaaaccaaagcagtgggccacattcccccgtcgcagcaggtacgaggggaagtgccgaggttcaagactgcagcgagcctggtgaccataaagttctcaggggctctgtacatcgtaggagccattcacaagcagaatccaacaatggccgtacacagacttcaagcaactctcctgctgtcacagagaaaaatgggcattcacaagcccagagttctccaaaagggtgcgatatcttcgcaggacatgcaaacaagcactcggtttctgggactgatttgctgtcttctcggatatgccatcctgctccagatcagcaaggattgagtctctggggagcccctcaaaagcctggttcagaaaatggtcttgcacagaagcatcgaacacctcgccgacgatgtcagcagcccaaaatgctgagtagccctgaggacaccatgtactataaccagttaaatggaactctagaatatcaagggagcaagaggaagccaagaaaacttggccaaatcaaagtacttgatggggaagatgaatattacaaatctctgtcaccagtggactgtatccctgaggagaacaactcagcccacccttcctttttttcttcatcctcaaaaggagactcttttgctcaacattaaattgtgcttcctaaccctaaatctgtccagagtaggaacattcatggtaatcgactgtctgtcattgcgtaagaaagcactgatatggggtcagcttctttggacatatggtccatgcctgaaccttactgaaccacttgcagattccaaaacatcttatcctatcctctaccactctcccacatgtgttgtgcagcctgagctgggcgctgccttcctttctcatcccatggggccctgtgggacactgagaacacctttacaatagtttaaacagtcattcatgcccccagtgtctaggaagataacagccagtctcaccccagtctaatcatggaccctgataatattgcttgatttttcctatcaagttacttttcaatccattcagaatctgccccagtggagacccaggagttcctttcctgcactcttctccatcctcccacctttgctgggcttttctatcactcccacctcccccagagtcagggctccattgctgagtgccccatcctggaggattggccccaagatctcctagaacaggataattgcctgtgtttaggcagataggcctaaatctttcagattctttctacaaggcaaataacccctctcttgttaattatgatgctgagaaagcctctgtctctttatttcaccttgccaagacacccacactactttggtgatgaaaagaaaggaatgagagggaaagtttggacctgtcactttggtgacagggaaagtccaggtcactttattctgtaactctccattcactggtcaaataactccatgaggctatcagtggctacagtggaaggacctgatcttgtccatctttgtgtgcacagagcctagcacagggcttggtagagggtatatctagtgaatggagaatacatggagaaacttaactaagttacacaagcatatctgacaggaatgttaccttcaattgtatgttacatatgattagtcacttttcatacactataacctctgatttttcactcaagtttgggctgattatattgtaatgatgttagataatactcaacatgattcagtatgacaaacttttttgagcacctactttatataaaacatgacaaattgcagtgtgatgtaatcaaaaacaaagaagccctataagaccatttctctagaacagatgttcttaatatttttcttactctaaaatatgtggtagatagtatgcaagaaaagccgggtgcggtggctcaggcctgtaatcccagcactttgggaggccaagatgggcggatcatgaagtcaggagttcgagaccagcctgaccaacatggtgaaaccccgtctctactaaaaaaaa

SEQ ID NO: 272 - protein, 1341 aa, Homo sapiens
MKHLYGLFHYNPMMLGLESLPDPTDTWEIIETIGKGTYGKVYKVTNKRDGSLAAVKILDPVSDMDEEIEAEYNILQFLPNHPNVVKFYGMFYKADHCVGGQLWLVLELCNGGSVTELVKGLLRCGQRLDEAMISYILYGALLGLQHLHNNRIIHRDVKGNNILLTTEGGVKLVDFGVSAQLTSTRLRRNTSVGTPFWMAPEVIACEQQYDSSYDARCDVWSLGITAIELGDGDPPLFDMHPVKTLFKIPRNPPPTLLHPEKWCEEFNHFISQCLIKDFERRPSVTHLLDHPFIKGVHGKVLFLQKQLAKVLQDQKHQNPVAKTRHERMHTRRPYHVEDAEKYCLEDDLVNLEVLDEDTIIHQLQKRYADLLIYTYVGDILIALNPFQNLSIYSPQFSRLYHGVKRASNPPHIFASADAAYQCMVTLSKDQCIVISGESGSGKTESAHLIVQHLTFLGKANNQTLREKILQVNSLVEAFGNSCTAINDNSSRFGKYLEMMFTPTGVVMGARISEYLLEKSRVIKQAAREKNFHIFYYIYAGLHHQKKLSDFRLPEEKPPRYIADETGRVMHDITSKESYRRQFEAIQHCFRIIGFTDKEVHSVYRILAGILNIGNIEFAAISSQHQTDKSEVPNAEALQNAASVLCISPEELQEALTSHCVVTRGETIIRANTVDRAADVRDAMSKALYGRLFSWIVNRINTLLQPDENICSAGGGMNVGILDIFGFENFQRNSFEQLCINIANEQIQYYFNQHVFALEQMEYQNEGIDAVPVEYEDNRPLLDMFLQKPLGLLALLDEESRFPQATDQTLVDKFEDNLRCKYFWRPKGVELCFGIQHYAGKVLYDASGVLEKNRDTLPADVVVVLRTSENMLLQQLFSIPLTKTGNLAQTRARITVASSSLPPHFSAGKAKVDTLEVIRHPEETTNMKRQTVASYFRYSLMDLLSKMVVGQPHFVRCIKPNDDREALQFSRERVLAQLRSTGILETVSIRRQGYSHRILFEEFVKRYYYLAFTAHQTPLASKESCVAILEKSRLDHWVLGKTKVFLKYYHVEQLNLLLREVIGRVVVLQAYTKGWLGARRYKKVREKREKGAIAIQSAWRGYDARRKFKKISNRRNESAAHNQAGDTSNQSSGPHSPVAAGTRGSAEVQDCSEPGDHKVLRGSVHRRSHSQAESNNGRTQTSSNSPAVTEKNGHSQAQSSPKGCDIFAGHANKHSVSGTDLLSSRICHPAPDQQGLSLWGAPQKPGSENGLAQKHRTPRRRCQQPKMLSSPEDTMYYNQLNGTLEYQGSKRKPRKLGQIKVLDGEDEYYKSLSPVDCIPEENNSAHPSFFSSSSKGDSFAQH

SEQ ID NO: 273 - DNA, 5810 bp, Homo sapiens
aacgggctcattcagcggtcgcgagctgcccgcgagggggagcggccggacggagagcgcgacccgtcccgggggtggggccgggcgcagcggcgagaggaggcgaaggtggctgcggtagcagcagcgcggcagcctcggacccagcccggagcgcagggcggccgctgcaggtccccgctcccctccccgtgcgtccgcccatggccgccgccgggcagctgtgcttgctctacctgtcggcggggctcctgtcccggctcggcgcagccttcaacttggacactcgggaggacaacgtgatccggaaatatggagaccccgggagcctcttcggcttctcgctggccatgcactggcaactgcagcccgaggacaagcggctgttgctcgtgggggccccgcgggcagaagcgcttccactgcagagagccaacagaacgggagggctgtacagctgcgacatcaccgcccgggggccatgcacgcggatcgagtttgataacgatgctgaccccacgtcagaaagcaaggaagatcagtggatgggggtcaccgtccagagccaaggtccagggggcaaggtcgtgacatgtgctcaccgatatgaaaaaaggcagcatgttaatacgaagcaggaatcccgagacatctttgggcggtgttatgtcctgagtcagaatctcaggattgaagacgatatggatgggggagattggagcttttgtgatgggcgattgagaggccatgagaaatttggctcttgccagcaaggtgtagcagctacttttactaaagactttcattacattgtatttggagccccgggtacttataactggaaagggattgttcgtgtagagcaaaagaataacactttttttgacatgaacatctttgaagatgggccttatgaagttggtggagagactgagcatgatgaaagtctcgttcctgttcctgctaacagttacttaggtttttctttggactcagggaaaggtattgtttctaaagatgagatcacttttgtatctggtgctcccagagccaatcacagtggagccgtggttttgctgaagagagacatgaagtctgcacatctcctccctgagcacatattcgatggagaaggtctggcctcttcatttggctatgatgtggcggtggtggacctcaacaaggatgggtggcaagatatagttattggagccccacagtattttgatagagatggagaagttggaggtgcagtgtatgtctacatgaaccagcaaggcagatggaataatgtgaagccaattcgtcttaatggaaccaaagattctatgtttggcattgcagtaaaaaatattggagatattaatcaagatggctacccagatattgcagttggagctccgtatgatgacttgggaaaggtttttatctatcatggatctgcaaatggaataaataccaaaccaacacaggttctcaagggtatatcaccttattttggatattcaattgctggaaacatggaccttgatcgaaattcctaccctgatgttgctgttggttccctctcagattcagtaactattttcagatcccggcctgtgattaatattcagaaaaccatcacagtaactcctaacagaattgacctccgccagaaaacagcgtgtggggcgcctagtgggatatgcctccaggttaaatcctgttttgaatatactgctaaccccgctggttataatccttcaatatcaattgtgggcacacttgaagctgaaaaagaaagaagaaaatctgggctatcctcaagagttcagtttcgaaaccaaggttctgagcccaaatatactcaagaactaactctgaagaggcagaaacagaaagtgtgcatggaggaaaccctgtggctacaggataatatcagagataaactgcgtcccattcccataactgcctcagtggagatccaagagccaagctctcgtaggcgagtgaattcacttccagaagttcttccaattctgaattcagatgaacccaagacagctcatattgatgttcacttcttaaaagagggatgtggagacgacaatgtatgtaacagcaaccttaaactagaatataaattttgcacccgagaaggaaatcaagacaaattttcttatttaccaattcaaaaaggtgtaccagaactagttctaaaagatcagaaggatattgctttagaaataacagtgacaaacagcccttccaacccaaggaatcccacaaaagatggcgatgacgcccatgaggctaaactgattgcaacgtttccagacactttaacctattctgcatatagagaactgagggctttccctgagaaacagttgagttgtgttgccaaccagaatggctcgcaagctgactgtgagctcggaaatccttttaaaagaaattcaaatgtcactttttatttggttttaagtacaactgaagtcacctttgacaccccagatctggatattaatctgaagttagaaacaacaagcaatcaagataatttggctccaattacagctaaagcaaaagtggttattgaactgcttttatcggtctcgggagttgctaaaccttcccaggtgtattttggaggtacagttgttggcgagcaagctatgaaatctgaagatgaagtgggaagtttaatagagtatgaattcagggtaataaacttaggtaaacctcttacaaacctcggcacagcaaccttgaacattcagtggccaaaagaaattagcaatgggaaatggttgctttatttggtgaaagtagaatccaaaggattggaaaaggtaacttgtgagccacaaaaggagataaactccctgaacctaacggagtctcacaactcaagaaagaaacgggaaattactgaaaaacagatagatgataacagaaaattttctttatttgctgaaagaaaataccagactcttaactgtagcgtgaacgtgaactgtgtgaacatcagatgcccgctgcgggggctggacagcaaggcgtctcttattttgcgctcgaggttatggaacagcacatttctagaggaatattccaaactgaactacttggacattctcatgcgagccttcattgatgtgactgctgctgccgaaaatatcaggctgccaaatgcaggcactcaggttcgagtgactgtgtttccctcaaagactgtagctcagtattcgggagtaccttggtggatcatcctagtggctattctcgctgggatcttgatgcttgctttattagtgtttatactatggaagtgtggtttcttcaagagaaataagaaagatcattatgatgccacatatcacaaggctgagatccatgctcagccatctgataaagagaggcttacttctgatgcatagtattgatctacttctgtaattgtgtggattctttaaacgctctaggtacgatgacagtgttccccgataccatgctgtaaggatccggaaagaagagcgagagatcaaagatgaaaagtatattgataaccttgaaaaaaaacagtggatcacaaagtggaacgaaaatgaaagctactcatagcgggggcctaaaaaaaaaaagcttcacagtacccaaactgctttttccaactcagaaattcaatttggatttaaaagcctgctcaatccctgaggactgatttcagagtgactacacacagtacgaacctacagttttaactgtggatattgttacgtagcctaaggctcctgttttgcacagccaaatttaaaactgttggaatggatttttctttaactgccgtaatttaactttctgggttgcctttatttttggcgtggctgacttacatcatgtgttggggaagggcctgcccagttgcactcaggtgacatcctccagatagtgtagctgaggaggcacctacactcacctgcactaacagagtggccgtcctaacctcgggcctgctgcgcagacgtccatcacgttagctgtcccacatcacaagactatgccattggggtagttgtgtttcaacggaaagtgctgtcttaaactaaatgtgcaatagaaggtgatgttgccatcctaccgtcttttcctgtttcctagctgtgtgaatacctgctcacgtcaaatgcatacaagtttcattctccctttcactaaaacacacaggtgcaacagacttgaatgctagttatacttatttgtatatggtatttattttttcttttctttacaaaccattttgttattgactaacaggccaaagagtctccagtttacccttcaggttggtttaatcaatcagaattagagcatgggaggtcatcactttgacctaaattatttactgcaaaaagaaaatctttataaatgtaccagagagagttgttttaataacttatctataaactataacctctccttcatgacagcctccaccccacaacccaaaaggtttaagaaatagaattataactgtaaagatgtttatttcaggcattggatattttttactttagaagcctgcataatgtttctggatttcatactgtaacattcaggaattcttggagaaaatgggtttattcactgaactctagtgcggtttactcactgctgcaaatactgtatattcaggacttgaaagaaatggtgaatgcctatggtggatccaaactgatccagtataagactactgaatctgctaccaaaacagttaatcagtgagtcgatgttctattttttgttttgtttcctcccctatctgtattcccaaaaattactttggggctaatttaacaagaactttaaattgtgttttaattgtaaaaatggcagggggtggaattattactctatacattcaacagagactgaatagatatgaaagctgattttttttaattaccatgcttcacaatgttaagttatatggggagcaacagcaaacaggtgctaatttgttttggatatagtataagcagtgtctgtgttttgaaagaatagaacacagtttgtagtgccactgttgttttgggggggcttttttcttttcggaaatcttaaaccttaagatactaaggacgttgttttggttgtactttggaattcttagtcacaaaatatattttgtttacaaaaatttctgtaaaacaggttataacagtgtttaaagtctcagtttcttgcttggggaacttgtgtccctaatgtgtttagattgctagattgctaaggagctgatactttgacagtgtttttagacctgtgttactaaaaaaaagatgaatgtcctgaaaagggtgttgggagggtggttcaacaaagaaacaaagatgttatggtgtttagatttatggttgttaaaaatgtcatctcaagtcaagtcactggtctgtttgcatttgatacatttttgtactaactagcattgtaaaattatttcatgattagaaattacctgtggatatttgtataaaagtgtgaaataaattttttataaaagtgttcattgtttcgtaacacagcattgtatatgtgaagcaaactctaaaattataaatgacaacctgaattatctatttcatcaaaccaaagttcagtgtttttatttttggtgtctcatgtaatctcagatcagccaaagatactagtgccaaagcaatgggattcggggtttttttctgttttcgctctatgtaggtgatcctcaagtctttcattttccttctttatgattaaaagaaacctacaggtatttaacaacc

SEQ ID NO: 274 - protein, 1073 aa, Homo sapiens
MAAAGQLCLLYLSAGLLSRLGAAFNLDTREDNVIRKYGDPGSLFGFSLAMHWQLQPEDKRLLLVGAPRAEALPLQRANRTGGLYSCDITARGPCTRIEFDNDADPTSESKEDQWMGVTVQSQGPGGKVVTCAHRYEKRQHVNTKQESRDIFGRCYVLSQNLRIEDDMDGGDWSFCDGRLRGHEKFGSCQQGVAATFTKDFHYIVFGAPGTYNWKGIVRVEQKNNTFFDMNIFEDGPYEVGGETEHDESLVPVPANSYLGFSLDSGKGIVSKDEITFVSGAPRANHSGAVVLLKRDMKSAHLLPEHIFDGEGLASSFGYDVAVVDLNKDGWQDIVIGAPQYFDRDGEVGGAVYVYMNQQGRWNNVKPIRLNGTKDSMFGIAVKNIGDINQDGYPDIAVGAPYDDLGKVFIYHGSANGINTKPTQVLKGISPYFGYSIAGNMDLDRNSYPDVAVGSLSDSVTIFRSRPVINIQKTITVTPNRIDLRQKTACGAPSGICLQVKSCFEYTANPAGYNPSISIVGTLEAEKERRKSGLSSRVQFRNQGSEPKYTQELTLKRQKQKVCMEETLWLQDNIRDKLRPIPITASVEIQEPSSRRRVNSLPEVLPILNSDEPKTAHIDVHFLKEGCGDDNVCNSNLKLEYKFCTREGNQDKFSYLPIQKGVPELVLKDQKDIALEITVTNSPSNPRNPTKDGDDAHEAKLIATFPDTLTYSAYRELRAFPEKQLSCVANQNGSQADCELGNPFKRNSNVTFYLVLSTTEVTFDTPDLDINLKLETTSNQDNLAPITAKAKVVIELLLSVSGVAKPSQVYFGGTVVGEQAMKSEDEVGSLIEYEFRVINLGKPLTNLGTATLNIQWPKEISNGKWLLYLVKVESKGLEKVTCEPQKEINSLNLTESHNSRKKREITEKQIDDNRKFSLFAERKYQTLNCSVNVNCVNIRCPLRGLDSKASLILRSRLWNSTFLEEYSKLNYLDILMRAFIDVTAAAENIRLPNAGTQVRVTVFPSKTVAQYSGVPWWIILVAILAGILMLALLVFILWKCGFFKRNKKDHYDATYHKAEIHAQPSDKERLTSDA

SEQ ID NO: 275 - DNA, 4576 bp, Homo sapiens
gatccccgcccctgctgcccgccacgtccctcacgtaccactcggcagaggcgcggggaaacctggcgtactggctgtggcttctctagcgggactcggcatgaggctggcgcggctgcttcgcggagccgccttggccggcccgggcccggggctgcgcgccgccggcttcagccgcagcttcagctcggactcgggctccagcccggcgtccgagcgcggcgttccgggccaggtggacttctacgcgcgcttctcgccgtccccgctctccatgaagcagttcctggacttcggatcagtgaatgcttgtgaaaagacctcatttatgtttctgcggcaagagttgcctgtcagactggcaaatataatgaaagaaataagtctccttccagataatcttctcaggacaccatccgttcaattggtacaaagctggtatatccagagtcttcaggagcttcttgattttaaggacaaaagtgctgaggatgctaaagctatttatgactttacagatactgtgatacggatcagaaaccgacacaatgatgtcattcccacaatggcccagggtgtgattgaatacaaggagagctttggggtggatcctgtcaccagccagaatgttcagtactttttggatcgattctacatgagtcgcatttcaattagaatgttactcaatcagcactctttattgtttggtggaaaaggcaaaggaagtccatctcatcgaaaacacattggaagcataaatccaaactgcaatgtacttgaagttattaaagatggctatgaaaatgctaggcgtctgtgtgatttgtattatattaactctcccgaactagaacttgaagaactaaatgcaaaatcaccaggacagccaatacaagtggtttatgtaccatcccatctctatcacatggtgtttgaacttttcaagaatgcaatgagagccactatggaacaccatgccaacagaggtgtttacccccctattcaagttcatgtcacgctgggtaatgaggatttgactgtgaagatgagtgaccgaggaggtggcgttcctttgaggaaaattgacagacttttcaactacatgtattcaactgcaccaagacctcgtgttgagacctcccgcgcagtgcctctggctggttttggttatggattgcccatatcacgtctttacgcacaatacttccaaggagacctgaagctgtattccctagagggttacgggacagatgcagttatctacattaaggctctgtcaacagactcaatagaaagactcccagtgtataacaaagctgcctggaagcattacaacaccaaccacgaggctgatgactggtgcgtccccagcagagaacccaaagacatgacgacgttccgcagtgcctagacacacttgggacatcggaaaatccaaatgtggcttttgtattaaatttggaaggtatggtgttcagaactatattataccaagtactttatttatcgttttcacaaaactatttgagtagaataaatggaaactgaattccatttgtgcccgttaaacctcctaaaggatgaaattgcacctattttacacttatattttcacagttaattgaacatatttttaaacaactgtagttttgggcaacttttcactttgtggtagacttcagaagtgtggaaatcttcgggtttctataggaaactagttttttttttttaagaaatactttcatttatgtttgctagaaacattttctaaatgatagtgattagctggttagccatcttcctgttatttggaggagttctgccatcttttattcggtagtgacagctgtaatatggtcttcatgtttatcagtgacttgactacaagtaaagcagaaaacagttggcctgtaatcacagaaccagccacccttcggcgtctacatgcattgtcttagctctgaggttaatttaccatttttaaattttattgtaaagaagtgtaatgactagctctctgtggatctatgccaaaatcatgggccatcttttctaagtgtacttctgattaatgcaaggggaaatttttatactgaaaacaaacaaacaaactagcagctactaaaatagagaagaaattgagggcaaagtaatatgtctccaaaactgaactgattgcttgttgagattacctagaaagcttttggaaaaaaatagagcttttctgcatcctactccagatacactgaatcggaatccctagggctagagcctagaaatctcactttttaaaatgcttccaaggtaagtctgatgcctaccctaggttgggaaccactctttcaaagtaaacagtgatgacacagcatttgctaaagtaacatctgtaggttttggtttccacctatttaaagtcagatttatagactcgaggagacagaaactgaatcccacacctggtgcaattagaagcataattagaagcagaagaacaaaatgccacgtaaccaaagcatcagagccatcattgcacgtgtctttttttcttttttcttttttttttttcaagacagggtctcgctcttttgcccaggatggagtacagtggcatggtcaaggctcactgcagcttcaatcttctgggctcaagtaatccttccacctcagcctcccatatagctggaactacagttgtgcactaccacacccagctaattttttgatttcttgtggagatgaggtctcagtatgttcccaggctagtgttgaactcctgagctcaagaaatcctcctgcctgagtctctgaaagtgctgggattacaggcgtgagccaccacacatggcctattgcacaagtcttgacaaacaacatatattttctaaaactatccagatttcattatcagggaaaagtttgcttaggtttattacagcagtccttggcatttgtatggtaatttgtactttacaaatactttgatatattataactctattggtctttgaaacaaagcgatacagtgtaggtggtatcattctctttctcactcagtgtggcccagagttgctcagaattggagcagagcctgagacgtatctgcagatcctgtcatcagctggcaagtccaggagactgtgtcatttagagactgtgttgttagttatccctcaacatcttctaaggtggcaggaaataatattggaaataacattttaaagtaaaaattttaaagtttaaagaagagttttgccacttaaacaggggagctttgtctggaaaatacactgagttgaaacacttcatccttggaaggattatataagatgaacagttgtgataaatgtgtagattagagggatgtgaatgggcagttagtccagtgccctcatttaagaggccaagatcctgattcagaggaggcatcctttgcccagagctgcttagctaatctgaccaaatgttgggaaaaatgtctcacctaacccactattccttaattatggattttgtgaaaaacaatagaacatgttaatgagtaatttatattagttcgatgtattacaattttttagctttaaattacagttttcttataatgttgaaatgttttagaatcctttgaatctaagtatttgtttcctaaatgaaacatttgtacaacatttgatgtttttacttatgaaatattctcctcccccaagaaaatttaaactttttctctctatttaaaagctaagaaatgttttaaaggaaaaatgaaattatcttcctttagcttatttttaaggtaaaacagctttttactctgttattgtggtaatggacagaatattacatacaaaaatattctgggagagctttttcctagttggttttaaatcattgtgccacctgaaaggtttttagattttataggagctaatttgtccaccagcattaatgtaacacagtgtagttatgaaaatatattgaaggacaggaagtggacacgaagtgatttttgtaacctgagcagttaatgaatgtgccaacattttctaggaagggacagcaagaatattctgctctgtagttaaaatactggctggcttttgatgtcttcatgcttaattgtgatcactttcttgcactgtgatgtttttacgtgaatatgttgaagtagaagtctaccatattattttataaaatgttttctgtatggcaataaactgaaaacatggatcaacccttcttttgaaaataaactgagtcaatttagccttttaaaaatatagtcatctcttttaaatagaatcctcttccaccatcaaggctcaacattttgtaagcatccaaaaaattggtaattagggggcttgcactaaatttcactatcttcagtagagaggaactgtttggaacttagatttccaatgtgtatattctaatggagaaagcaagaggtagagtttgtatgtttgacttaccttagatttttattttccatacatactgcaaatgattgacttgttgcataaatgaagatcttctgttgtgtgcttttcaaacactgtaaataaatttgaaatttgaa

SEQ ID NO: 276 - protein, 436 aa, Homo sapiens
MRLARLLRGAALAGPGPGLRAAGFSRSFSSDSGSSPASERGVPGQVDFYARFSPSPLSMKQFLDFGSVNACEKTSFMFLRQELPVRLANIMKEISLLPDNLLRTPSVQLVQSWYIQSLQELLDFKDKSAEDAKAIYDFTDTVIRIRNRHNDVIPTMAQGVIEYKESFGVDPVTSQNVQYFLDRFYMSRISIRMLLNQHSLLFGGKGKGSPSHRKHIGSINPNCNVLEVIKDGYENARRLCDLYYINSPELELEELNAKSPGQPIQVVYVPSHLYHMVFELFKNAMRATMEHHANRGVYPPIQVHVTLGNEDLTVKMSDRGGGVPLRKIDRLFNYMYSTAPRPRVETSRAVPLAGFGYGLPISRLYAQYFQGDLKLYSLEGYGTDAVIYIKALSTDSIERLPVYNKAAWKHYNTNHEADDWCVPSREPKDMTTFRSA

SEQ ID NO: 277 - DNA, 1814 bp, Homo sapiens
gcagagctcgagaggcggctgccgggctgcggggcgccttgactctccctccaccctgcctcctcgggctccactcgtctgcccctggactcccgtctcctcctgtcctccggcttcccagagctccctccttatggcagcagcttcccgcgtctccggcgcagcttctcagcggacgaccctctcgctccggggctgagcccagtccctggatgttgctgaaactctcgagatcatgcgcgggtttggctgctgcttccccgccgggtgccactgccaccgccgccgcctctgctgccgccgtccgcgggatgctcagtagcccgctgcccggcccccgcgatcctgtgttcctcggaagccgtttgctgctgcagagttgcacgaactagtcatggtgctgtgggagtccccgcggcagtgcagcagctggacactttgcgagggcttttgctggctgctgctgctgcccgtcatgctactcatcgtagcccgcccggtgaagctcgctgctttccctacctccttaagtgactgccaaacgcccaccggctggaattgctctggttatgatgacagagaaaatgatctcttcctctgtgacaccaacacctgtaaatttgatggggaatgtttaagaattggagacactgtgacttgcgtctgtcagttcaagtgcaacaatgactatgtgcctgtgtgtggctccaatggggagagctaccagaatgagtgttacctgcgacaggctgcatgcaaacagcagagtgagatacttgtggtgtcagaaggatcatgtgccacagatgcaggatcaggatctggagatggagtccatgaaggctctggagaaactagtcaaaaggagacatccacctgtgatatttgccagtttggtgcagaatgtgacgaagatgccgaggatgtctggtgtgtgtgtaatattgactgttctcaaaccaacttcaatcccctctgcgcttctgatgggaaatcttatgataatgcatgccaaatcaaagaagcatcgtgtcagaaacaggagaaaattgaagtcatgtctttgggtcgatgtcaagataacacaactacaactactaagtctgaagatgggcattatgcaagaacagattatgcagagaatgctaacaaattagaagaaagtgccagagaacaccacataccttgtccggaacattacaatggcttctgcatgcatgggaagtgtgagcattctatcaatatgcaggagccatcttgcaggtgtgatgctggttatactggacaacactgtgaaaaaaaggactacagtgttctatacgttgttcccggtcctgtacgatttcagtatgtcttaatcgcagctgtgattggaacaattcagattgctgtcatctgtgtggtggtcctctgcatcacaaggaaatgccccagaagcaacagaattcacagacagaagcaaaatacagggcactacagttcagacaatacaacaagagcgtccacgaggttaatctaaagggagcatgtttcacagtggctggactaccgagagcttggactacacaatacagtattatagacaaaagaataagacaagagatctacacatgttgccttgcatttgtggtaatctacaccaatgaaaacatgtactacagctatatttgattatgtatggatatatttgaaatagtatacattgtcttgatgttttttctgtaatgtaaataaactatttatatcacacaatatagttttttctttcccatgtatttgttatatataataaatactcagtgatgagaaaaaaa

SEQ ID NO: 278 - protein, 374 aa, Homo sapiens
MVLWESPRQCSSWTLCEGFCWLLLLPVMLLIVARPVKLAAFPTSLSDCQTPTGWNCSGYDDRENDLFLCDTNTCKFDGECLRIGDTVTCVCQFKCNNDYVPVCGSNGESYQNECYLRQAACKQQSEILVVSEGSCATDAGSGSGDGVHEGSGETSQKETSTCDICQFGAECDEDAEDVWCVCNIDCSQTNFNPLCASDGKSYDNACQIKEASCQKQEKIEVMSLGRCQDNTTTTTKSEDGHYARTDYAENANKLEESAREHHIPCPEHYNGFCMHGKCEHSINMQEPSCRCDAGYTGQHCEKKDYSVLYVVPGPVRFQYVLIAAVIGTIQIAVICVVVLCITRKCPRSNRIHRQKQNTGHYSSDNTTRASTRLI

SEQ ID NO: 279 - DNA, 1314 bp, Homo sapiens
atgcctcagtatgacttgcgcctgctcagcagctccaacagcaagactgcccggagagaggggagaggccccctggtgacttatgacccccgcaggagtaaccagagagcgcgcgcgagcgcccagcgcctggctcaagacgaagatttaaccgagaacaaaagaacgtttgccaatcagaaaacgctacccgagaacgaggataaccccgctttgggcgctgcgcggtcctcgctcccctcaaacgccgctggcgaaggcgcccctgctcaggaatgcgcatctgagtgcaccaggaagaggaacaaatctttgaagcaaattccctttctgcgcgttttcgtccctgagcgaattcagggtaaaagtttttccgaacttttccctcccagtcccccgcccctcccctcaggaatccgcccagagcgccgcggacaccgcctccgccactcccgcgcccgccccttccgacttccgcccaatccgaaggcggccaccgaaaaaacaaaggccgccattgggccgccggggcctggggccgcccccggagtgtcggcgctcactcccggcgggcggcggcggcggcggcggcggcgggcgccaggactcgctgctggggctgcgaggggctggaggggccggggccaggccgcgggcacgagcgcctcgcggtttcggacgcagtgtgactgggtttccaaaaagaactcgccgtgctcccgactccggggccgagatcggactcagcaagagccggccgtttggctgaaacttggggccgagcttttggggctgaagaaggagcggggtgtggaggaggaggcgaaggaggcggcgacgagcggagcctcgaggccaggaggcggggcagcaccgcggaggcggcggccggggcgagcgagcggcggcggcaggggttctcctagcggggaccggaccaggcgcggggggcgtgcgcgctgcggtgcgccgggggtccagagtcttgggcaaactttgaagggtgccggagccgcttgttgctcctcgcggcggagggagccgcaccgttacgtccccgcggggagagcgaggcggccctcctcggcgcccccaacccaggctgacgagttttgggcccccggcggccctgcgagtgcagggcggcggcgtctgcggcgccttcgcggcgcgggcacccaggcggcagcgccctttgctccacgccgcccacggcccggccccggcgccgtgaggactctcatgcgtcgggcgcggcggcgcctccccgcatccaagcctctcccaaccgcctcgtcgcactcctcaggctga

SEQ ID NO: 280 - protein, 437 aa, Homo sapiens
MPQYDLRLLSSSNSKTARREGRGPLVTYDPRRSNQRARASAQRLAQDEDLTENKRTFANQKTLPENEDNPALGAARSSLPSNAAGEGAPAQECASECTRKRNKSLKQIPFLRVFVPERIQGKSFSELFPPSPPPLPSGIRPERRGHRLRHSRARPFRLPPNPKAATEKTKAAIGPPGPGAAPGVSALTPGGRRRRRRRRAPGLAAGAARGWRGRGQAAGTSASRFRTQCDWVSKKNSPCSRLRGRDRTQQEPAVWLKLGAELLGLKKERGVEEEAKEAATSGASRPGGGAAPRRRRPGRASGGGRGSPSGDRTRRGGRARCGAPGVQSLGQTLKGAGAACCSSRRREPHRYVPAGRARRPSSAPPTQADEFWAPGGPASAGRRRLRRLRGAGTQAAAPFAPRRPRPGPGAVRTLMRRARRRLPASKPLPTASSHSSG

SEQ ID NO: 281 - DNA, 3851 bp, Homo sapiens
ctctcccaaccgcctcgtcgcactcctcaggctgagagcaccgctgcactcgcggccggcgatgcgggaccccggcgcggccgctccgctttcgtccctgggcctctgtgccctggtgctggcgctgctgggcgcactgtccgcgggcgccggggcgcagccgtaccacggagagaagggcatctccgtgccggaccacggcttctgccagcccatctccatcccgctgtgcacggacatcgcctacaaccagaccatcctgcccaacctgctgggccacacgaaccaagaggacgcgggcctcgaggtgcaccagttctacccgctggtgaaggtgcagtgttctcccgaactccgctttttcttatgctccatgtatgcgcccgtgtgcaccgtgctcgatcaggccatcccgccgtgtcgttctctgtgcgagcgcgcccgccagggctgcgaggcgctcatgaacaagttcggcttccagtggcccgagcggctgcgctgcgagaacttcccggtgcacggtgcgggcgagatctgcgtgggccagaacacgtcggacggctccgggggcccaggcggcggccccactgcctaccctaccgcgccctacctgccggacctgcccttcaccgcgctgcccccgggggcctcagatggcagggggcgtcccgccttccccttctcatgcccccgtcagctcaaggtgcccccgtacctgggctaccgcttcctgggtgagcgcgattgtggcgccccgtgcgaaccgggccgtgccaacggcctgatgtactttaaggaggaggagaggcgcttcgcccgcctctgggtgggcgtgtggtccgtgctgtgctgcgcctcgacgctctttaccgttctcacctacctggtggacatgcggcgcttcagctacccagagcggcccatcatcttcctgtcgggctgctacttcatggtggccgtggcgcacgtggccggcttccttctagaggaccgcgccgtgtgcgtggagcgcttctcggacgatggctaccgcacggtggcgcagggcaccaagaaggagggctgcaccatcctcttcatggtgctctacttcttcggcatggccagctccatctggtgggtcattctgtctctcacttggttcctggcggccggcatgaagtggggccacgaggccatcgaggccaactcgcagtacttccacctggccgcgtgggccgtgcccgccgtcaagaccatcactatcctggccatgggccaggtagacggggacctgctgagcggggtgtgctacgttggcctctccagtgtggacgcgctgcggggcttcgtgctggcgcctctgttcgtctacctcttcataggcacgtccttcttgctggccggcttcgtgtccctcttccgtatccgcaccatcatgaaacacgacggcaccaagaccgagaagctggagaagctcatggtgcgcatcggcgtcttcagcgtgctctacacagtgcccgccaccatcgtcctggcctgctacttctacgagcaggccttccgcgagcactgggagcgcacctggctcctgcagacgtgcaagagctatgccgtgccctgcccgcccggccacttcccgcccatgagccccgacttcaccgtcttcatgatcaagtacctgatgaccatgatcgtcggcatcaccactggcttctggatctggtcgggcaagaccctgcagtcgtggcgccgcttctaccacagacttagccacagcagcaagggggagactgcggtatgagccccggcccctccccacctttcccaccccagccctcttgcaagaggagaggcacggtagggaaaagaactgctgggtgggggcctgtttctgtaactttctccccctctactgagaagtgacctggaagtgagaagttctttgcagatttggggcgaggggtgatttggaaaagaagacctgggtggaaagcggtttggatgaaaagatttcaggcaaagacttgcaggaagatgatgataacggcgatgtgaatcgtcaaaggtacgggccagcttgtgcctaatagaaggttgagaccagcagagactgctgtgagtttctcccggctccgaggctgaacggggactgtgagcgatccccctgctgcagggcgagtggcctgtccagacccctgtgaggccccgggaaaggtacagccctgtctgcggtggctgctttgttggaaagagggagggcctcctgcggtgtgcttgtcaagcagtggtcaaaccataatctcttttcactggggccaaactggagcccagatgggttaatttccagggtcagacattacggtctctcctcccctgccccctcccgcctgtttttcctcccgtactgctttcaggtcttgtaaaataagcatttggaagtcttgggaggcctgcctgctagaatcctaatgtgaggatgcaaaagaaatgatgataacattttgagataaggccaaggagacgtggagtaggtatttttgctactttttcattttctggggaaggcaggaggcagaaagacgggtgttttatttggtctaataccctgaaaagaagtgatgacttgttgcttttcaaaacaggaatgcatttttccccttgtctttgttgtaagagacaaaagaggaaacaaaagtgtctccctgtggaaaggcataactgtgacgaaagcaacttttataggcaaagcagcgcaaatctgaggtttcccgttggttgttaatttggttgagataaacattcctttttaaggaaaagtgaagagcagtgtgctgtcacacaccgttaagccagaggttctgacttcgctaaaggaaatgtaagaggttttgttgtctgttttaaataaatttaattcggaacacatgatccaacagactatgttaaaatattcagggaaatctctcccttcatttactttttcttgctataagcctatatttaggtttcttttctatttttttctcccatttggatcctttgaggtaaaaaaacataatgtcttcagcctcataataaaggaaagttaattaaaaaaaaaaagcaaagagccattttgtcctgttttcttggttccatcaatctgtttattaaacatcatccatatgctgaccctgtctctgtgtggttgggttgggaggcgatcagcagataccatagtgaacgaagaggaaggtttgaaccatgggccccatctttaaagaaagtcattaaaagaaggtaaacttcaaagtgattctggagttctttgaaatgtgctggaagacttaaatttattaatcttaaatcatgtactttttttctgtaatagaactcggattcttttgcatgatggggtaaagcttagcagagaatcatgggagctaacctttatcccacctttgacactaccctccaatcttgcaacactatcctgtttctcagaacagtttttaaatgccaatcatagagggtactgtaaagtgtacaagttactttatatatgtaatgttcacttgagtggaactgctttttacattaaagttaaaatcgatcttgtgtttcttcaaccttcaaaactatctcatctgtcagatttttaaaactccaacacaggttttggcatcttttgtgctgtatcttttaagtgcatgtgaaatttgtaaaatagagataagtacagtatgtatattttgtaaatctcccatttttgtaagaaaatatatattgtatttatacatttttactttggatttttgttttgttggctttaaaggtctaccccactttatcacatgtacagatcacaaataaatttttttaaatac

SEQ ID NO: 282 - protein, 574 aa, Homo sapiens
MRDPGAAAPLSSLGLCALVLALLGALSAGAGAQPYHGEKGISVPDHGFCQPISIPLCTDIAYNQTILPNLLGHTNQEDAGLEVHQFYPLVKVQCSPELRFFLCSMYAPVCTVLDQAIPPCRSLCERARQGCEALMNKFGFQWPERLRCENFPVHGAGEICVGQNTSDGSGGPGGGPTAYPTAPYLPDLPFTALPPGASDGRGRPAFPFSCPRQLKVPPYLGYRFLGERDCGAPCEPGRANGLMYFKEEERRFARLWVGVWSVLCCASTLFTVLTYLVDMRRFSYPERPIIFLSGCYFMVAVAHVAGFLLEDRAVCVERFSDDGYRTVAQGTKKEGCTILFMVLYFFGMASSIWWVILSLTWFLAAGMKWGHEAIEANSQYFHLAAWAVPAVKTITILAMGQVDGDLLSGVCYVGLSSVDALRGFVLAPLFVYLFIGTSFLLAGFVSLFRIRTIMKHDGTKTEKLEKLMVRIGVFSVLYTVPATIVLACYFYEQAFREHWERTWLLQTCKSYAVPCPPGHFPPMSPDFTVFMIKYLMTMIVGITTGFWIWSGKTLQSWRRFYHRLSHSSKGETAV

SEQ ID NO: 283 - DNA, 6656 bp, Homo sapiens
cagagatcgcgagcgaggcaccagcctgcagccggcccccagcacatcctcagccgcacagacactcggcgaggtggaggtgagggcgggcgccagcgaactcggagaggggctcgctcactcccaggcgatcccagccgccaccgccgccgcaccagcagcagcaacagcagcagcagcttccttcctcagactcccctcgagaggctggccaagcgggtgtagccgttgggggaggctcccgccgggggaacccggcgaggacaagagcagggcggccgccttccactcgggctgtccggcggcggctgcctccgcccgtgtgtccgtcaagggtgccgcgggatgtgtgtcagtttacgcctctgagatcacacagctgcctgggggccgtgtgatgcccaaggcaagtcttggttttaattattattattatcattattgttacgcttggctttcgggaaatactcgtgatatttgtaggataaaggaaatgacactttgaggaactggagagaacatatatgcgttttgtttttaagaggaaaaccgtgttctcttcccggcttgttccctctttgctgatttcaggagctactctcctcctggtgaggtggaaattccagcaagaatagaggtgaagacaagccaccaggactcaggagggaaacgctgaccattagaaacctctgcataagacgttgtaaggaggaaaataaaagagagaaaaacacaaagatttaaacaagaaacctacgaacccagctctggaaagagccaccttctccaaaatggatatgtttcctctcacctgggttttcttagccctctacttttcaagacaccaagtgagaggccaaccagacccaccgtgcggaggtcgtttgaattccaaagatgctggctatatcacctctcccggttacccccaggactacccctcccaccagaactgcgagtggattgtttacgcccccgaacccaaccagaagattgtcctcaacttcaaccctcactttgaaatcgagaagcacgactgcaagtatgactttatcgagattcgggatggggacagtgaatccgcagacctcctgggcaaacactgtgggaacatcgccccgcccaccatcatctcctcgggctccatgctctacatcaagttcacctccgactacgcccggcagggggcaggcttctctctgcgctacgagatcttcaagacaggctctgaagattgctcaaaaaacttcacaagccccaacgggaccatcgaatctcctgggtttcctgagaagtatccacacaacttggactgcacctttaccatcctggccaaacccaagatggagatcatcctgcagttcctgatctttgacctggagcatgaccctttgcaggtgggagagggggactgcaagtacgattggctggacatctgggatggcattccacatgttggccccctgattggcaagtactgtgggaccaaaacaccctctgaacttcgttcatcgacggggatcctctccctgacctttcacacggacatggcggtggccaaggatggcttctctgcgcgttactacctggtccaccaagagccactagagaactttcagtgcaatgttcctctgggcatggagtctggccggattgctaatgaacagatcagtgcctcatctacctactctgatgggaggtggacccctcaacaaagccggctccatggtgatgacaatggctggacccccaacttggattccaacaaggagtatctccaggtggacctgcgctttttaaccatgctcacggccatcgcaacacagggagcgatttccagggaaacacagaatggctactatgtcaaatcctacaagctggaagtcagcactaatggagaggactggatggtgtaccggcatggcaaaaaccacaaggtatttcaagccaacaacgatgcaactgaggtggttctgaacaagctccacgctccactgctgacaaggtttgttagaatccgccctcagacctggcactcaggtatcgccctccggctggagctcttcggctgccgggtcacagatgctccctgctccaacatgctggggatgctctcaggcctcattgcagactcccagatctccgcctcttccacccaggaatacctctggagccccagtgcagcccgcctggtcagcagccgctcgggctggttccctcgaatccctcaggcccagcccggtgaggagtggcttcaggtagatctgggaacacccaagacagtgaaaggtgtcatcatccagggagcccgcggaggagacagtatcactgctgtggaagccagagcatttgtgcgcaagttcaaagtctcctacagcctaaacggcaaggactgggaatacattcaggaccccaggacccagcagccaaagctgttcgaagggaacatgcactatgacacccctgacatccgaaggtttgaccccattccggcacagtatgtgcgggtatacccggagaggtggtcgccggcggggattgggatgcggctggaggtgctgggctgtgactggacagactccaagcccacggtagagacgctgggacccactgtgaagagcgaagagacaaccaccccctaccccaccgaagaggaggccacagagtgtggggagaactgcagctttgaggatgacaaagatttgcagctcccttcgggattcaattgcaacttcgatttcctcgaggagccctgtggttggatgtatgaccatgccaagtggctccggaccacctgggccagcagctccagcccaaacgaccggacgtttccagatgacaggaatttcttgcggctgcagagtgacagccagagagagggccagtatgcccggctcatcagcccccctgtccacctgccccgaagcccggtgtgcatggagttccagtaccaggccacgggcggccgcggggtggcgctgcaggtggtgcgggaagccagccaggagagcaagttgctgtgggtcatccgtgaggaccagggcggcgagtggaagcacgggcggatcatcctgcccagctacgacatggagtaccagattgtgttcgagggagtgatagggaaaggacgttccggagagattgccattgatgacattcggataagcactgatgtcccactggagaactgcatggaacccatctcggcttttgcagtggacatcccagaaatacatgagagagaaggatatgaagatgaaattgatgatgaatacgaggtggactggagcaattcttcttctgcaacctcagggtctggcgccccctcgaccgacaaagaaaagagctggctgtacaccctggatcccatcctcatcaccatcatcgccatgagctcactgggcgtcctcctgggggccacctgtgcaggcctcctgctctactgcacctgttcctactcgggcctgagctcccgaagctgcaccacactggagaactacaacttcgagctctacgatggccttaagcacaaggtcaagatgaaccaccaaaagtgctgctccgaggcatgacggattgcacctgaatcctatctgacgtttcattccagcaagaggggctggggaagattacatttttttttcctttggaaactgaatgccataatctcgatcaaaccgatccagaataccgaaggtatggacaggacagaaaagcgagtcgcaggaggaagggagatgcagccgcacaggggatgattaccctcctaggaccgcggtggctaagtcattgcaggaacggggctgtgttctctgctgggacaaaacaggagctcatctctttggggtcacagttctattttgtttgtgagtttgtattattattattattattattattattatattttatttctttggtctgtgagcaactcaaagaggcagaagaggagaatgacttttccagaatagaagtggagcagtgatcattattctccgctttctctttctaatcaacacttgaaaagcaaagtgtcttttcagcctttccatctttacaaataaaactcaaaaaagccgtccagcttatcccatcctctgattgtcttctgacttaagggatttactgtggtgtaggttctgccagccaaccctacaagctgccatttccagtcctagcatttaagtaggatgttgttgcctttaacttttcttatccaggggaaaattgccattttagggtcagcatgaacagctctttcttgtatgcgatttaaaacaaactggaaaggaaacttcacacgtcaaaatccatagaagcgcctggacgaggcttaaagtgctttgtgagtgaataggagccattcgctaattctagacccacagtgtctggtggtggggcttcccttgtggggcttctggtggtggttttgccttttcttttccctcctccatgttcttctaaaacatatacatatatacatacacacatacacatattcttcaggtctctaagcccctggaagcagcattgtgtgatattctcagaggcaggggaaaatagagggaaaaatagagactattggtatgttctccccatcagcgagttattgtaactggtcaccactggacgggaaggagaacagaggagagggaaagagaagcccaacctctgtgatcatatgagggccaaggctgagcagtgtagacagagaccctttgaaatgcatttgtctctcaaatagactagtaaacaccgacttctcctttgggttacaaacaccatttcaacctttcgggagagtcagagctaggatgtacaagaactgattctaaccagaagtccgcaagtactgtggacaagaatgcttaaccatgctgcttcagccttgagagacctaggttcttacacatatgcacacacgcatacacacatgcacgcacacacacatacacacatgcacgcacgcacgcatgcacaccaatttatgtttttattaagtgccttgaaaaaatgaagaaaaatgtattttccctttatgtaaaaattagtgaatatcttatgaattaaggcattcctctttccctaaccccgatggctccattcccaagtaccccaactcactgctgatcctattaaaggaatgagtcctgctacccgagtggtagtcatagccctagatgactctcaactactcttcaaagggaggcatcaggaatagaatgaaactgtgtgaaggataagattgttcgcatcaagatccaaatcttgatttcatattaacgcctaaggattgcctgtgtgctggaaatatatttgaaactcaaccagtatgcccagcctattgcatatcattgtcagaccatttttgctgctgtggtcacccacgatttcatttgtcttatacccaggtgaaaggggaagggtgaatgggactggctggttcctttaaatgttaacttatggaaatgctagttcaaatggtaatgtcacagtgttttgtatgcagagagcaagagttcaaccaacagctgtttattcatgtgtgtgtgtctttgctgctttgagttctctgtatctactgtgtatgtgaatggtcatgtgggactcagtggtggtgttgtgactttgacctagggtccgagtgtcacagctgatcttggcactcggcactcattggcacagtggtagttagaggtgaaaagtagagctgtcaagcccaagggcttagctttagggctcctcctgagttcggcccacagtagaagcaagattttaactagccccttttcctcttcaccctcccatgatgcgcagtgttcagaaagctggtaagtcctagggatttccagaagtagcctgcagaagaaggtaagtttgaaagccactccaggggtcctgatgctgtcatgctcagtgagccattttacagttctccaaagtctagccctgtttcggacctgcacttcacctctaagttatgtacaactcaacctgcatccctctaaaagtcctatatccatattcaccattggctaatttgaggccctgagtgggccttgaatgctaaaaagaagcagggtacgcagggctacatgtagataccacaccaaggctggaggctggtctgtcataagacagaaagaaagacgctgggcccaattttgacttggccaggggacaccttggtgtgtttgttatctttatctgtgggtaggctagctgacccatctccttgagtcattccctttgggaaaccccactgccagtattgatctcctttttgccttgtactgaatgacacattacctccacactctcccggactaggtggtcaacagggccacagggttgctttctgtctttggtggggcaggggagttgacagggatgagggtccaaggaataagcatgaatgacaagaaaacaagggaaagagttaacctgtcacatagcaggttaactttttcagggtttgcagttagaggtattcgaccattcactggctgagccagatcacgggaacttgagagcttttactgtgattcttcaatgtaaaaaataaacaacaatgtcaaactgtgtttatatgatttgtataaagcctttttaagattactatttaaataaacattataccagagataaaaaaaaaa

SEQ ID NO: 284 - protein, 926 aa, Homo sapiens
MDMFPLTWVFLALYFSRHQVRGQPDPPCGGRLNSKDAGYITSPGYPQDYPSHQNCEWIVYAPEPNQKIVLNFNPHFEIEKHDCKYDFIEIRDGDSESADLLGKHCGNIAPPTIISSGSMLYIKFTSDYARQGAGFSLRYEIFKTGSEDCSKNFTSPNGTIESPGFPEKYPHNLDCTFTILAKPKMEIILQFLIFDLEHDPLQVGEGDCKYDWLDIWDGIPHVGPLIGKYCGTKTPSELRSSTGILSLTFHTDMAVAKDGFSARYYLVHQEPLENFQCNVPLGMESGRIANEQISASSTYSDGRWTPQQSRLHGDDNGWTPNLDSNKEYLQVDLRFLTMLTAIATQGAISRETQNGYYVKSYKLEVSTNGEDWMVYRHGKNHKVFQANNDATEVVLNKLHAPLLTRFVRIRPQTWHSGIALRLELFGCRVTDAPCSNMLGMLSGLIADSQISASSTQEYLWSPSAARLVSSRSGWFPRIPQAQPGEEWLQVDLGTPKTVKGVIIQGARGGDSITAVEARAFVRKFKVSYSLNGKDWEYIQDPRTQQPKLFEGNMHYDTPDIRRFDPIPAQYVRVYPERWSPAGIGMRLEVLGCDWTDSKPTVETLGPTVKSEETTTPYPTEEEATECGENCSFEDDKDLQLPSGFNCNFDFLEEPCGWMYDHAKWLRTTWASSSSPNDRTFPDDRNFLRLQSDSQREGQYARLISPPVHLPRSPVCMEFQYQATGGRGVALQVVREASQESKLLWVIREDQGGEWKHGRIILPSYDMEYQIVFEGVIGKGRSGEIAIDDIRISTDVPLENCMEPISAFAVDIPEIHEREGYEDEIDDEYEVDWSNSSSATSGSGAPSTDKEKSWLYTLDPILITIIAMSSLGVLLGATCAGLLLYCTCSYSGLSSRSCTTLENYNFELYDGLKHKVKMNHQKCCSEA

SEQ ID NO: 285 - DNA, 4163 bp, Homo sapiens
cagagatcgcgagcgaggcaccagcctgcagccggcccccagcacatcctcagccgcacagacactcggcgaggtggaggtgagggcgggcgccagcgaactcggagaggggctcgctcactcccaggcgatcccagccgccaccgccgccgcaccagcagcagcaacagcagcagcagcttccttcctcagactcccctcgagaggctggccaagcgggtgtagccgttgggggaggctcccgccgggggaacccggcgaggacaagagcagggcggccgccttccactcgggctgtccggcggcggctgcctccgcccgtgtgtccgtcaagggtgccgcgggatgtgtgtcagtttacgcctctgagatcacacagctgcctgggggccgtgtgatgcccaaggcaagtcttggttttaattattattattatcattattgttacgcttggctttcgggaaatactcgtgatatttgtaggataaaggaaatgacactttgaggaactggagagaacatatatgcgttttgtttttaagaggaaaaccgtgttctcttcccggcttgttccctctttgctgatttcaggagctactctcctcctggtgaggtggaaattccagcaagaatagaggtgaagacaagccaccaggactcaggagggaaacgctgaccattagaaacctctgcataagacgttgtaaggaggaaaataaaagagagaaaaacacaaagatttaaacaagaaacctacgaacccagctctggaaagagccaccttctccaaaatggatatgtttcctctcacctgggttttcttagccctctacttttcaagacaccaagtgagaggccaaccagacccaccgtgcggaggtcgtttgaattccaaagatgctggctatatcacctctcccggttacccccaggactacccctcccaccagaactgcgagtggattgtttacgcccccgaacccaaccagaagattgtcctcaacttcaaccctcactttgaaatcgagaagcacgactgcaagtatgactttatcgagattcgggatggggacagtgaatccgcagacctcctgggcaaacactgtgggaacatcgccccgcccaccatcatctcctcgggctccatgctctacatcaagttcacctccgactacgcccggcagggggcaggcttctctctgcgctacgagatcttcaagacaggctctgaagattgctcaaaaaacttcacaagccccaacgggaccatcgaatctcctgggtttcctgagaagtatccacacaacttggactgcacctttaccatcctggccaaacccaagatggagatcatcctgcagttcctgatctttgacctggagcatgaccctttgcaggtgggagagggggactgcaagtacgattggctggacatctgggatggcattccacatgttggccccctgattggcaagtactgtgggaccaaaacaccctctgaacttcgttcatcgacggggatcctctccctgacctttcacacggacatggcggtggccaaggatggcttctctgcgcgttactacctggtccaccaagagccactagagaactttcagtgcaatgttcctctgggcatggagtctggccggattgctaatgaacagatcagtgcctcatctacctactctgatgggaggtggacccctcaacaaagccggctccatggtgatgacaatggctggacccccaacttggattccaacaaggagtatctccaggtggacctgcgctttttaaccatgctcacggccatcgcaacacagggagcgatttccagggaaacacagaatggctactatgtcaaatcctacaagctggaagtcagcactaatggagaggactggatggtgtaccggcatggcaaaaaccacaaggtatttcaagccaacaacgatgcaactgaggtggttctgaacaagctccacgctccactgctgacaaggtttgttagaatccgccctcagacctggcactcaggtatcgccctccggctggagctcttcggctgccgggtcacagatgctccctgctccaacatgctggggatgctctcaggcctcattgcagactcccagatctccgcctcttccacccaggaatacctctggagccccagtgcagcccgcctggtcagcagccgctcgggctggttccctcgaatccctcaggcccagcccggtgaggagtggcttcaggtagatctgggaacacccaagacagtgaaaggtgtcatcatccagggagcccgcggaggagacagtatcactgctgtggaagccagagcatttgtgcgcaagttcaaagtctcctacagcctaaacggcaaggactgggaatacattcaggaccccaggacccagcagccaaagctgttcgaagggaacatgcactatgacacccctgacatccgaaggtttgaccccattccggcacagtatgtgcgggtatacccggagaggtggtcgccggcggggattgggatgcggctggaggtgctgggctgtgactggacagactccaagcccacggtagagacgctgggacccactgtgaagagcgaagagacaaccaccccctaccccaccgaagaggaggccacagagtgtggggagaactgcagctttgaggatgacaaagatttgcagctcccttcgggattcaattgcaacttcgatttcctcgaggagccctgtggttggatgtatgaccatgccaagtggctccggaccacctgggccagcagctccagcccaaacgaccggacgtttccagatgacaggaatttcttgcggctgcagagtgacagccagagagagggccagtatgcccggctcatcagcccccctgtccacctgccccgaagcccggtgtgcatggagttccagtaccaggccacgggcggccgcggggtggcgctgcaggtggtgcgggaagccagccaggagagcaagttgctgtgggtcatccgtgaggaccagggcggcgagtggaagcacgggcggatcatcctgcccagctacgacatggagtaccagattgtgttcgagggagtgatagggaaaggacgttccggagagattgccattgatgacattcggataagcactgatgtcccactggagaactgcatggaacccatctcggcttttgcaggtgagaattttaaagggggcaccctcctgccagggaccgagcccacagtggacacggtgcccatgcagcccatcccagcctactggtattacgtaatggccgccgggggcgccgtgctggtgctggtctccgtcgcgctggccctggtgctccactaccaccggttccgctatgcggccaagaagaccgatcactccatcacctacaaaacctcccactacaccaacggggcccctctggcggtggagcccaccctaaccattaagctagagcaagaccgtggctcgcactgctgagggccgaagcaagaacagcacccaaaacaaacgagaaagactgcaaacatgttgcctcgattttgcacttttttctcctcgcctagtttctgtgtgaactctcagacatctctttcccggatccccaaccctgagcactcttatcaatcccaaccatcctccttgggttcattttggtttctggtttttctttttcctttttgttgattccaaaccaacaaacccaactctaatgctgcatcttggactatccgaagagatccacccccaagcactccacaactcaaggctcagctggttttgttccagagactggttcgcttgttttttccccttgccttatcccatacctcctctcagtgggcagtctgccaggagacgtgaggggaagcctggatctgtgtgtatgtacatagtagacatgtgtgtgtgtgaatagctctctgtgtgtgggtgtgtgagagagcggctggttcattgtgtgtgtgtttgggcgaggggtgagtgttcagagagggcccctttaactcttatgttacttctcctggggtacattttacaagaaaataatatactgtacaagttttgtttacttggagaagagattgaagctttttgttgccttatctaaaaaaaaaaaaaaaaaaaaaa

SEQ ID NO: 286 - protein, 906 aa, Homo sapiens
MDMFPLTWVFLALYFSRHQVRGQPDPPCGGRLNSKDAGYITSPGYPQDYPSHQNCEWIVYAPEPNQKIVLNFNPHFEIEKHDCKYDFIEIRDGDSESADLLGKHCGNIAPPTIISSGSMLYIKFTSDYARQGAGFSLRYEIFKTGSEDCSKNFTSPNGTIESPGFPEKYPHNLDCTFTILAKPKMEIILQFLIFDLEHDPLQVGEGDCKYDWLDIWDGIPHVGPLIGKYCGTKTPSELRSSTGILSLTFHTDMAVAKDGFSARYYLVHQEPLENFQCNVPLGMESGRIANEQISASSTYSDGRWTPQQSRLHGDDNGWTPNLDSNKEYLQVDLRFLTMLTAIATQGAISRETQNGYYVKSYKLEVSTNGEDWMVYRHGKNHKVFQANNDATEVVLNKLHAPLLTRFVRIRPQTWHSGIALRLELFGCRVTDAPCSNMLGMLSGLIADSQISASSTQEYLWSPSAARLVSSRSGWFPRIPQAQPGEEWLQVDLGTPKTVKGVIIQGARGGDSITAVEARAFVRKFKVSYSLNGKDWEYIQDPRTQQPKLFEGNMHYDTPDIRRFDPIPAQYVRVYPERWSPAGIGMRLEVLGCDWTDSKPTVETLGPTVKSEETTTPYPTEEEATECGENCSFEDDKDLQLPSGFNCNFDFLEEPCGWMYDHAKWLRTTWASSSSPNDRTFPDDRNFLRLQSDSQREGQYARLISPPVHLPRSPVCMEFQYQATGGRGVALQVVREASQESKLLWVIREDQGGEWKHGRIILPSYDMEYQIVFEGVIGKGRSGEIAIDDIRISTDVPLENCMEPISAFAGENFKGGTLLPGTEPTVDTVPMQPIPAYWYYVMAAGGAVLVLVSVALALVLHYHRFRYAAKKTDHSITYKTSHYTNGAPLAVEPTLTIKLEQDRGSHC

SEQ ID NO: 287 - DNA, 2601 bp, Homo sapiens
cagagatcgcgagcgaggcaccagcctgcagccggcccccagcacatcctcagccgcacagacactcggcgaggtggaggtgagggcgggcgccagcgaactcggagaggggctcgctcactcccaggcgatcccagccgccaccgccgccgcaccagcagcagcaacagcagcagcagcttccttcctcagactcccctcgagaggctggccaagcgggtgtagccgttgggggaggctcccgccgggggaacccggcgaggacaagagcagggcggccgccttccactcgggctgtccggcggcggctgcctccgcccgtgtgtccgtcaagggtgccgcgggatgtgtgtcagtttacgcctctgagatcacacagctgcctgggggccgtgtgatgcccaaggcaagtcttggttttaattattattattatcattattgttacgcttggctttcgggaaatactcgtgatatttgtaggataaaggaaatgacactttgaggaactggagagaacatatatgcgttttgtttttaagaggaaaaccgtgttctcttcccggcttgttccctctttgctgatttcaggagctactctcctcctggtgaggtggaaattccagcaagaatagaggtgaagacaagccaccaggactcaggagggaaacgctgaccattagaaacctctgcataagacgttgtaaggaggaaaataaaagagagaaaaacacaaagatttaaacaagaaacctacgaacccagctctggaaagagccaccttctccaaaatggatatgtttcctctcacctgggttttcttagccctctacttttcaagacaccaagtgagaggccaaccagacccaccgtgcggaggtcgtttgaattccaaagatgctggctatatcacctctcccggttacccccaggactacccctcccaccagaactgcgagtggattgtttacgcccccgaacccaaccagaagattgtcctcaacttcaaccctcactttgaaatcgagaagcacgactgcaagtatgactttatcgagattcgggatggggacagtgaatccgcagacctcctgggcaaacactgtgggaacatcgccccgcccaccatcatctcctcgggctccatgctctacatcaagttcacctccgactacgcccggcagggggcaggcttctctctgcgctacgagatcttcaagacaggctctgaagattgctcaaaaaacttcacaagccccaacgggaccatcgaatctcctgggtttcctgagaagtatccacacaacttggactgcacctttaccatcctggccaaacccaagatggagatcatcctgcagttcctgatctttgacctggagcatgaccctttgcaggtgggagagggggactgcaagtacgattggctggacatctgggatggcattccacatgttggccccctgattggcaagtactgtgggaccaaaacaccctctgaacttcgttcatcgacggggatcctctccctgacctttcacacggacatggcggtggccaaggatggcttctctgcgcgttactacctggtccaccaagagccactagagaactttcagtgcaatgttcctctgggcatggagtctggccggattgctaatgaacagatcagtgcctcatctacctactctgatgggaggtggacccctcaacaaagccggctccatggtgatgacaatggctggacccccaacttggattccaacaaggagtatctccaggtggacctgcgctttttaaccatgctcacggccatcgcaacacagggagcgatttccagggaaacacagaatggctactatgtcaaatcctacaagctggaagtcagcactaatggagaggactggatggtgtaccggcatggcaaaaaccacaaggtatttcaagccaacaacgatgcaactgaggtggttctgaacaagctccacgctccactgctgacaaggtttgttagaatccgccctcagacctggcactcaggtatcgccctccggctggagctcttcggctgccgggtcacagatgctccctgctccaacatgctggggatgctctcaggcctcattgcagactcccagatctccgcctcttccacccaggaatacctctggagccccagtgcagcccgcctggtcagcagccgctcgggctggttccctcgaatccctcaggcccagcccggtgaggagtggcttcaggtagatctgggaacacccaagacagtgaaaggtgtcatcatccagggagcccgcggaggagacagtatcactgctgtggaagccagagcatttgtgcgcaagttcaaagtctcctacagcctaaacggcaaggactgggaatacattcaggaccccaggacccagcagccaaaggtaggctgttcttggaggcctctgtaacgttaccctcaacagggaggctaagtgtggtacagggagttgagactgatgatgtcccatctaaacagtcgtcatccaactcctgaaatccaataaaacaaatatcgtttgagagattaaaaaaaaaaaaaaaaaaaaaaaa

SEQ ID NO: 288 - protein, 555 aa, Homo sapiens
MDMFPLTWVFLALYFSRHQVRGQPDPPCGGRLNSKDAGYITSPGYPQDYPSHQNCEWIVYAPEPNQKIVLNFNPHFEIEKHDCKYDFIEIRDGDSESADLLGKHCGNIAPPTIISSGSMLYIKFTSDYARQGAGFSLRYEIFKTGSEDCSKNFTSPNGTIESPGFPEKYPHNLDCTFTILAKPKMEIILQFLIFDLEHDPLQVGEGDCKYDWLDIWDGIPHVGPLIGKYCGTKTPSELRSSTGILSLTFHTDMAVAKDGFSARYYLVHQEPLENFQCNVPLGMESGRIANEQISASSTYSDGRWTPQQSRLHGDDNGWTPNLDSNKEYLQVDLRFLTMLTAIATQGAISRETQNGYYVKSYKLEVSTNGEDWMVYRHGKNHKVFQANNDATEVVLNKLHAPLLTRFVRIRPQTWHSGIALRLELFGCRVTDAPCSNMLGMLSGLIADSQISASSTQEYLWSPSAARLVSSRSGWFPRIPQAQPGEEWLQVDLGTPKTVKGVIIQGARGGDSITAVEARAFVRKFKVSYSLNGKDWEYIQDPRTQQPKVGCSWRPL

SEQ ID NO: 289 - DNA, 6671 bp, Homo sapiens
cagagatcgcgagcgaggcaccagcctgcagccggcccccagcacatcctcagccgcacagacactcggcgaggtggaggtgagggcgggcgccagcgaactcggagaggggctcgctcactcccaggcgatcccagccgccaccgccgccgcaccagcagcagcaacagcagcagcagcttccttcctcagactcccctcgagaggctggccaagcgggtgtagccgttgggggaggctcccgccgggggaacccggcgaggacaagagcagggcggccgccttccactcgggctgtccggcggcggctgcctccgcccgtgtgtccgtcaagggtgccgcgggatgtgtgtcagtttacgcctctgagatcacacagctgcctgggggccgtgtgatgcccaaggcaagtcttggttttaattattattattatcattattgttacgcttggctttcgggaaatactcgtgatatttgtaggataaaggaaatgacactttgaggaactggagagaacatatatgcgttttgtttttaagaggaaaaccgtgttctcttcccggcttgttccctctttgctgatttcaggagctactctcctcctggtgaggtggaaattccagcaagaatagaggtgaagacaagccaccaggactcaggagggaaacgctgaccattagaaacctctgcataagacgttgtaaggaggaaaataaaagagagaaaaacacaaagatttaaacaagaaacctacgaacccagctctggaaagagccaccttctccaaaatggatatgtttcctctcacctgggttttcttagccctctacttttcaagacaccaagtgagaggccaaccagacccaccgtgcggaggtcgtttgaattccaaagatgctggctatatcacctctcccggttacccccaggactacccctcccaccagaactgcgagtggattgtttacgcccccgaacccaaccagaagattgtcctcaacttcaaccctcactttgaaatcgagaagcacgactgcaagtatgactttatcgagattcgggatggggacagtgaatccgcagacctcctgggcaaacactgtgggaacatcgccccgcccaccatcatctcctcgggctccatgctctacatcaagttcacctccgactacgcccggcagggggcaggcttctctctgcgctacgagatcttcaagacaggctctgaagattgctcaaaaaacttcacaagccccaacgggaccatcgaatctcctgggtttcctgagaagtatccacacaacttggactgcacctttaccatcctggccaaacccaagatggagatcatcctgcagttcctgatctttgacctggagcatgaccctttgcaggtgggagagggggactgcaagtacgattggctggacatctgggatggcattccacatgttggccccctgattggcaagtactgtgggaccaaaacaccctctgaacttcgttcatcgacggggatcctctccctgacctttcacacggacatggcggtggccaaggatggcttctctgcgcgttactacctggtccaccaagagccactagagaactttcagtgcaatgttcctctgggcatggagtctggccggattgctaatgaacagatcagtgcctcatctacctactctgatgggaggtggacccctcaacaaagccggctccatggtgatgacaatggctggacccccaacttggattccaacaaggagtatctccaggtggacctgcgctttttaaccatgctcacggccatcgcaacacagggagcgatttccagggaaacacagaatggctactatgtcaaatcctacaagctggaagtcagcactaatggagaggactggatggtgtaccggcatggcaaaaaccacaaggtatttcaagccaacaacgatgcaactgaggtggttctgaacaagctccacgctccactgctgacaaggtttgttagaatccgccctcagacctggcactcaggtatcgccctccggctggagctcttcggctgccgggtcacagatgctccctgctccaacatgctggggatgctctcaggcctcattgcagactcccagatctccgcctcttccacccaggaatacctctggagccccagtgcagcccgcctggtcagcagccgctcgggctggttccctcgaatccctcaggcccagcccggtgaggagtggcttcaggtagatctgggaacacccaagacagtgaaaggtgtcatcatccagggagcccgcggaggagacagtatcactgctgtggaagccagagcatttgtgcgcaagttcaaagtctcctacagcctaaacggcaaggactgggaatacattcaggaccccaggacccagcagccaaagctgttcgaagggaacatgcactatgacacccctgacatccgaaggtttgaccccattccggcacagtatgtgcgggtatacccggagaggtggtcgccggcggggattgggatgcggctggaggtgctgggctgtgactggacagactccaagcccacggtagagacgctgggacccactgtgaagagcgaagagacaaccaccccctaccccaccgaagaggaggccacagagtgtggggagaactgcagctttgaggatgacaaagatttgcagctcccttcgggattcaattgcaacttcgatttcctcgaggagccctgtggttggatgtatgaccatgccaagtggctccggaccacctgggccagcagctccagcccaaacgaccggacgtttccagatgacaggaatttcttgcggctgcagagtgacagccagagagagggccagtatgcccggctcatcagcccccctgtccacctgccccgaagcccggtgtgcatggagttccagtaccaggccacgggcggccgcggggtggcgctgcaggtggtgcgggaagccagccaggagagcaagttgctgtgggtcatccgtgaggaccagggcggcgagtggaagcacgggcggatcatcctgcccagctacgacatggagtaccagattgtgttcgagggagtgatagggaaaggacgttccggagagattgccattgatgacattcggataagcactgatgtcccactggagaactgcatggaacccatctcggcttttgcaggtgagaattttaaagtggacatcccagaaatacatgagagagaaggatatgaagatgaaattgatgatgaatacgaggtggactggagcaattcttcttctgcaacctcagggtctggcgccccctcgaccgacaaagaaaagagctggctgtacaccctggatcccatcctcatcaccatcatcgccatgagctcactgggcgtcctcctgggggccacctgtgcaggcctcctgctctactgcacctgttcctactcgggcctgagctcccgaagctgcaccacactggagaactacaacttcgagctctacgatggccttaagcacaaggtcaagatgaaccaccaaaagtgctgctccgaggcatgacggattgcacctgaatcctatctgacgtttcattccagcaagaggggctggggaagattacatttttttttcctttggaaactgaatgccataatctcgatcaaaccgatccagaataccgaaggtatggacaggacagaaaagcgagtcgcaggaggaagggagatgcagccgcacaggggatgattaccctcctaggaccgcggtggctaagtcattgcaggaacggggctgtgttctctgctgggacaaaacaggagctcatctctttggggtcacagttctattttgtttgtgagtttgtattattattattattattattattattatattttatttctttggtctgtgagcaactcaaagaggcagaagaggagaatgacttttccagaatagaagtggagcagtgatcattattctccgctttctctttctaatcaacacttgaaaagcaaagtgtcttttcagcctttccatctttacaaataaaactcaaaaaagccgtccagcttatcccatcctctgattgtcttctgacttaagggatttactgtggtgtaggttctgccagccaaccctacaagctgccatttccagtcctagcatttaagtaggatgttgttgcctttaacttttcttatccaggggaaaattgccattttagggtcagcatgaacagctctttcttgtatgcgatttaaaacaaactggaaaggaaacttcacacgtcaaaatccatagaagcgcctggacgaggcttaaagtgctttgtgagtgaataggagccattcgctaattctagacccacagtgtctggtggtggggcttcccttgtggggcttctggtggtggttttgccttttcttttccctcctccatgttcttctaaaacatatacatatatacatacacacatacacatattcttcaggtctctaagcccctggaagcagcattgtgtgatattctcagaggcaggggaaaatagagggaaaaatagagactattggtatgttctccccatcagcgagttattgtaactggtcaccactggacgggaaggagaacagaggagagggaaagagaagcccaacctctgtgatcatatgagggccaaggctgagcagtgtagacagagaccctttgaaatgcatttgtctctcaaatagactagtaaacaccgacttctcctttgggttacaaacaccatttcaacctttcgggagagtcagagctaggatgtacaagaactgattctaaccagaagtccgcaagtactgtggacaagaatgcttaaccatgctgcttcagccttgagagacctaggttcttacacatatgcacacacgcatacacacatgcacgcacacacacatacacacatgcacgcacgcacgcatgcacaccaatttatgtttttattaagtgccttgaaaaaatgaagaaaaatgtattttccctttatgtaaaaattagtgaatatcttatgaattaaggcattcctctttccctaaccccgatggctccattcccaagtaccccaactcactgctgatcctattaaaggaatgagtcctgctacccgagtggtagtcatagccctagatgactctcaactactcttcaaagggaggcatcaggaatagaatgaaactgtgtgaaggataagattgttcgcatcaagatccaaatcttgatttcatattaacgcctaaggattgcctgtgtgctggaaatatatttgaaactcaaccagtatgcccagcctattgcatatcattgtcagaccatttttgctgctgtggtcacccacgatttcatttgtcttatacccaggtgaaaggggaagggtgaatgggactggctggttcctttaaatgttaacttatggaaatgctagttcaaatggtaatgtcacagtgttttgtatgcagagagcaagagttcaaccaacagctgtttattcatgtgtgtgtgtctttgctgctttgagttctctgtatctactgtgtatgtgaatggtcatgtgggactcagtggtggtgttgtgactttgacctagggtccgagtgtcacagctgatcttggcactcggcactcattggcacagtggtagttagaggtgaaaagtagagctgtcaagcccaagggcttagctttagggctcctcctgagttcggcccacagtagaagcaagattttaactagccccttttcctcttcaccctcccatgatgcgcagtgttcagaaagctggtaagtcctagggatttccagaagtagcctgcagaagaaggtaagtttgaaagccactccaggggtcctgatgctgtcatgctcagtgagccattttacagttctccaaagtctagccctgtttcggacctgcacttcacctctaagttatgtacaactcaacctgcatccctctaaaagtcctatatccatattcaccattggctaatttgaggccctgagtgggccttgaatgctaaaaagaagcagggtacgcagggctacatgtagataccacaccaaggctggaggctggtctgtcataagacagaaagaaagacgctgggcccaattttgacttggccaggggacaccttggtgtgtttgttatctttatctgtgggtaggctagctgacccatctccttgagtcattccctttgggaaaccccactgccagtattgatctcctttttgccttgtactgaatgacacattacctccacactctcccggactaggtggtcaacagggccacagggttgctttctgtctttggtggggcaggggagttgacagggatgagggtccaaggaataagcatgaatgacaagaaaacaagggaaagagttaacctgtcacatagcaggttaactttttcagggtttgcagttagaggtattcgaccattcactggctgagccagatcacgggaacttgagagcttttactgtgattcttcaatgtaaaaaataaacaacaatgtcaaactgtgtttatatgatttgtataaagcctttttaagattactatttaaataaacattataccagagataaaaaaaaaa

SEQ ID NO: 290 - protein, 931 aa, Homo sapiens
MDMFPLTWVFLALYFSRHQVRGQPDPPCGGRLNSKDAGYITSPGYPQDYPSHQNCEWIVYAPEPNQKIVLNFNPHFEIEKHDCKYDFIEIRDGDSESADLLGKHCGNIAPPTIISSGSMLYIKFTSDYARQGAGFSLRYEIFKTGSEDCSKNFTSPNGTIESPGFPEKYPHNLDCTFTILAKPKMEIILQFLIFDLEHDPLQVGEGDCKYDWLDIWDGIPHVGPLIGKYCGTKTPSELRSSTGILSLTFHTDMAVAKDGFSARYYLVHQEPLENFQCNVPLGMESGRIANEQISASSTYSDGRWTPQQSRLHGDDNGWTPNLDSNKEYLQVDLRFLTMLTAIATQGAISRETQNGYYVKSYKLEVSTNGEDWMVYRHGKNHKVFQANNDATEVVLNKLHAPLLTRFVRIRPQTWHSGIALRLELFGCRVTDAPCSNMLGMLSGLIADSQISASSTQEYLWSPSAARLVSSRSGWFPRIPQAQPGEEWLQVDLGTPKTVKGVIIQGARGGDSITAVEARAFVRKFKVSYSLNGKDWEYIQDPRTQQPKLFEGNMHYDTPDIRRFDPIPAQYVRVYPERWSPAGIGMRLEVLGCDWTDSKPTVETLGPTVKSEETTTPYPTEEEATECGENCSFEDDKDLQLPSGFNCNFDFLEEPCGWMYDHAKWLRTTWASSSSPNDRTFPDDRNFLRLQSDSQREGQYARLISPPVHLPRSPVCMEFQYQATGGRGVALQVVREASQESKLLWVIREDQGGEWKHGRIILPSYDMEYQIVFEGVIGKGRSGEIAIDDIRISTDVPLENCMEPISAFAGENFKVDIPEIHEREGYEDEIDDEYEVDWSNSSSATSGSGAPSTDKEKSWLYTLDPILITIIAMSSLGVLLGATCAGLLLYCTCSYSGLSSRSCTTLENYNFELYDGLKHKVKMNHQKCCSEA

SEQ ID NO: 291 - DNA, 4148 bp, Homo sapiens
cagagatcgcgagcgaggcaccagcctgcagccggcccccagcacatcctcagccgcacagacactcggcgaggtggaggtgagggcgggcgccagcgaactcggagaggggctcgctcactcccaggcgatcccagccgccaccgccgccgcaccagcagcagcaacagcagcagcagcttccttcctcagactcccctcgagaggctggccaagcgggtgtagccgttgggggaggctcccgccgggggaacccggcgaggacaagagcagggcggccgccttccactcgggctgtccggcggcggctgcctccgcccgtgtgtccgtcaagggtgccgcgggatgtgtgtcagtttacgcctctgagatcacacagctgcctgggggccgtgtgatgcccaaggcaagtcttggttttaattattattattatcattattgttacgcttggctttcgggaaatactcgtgatatttgtaggataaaggaaatgacactttgaggaactggagagaacatatatgcgttttgtttttaagaggaaaaccgtgttctcttcccggcttgttccctctttgctgatttcaggagctactctcctcctggtgaggtggaaattccagcaagaatagaggtgaagacaagccaccaggactcaggagggaaacgctgaccattagaaacctctgcataagacgttgtaaggaggaaaataaaagagagaaaaacacaaagatttaaacaagaaacctacgaacccagctctggaaagagccaccttctccaaaatggatatgtttcctctcacctgggttttcttagccctctacttttcaagacaccaagtgagaggccaaccagacccaccgtgcggaggtcgtttgaattccaaagatgctggctatatcacctctcccggttacccccaggactacccctcccaccagaactgcgagtggattgtttacgcccccgaacccaaccagaagattgtcctcaacttcaaccctcactttgaaatcgagaagcacgactgcaagtatgactttatcgagattcgggatggggacagtgaatccgcagacctcctgggcaaacactgtgggaacatcgccccgcccaccatcatctcctcgggctccatgctctacatcaagttcacctccgactacgcccggcagggggcaggcttctctctgcgctacgagatcttcaagacaggctctgaagattgctcaaaaaacttcacaagccccaacgggaccatcgaatctcctgggtttcctgagaagtatccacacaacttggactgcacctttaccatcctggccaaacccaagatggagatcatcctgcagttcctgatctttgacctggagcatgaccctttgcaggtgggagagggggactgcaagtacgattggctggacatctgggatggcattccacatgttggccccctgattggcaagtactgtgggaccaaaacaccctctgaacttcgttcatcgacggggatcctctccctgacctttcacacggacatggcggtggccaaggatggcttctctgcgcgttactacctggtccaccaagagccactagagaactttcagtgcaatgttcctctgggcatggagtctggccggattgctaatgaacagatcagtgcctcatctacctactctgatgggaggtggacccctcaacaaagccggctccatggtgatgacaatggctggacccccaacttggattccaacaaggagtatctccaggtggacctgcgctttttaaccatgctcacggccatcgcaacacagggagcgatttccagggaaacacagaatggctactatgtcaaatcctacaagctggaagtcagcactaatggagaggactggatggtgtaccggcatggcaaaaaccacaaggtatttcaagccaacaacgatgcaactgaggtggttctgaacaagctccacgctccactgctgacaaggtttgttagaatccgccctcagacctggcactcaggtatcgccctccggctggagctcttcggctgccgggtcacagatgctccctgctccaacatgctggggatgctctcaggcctcattgcagactcccagatctccgcctcttccacccaggaatacctctggagccccagtgcagcccgcctggtcagcagccgctcgggctggttccctcgaatccctcaggcccagcccggtgaggagtggcttcaggtagatctgggaacacccaagacagtgaaaggtgtcatcatccagggagcccgcggaggagacagtatcactgctgtggaagccagagcatttgtgcgcaagttcaaagtctcctacagcctaaacggcaaggactgggaatacattcaggaccccaggacccagcagccaaagctgttcgaagggaacatgcactatgacacccctgacatccgaaggtttgaccccattccggcacagtatgtgcgggtatacccggagaggtggtcgccggcggggattgggatgcggctggaggtgctgggctgtgactggacagactccaagcccacggtagagacgctgggacccactgtgaagagcgaagagacaaccaccccctaccccaccgaagaggaggccacagagtgtggggagaactgcagctttgaggatgacaaagatttgcagctcccttcgggattcaattgcaacttcgatttcctcgaggagccctgtggttggatgtatgaccatgccaagtggctccggaccacctgggccagcagctccagcccaaacgaccggacgtttccagatgacaggaatttcttgcggctgcagagtgacagccagagagagggccagtatgcccggctcatcagcccccctgtccacctgccccgaagcccggtgtgcatggagttccagtaccaggccacgggcggccgcggggtggcgctgcaggtggtgcgggaagccagccaggagagcaagttgctgtgggtcatccgtgaggaccagggcggcgagtggaagcacgggcggatcatcctgcccagctacgacatggagtaccagattgtgttcgagggagtgatagggaaaggacgttccggagagattgccattgatgacattcggataagcactgatgtcccactggagaactgcatggaacccatctcggcttttgcagggggcaccctcctgccagggaccgagcccacagtggacacggtgcccatgcagcccatcccagcctactggtattacgtaatggccgccgggggcgccgtgctggtgctggtctccgtcgcgctggccctggtgctccactaccaccggttccgctatgcggccaagaagaccgatcactccatcacctacaaaacctcccactacaccaacggggcccctctggcggtggagcccaccctaaccattaagctagagcaagaccgtggctcgcactgctgagggccgaagcaagaacagcacccaaaacaaacgagaaagactgcaaacatgttgcctcgattttgcacttttttctcctcgcctagtttctgtgtgaactctcagacatctctttcccggatccccaaccctgagcactcttatcaatcccaaccatcctccttgggttcattttggtttctggtttttctttttcctttttgttgattccaaaccaacaaacccaactctaatgctgcatcttggactatccgaagagatccacccccaagcactccacaactcaaggctcagctggttttgttccagagactggttcgcttgttttttccccttgccttatcccatacctcctctcagtgggcagtctgccaggagacgtgaggggaagcctggatctgtgtgtatgtacatagtagacatgtgtgtgtgtgaatagctctctgtgtgtgggtgtgtgagagagcggctggttcattgtgtgtgtgtttgggcgaggggtgagtgttcagagagggcccctttaactcttatgttacttctcctggggtacattttacaagaaaataatatactgtacaagttttgtttacttggagaagagattgaagctttttgttgccttatctaaaaaaaaaaaaaaaaaaaaaa

SEQ ID NO: 292 - protein, 901 aa, Homo sapiens
MDMFPLTWVFLALYFSRHQVRGQPDPPCGGRLNSKDAGYITSPGYPQDYPSHQNCEWIVYAPEPNQKIVLNFNPHFEIEKHDCKYDFIEIRDGDSESADLLGKHCGNIAPPTIISSGSMLYIKFTSDYARQGAGFSLRYEIFKTGSEDCSKNFTSPNGTIESPGFPEKYPHNLDCTFTILAKPKMEIILQFLIFDLEHDPLQVGEGDCKYDWLDIWDGIPHVGPLIGKYCGTKTPSELRSSTGILSLTFHTDMAVAKDGFSARYYLVHQEPLENFQCNVPLGMESGRIANEQISASSTYSDGRWTPQQSRLHGDDNGWTPNLDSNKEYLQVDLRFLTMLTAIATQGAISRETQNGYYVKSYKLEVSTNGEDWMVYRHGKNHKVFQANNDATEVVLNKLHAPLLTRFVRIRPQTWHSGIALRLELFGCRVTDAPCSNMLGMLSGLIADSQISASSTQEYLWSPSAARLVSSRSGWFPRIPQAQPGEEWLQVDLGTPKTVKGVIIQGARGGDSITAVEARAFVRKFKVSYSLNGKDWEYIQDPRTQQPKLFEGNMHYDTPDIRRFDPIPAQYVRVYPERWSPAGIGMRLEVLGCDWTDSKPTVETLGPTVKSEETTTPYPTEEEATECGENCSFEDDKDLQLPSGFNCNFDFLEEPCGWMYDHAKWLRTTWASSSSPNDRTFPDDRNFLRLQSDSQREGQYARLISPPVHLPRSPVCMEFQYQATGGRGVALQVVREASQESKLLWVIREDQGGEWKHGRIILPSYDMEYQIVFEGVIGKGRSGEIAIDDIRISTDVPLENCMEPISAFAGGTLLPGTEPTVDTVPMQPIPAYWYYVMAAGGAVLVLVSVALALVLHYHRFRYAAKKTDHSITYKTSHYTNGAPLAVEPTLTIKLEQDRGSHC

SEQ ID NO: 293 - DNA, 6605 bp, Homo sapiens
cagagatcgcgagcgaggcaccagcctgcagccggcccccagcacatcctcagccgcacagacactcggcgaggtggaggtgagggcgggcgccagcgaactcggagaggggctcgctcactcccaggcgatcccagccgccaccgccgccgcaccagcagcagcaacagcagcagcagcttccttcctcagactcccctcgagaggctggccaagcgggtgtagccgttgggggaggctcccgccgggggaacccggcgaggacaagagcagggcggccgccttccactcgggctgtccggcggcggctgcctccgcccgtgtgtccgtcaagggtgccgcgggatgtgtgtcagtttacgcctctgagatcacacagctgcctgggggccgtgtgatgcccaaggcaagtcttggttttaattattattattatcattattgttacgcttggctttcgggaaatactcgtgatatttgtaggataaaggaaatgacactttgaggaactggagagaacatatatgcgttttgtttttaagaggaaaaccgtgttctcttcccggcttgttccctctttgctgatttcaggagctactctcctcctggtgaggtggaaattccagcaagaatagaggtgaagacaagccaccaggactcaggagggaaacgctgaccattagaaacctctgcataagacgttgtaaggaggaaaataaaagagagaaaaacacaaagatttaaacaagaaacctacgaacccagctctggaaagagccaccttctccaaaatggatatgtttcctctcacctgggttttcttagccctctacttttcaagacaccaagtgagaggccaaccagacccaccgtgcggaggtcgtttgaattccaaagatgctggctatatcacctctcccggttacccccaggactacccctcccaccagaactgcgagtggattgtttacgcccccgaacccaaccagaagattgtcctcaacttcaaccctcactttgaaatcgagaagcacgactgcaagtatgactttatcgagattcgggatggggacagtgaatccgcagacctcctgggcaaacactgtgggaacatcgccccgcccaccatcatctcctcgggctccatgctctacatcaagttcacctccgactacgcccggcagggggcaggcttctctctgcgctacgagatcttcaagacaggctctgaagattgctcaaaaaacttcacaagccccaacgggaccatcgaatctcctgggtttcctgagaagtatccacacaacttggactgcacctttaccatcctggccaaacccaagatggagatcatcctgcagttcctgatctttgacctggagcatgaccctttgcaggtgggagagggggactgcaagtacgattggctggacatctgggatggcattccacatgttggccccctgattggcaagtactgtgggaccaaaacaccctctgaacttcgttcatcgacggggatcctctccctgacctttcacacggacatggcggtggccaaggatggcttctctgcgcgttactacctggtccaccaagagccactagagaactttcagtgcaatgttcctctgggcatggagtctggccggattgctaatgaacagatcagtgcctcatctacctactctgatgggaggtggacccctcaacaaagccggctccatggtgatgacaatggctggacccccaacttggattccaacaaggagtatctccaggtggacctgcgctttttaaccatgctcacggccatcgcaacacagggagcgatttccagggaaacacagaatggctactatgtcaaatcctacaagctggaagtcagcactaatggagaggactggatggtgtaccggcatggcaaaaaccacaaggtatttcaagccaacaacgatgcaactgaggtggttctgaacaagctccacgctccactgctgacaaggtttgttagaatccgccctcagacctggcactcaggtatcgccctccggctggagctcttcggctgccgggtcacagatgctccctgctccaacatgctggggatgctctcaggcctcattgcagactcccagatctccgcctcttccacccaggaatacctctggagccccagtgcagcccgcctggtcagcagccgctcgggctggttccctcgaatccctcaggcccagcccggtgaggagtggcttcaggtagatctgggaacacccaagacagtgaaaggtgtcatcatccagggagcccgcggaggagacagtatcactgctgtggaagccagagcatttgtgcgcaagttcaaagtctcctacagcctaaacggcaaggactgggaatacattcaggaccccaggacccagcagccaaagctgttcgaagggaacatgcactatgacacccctgacatccgaaggtttgaccccattccggcacagtatgtgcgggtatacccggagaggtggtcgccggcggggattgggatgcggctggaggtgctgggctgtgactggacagactccaagcccacggtagagacgctgggacccactgtgaagagcgaagagacaaccaccccctaccccaccgaagaggaggccacagagtgtggggagaactgcagctttgaggatgacaaagatttgcagctcccttcgggattcaattgcaacttcgatttcctcgaggagccctgtggttggatgtatgaccatgccaagtggctccggaccacctgggccagcagctccagcccaaacgaccggacgtttccagatgacaggaatttcttgcggctgcagagtgacagccagagagagggccagtatgcccggctcatcagcccccctgtccacctgccccgaagcccggtgtgcatggagttccagtaccaggccacgggcggccgcggggtggcgctgcaggtggtgcgggaagccagccaggagagcaagttgctgtgggtcatccgtgaggaccagggcggcgagtggaagcacgggcggatcatcctgcccagctacgacatggagtaccagattgtgttcgagggagtgatagggaaaggacgttccggagagattgccattgatgacattcggataagcactgatgtcccactggagaactgcatggaacccatctcggcttttgcagatgaatacgaggtggactggagcaattcttcttctgcaacctcagggtctggcgccccctcgaccgacaaagaaaagagctggctgtacaccctggatcccatcctcatcaccatcatcgccatgagctcactgggcgtcctcctgggggccacctgtgcaggcctcctgctctactgcacctgttcctactcgggcctgagctcccgaagctgcaccacactggagaactacaacttcgagctctacgatggccttaagcacaaggtcaagatgaaccaccaaaagtgctgctccgaggcatgacggattgcacctgaatcctatctgacgtttcattccagcaagaggggctggggaagattacatttttttttcctttggaaactgaatgccataatctcgatcaaaccgatccagaataccgaaggtatggacaggacagaaaagcgagtcgcaggaggaagggagatgcagccgcacaggggatgattaccctcctaggaccgcggtggctaagtcattgcaggaacggggctgtgttctctgctgggacaaaacaggagctcatctctttggggtcacagttctattttgtttgtgagtttgtattattattattattattattattattatattttatttctttggtctgtgagcaactcaaagaggcagaagaggagaatgacttttccagaatagaagtggagcagtgatcattattctccgctttctctttctaatcaacacttgaaaagcaaagtgtcttttcagcctttccatctttacaaataaaactcaaaaaagccgtccagcttatcccatcctctgattgtcttctgacttaagggatttactgtggtgtaggttctgccagccaaccctacaagctgccatttccagtcctagcatttaagtaggatgttgttgcctttaacttttcttatccaggggaaaattgccattttagggtcagcatgaacagctctttcttgtatgcgatttaaaacaaactggaaaggaaacttcacacgtcaaaatccatagaagcgcctggacgaggcttaaagtgctttgtgagtgaataggagccattcgctaattctagacccacagtgtctggtggtggggcttcccttgtggggcttctggtggtggttttgccttttcttttccctcctccatgttcttctaaaacatatacatatatacatacacacatacacatattcttcaggtctctaagcccctggaagcagcattgtgtgatattctcagaggcaggggaaaatagagggaaaaatagagactattggtatgttctccccatcagcgagttattgtaactggtcaccactggacgggaaggagaacagaggagagggaaagagaagcccaacctctgtgatcatatgagggccaaggctgagcagtgtagacagagaccctttgaaatgcatttgtctctcaaatagactagtaaacaccgacttctcctttgggttacaaacaccatttcaacctttcgggagagtcagagctaggatgtacaagaactgattctaaccagaagtccgcaagtactgtggacaagaatgcttaaccatgctgcttcagccttgagagacctaggttcttacacatatgcacacacgcatacacacatgcacgcacacacacatacacacatgcacgcacgcacgcatgcacaccaatttatgtttttattaagtgccttgaaaaaatgaagaaaaatgtattttccctttatgtaaaaattagtgaatatcttatgaattaaggcattcctctttccctaaccccgatggctccattcccaagtaccccaactcactgctgatcctattaaaggaatgagtcctgctacccgagtggtagtcatagccctagatgactctcaactactcttcaaagggaggcatcaggaatagaatgaaactgtgtgaaggataagattgttcgcatcaagatccaaatcttgatttcatattaacgcctaaggattgcctgtgtgctggaaatatatttgaaactcaaccagtatgcccagcctattgcatatcattgtcagaccatttttgctgctgtggtcacccacgatttcatttgtcttatacccaggtgaaaggggaagggtgaatgggactggctggttcctttaaatgttaacttatggaaatgctagttcaaatggtaatgtcacagtgttttgtatgcagagagcaagagttcaaccaacagctgtttattcatgtgtgtgtgtctttgctgctttgagttctctgtatctactgtgtatgtgaatggtcatgtgggactcagtggtggtgttgtgactttgacctagggtccgagtgtcacagctgatcttggcactcggcactcattggcacagtggtagttagaggtgaaaagtagagctgtcaagcccaagggcttagctttagggctcctcctgagttcggcccacagtagaagcaagattttaactagccccttttcctcttcaccctcccatgatgcgcagtgttcagaaagctggtaagtcctagggatttccagaagtagcctgcagaagaaggtaagtttgaaagccactccaggggtcctgatgctgtcatgctcagtgagccattttacagttctccaaagtctagccctgtttcggacctgcacttcacctctaagttatgtacaactcaacctgcatccctctaaaagtcctatatccatattcaccattggctaatttgaggccctgagtgggccttgaatgctaaaaagaagcagggtacgcagggctacatgtagataccacaccaaggctggaggctggtctgtcataagacagaaagaaagacgctgggcccaattttgacttggccaggggacaccttggtgtgtttgttatctttatctgtgggtaggctagctgacccatctccttgagtcattccctttgggaaaccccactgccagtattgatctcctttttgccttgtactgaatgacacattacctccacactctcccggactaggtggtcaacagggccacagggttgctttctgtctttggtggggcaggggagttgacagggatgagggtccaaggaataagcatgaatgacaagaaaacaagggaaagagttaacctgtcacatagcaggttaactttttcagggtttgcagttagaggtattcgaccattcactggctgagccagatcacgggaacttgagagcttttactgtgattcttcaatgtaaaaaataaacaacaatgtcaaactgtgtttatatgatttgtataaagcctttttaagattactatttaaataaacattataccagagataaaaaaaaaa

SEQ ID NO: 294 - protein, 909 aa, Homo sapiens
MDMFPLTWVFLALYFSRHQVRGQPDPPCGGRLNSKDAGYITSPGYPQDYPSHQNCEWIVYAPEPNQKIVLNFNPHFEIEKHDCKYDFIEIRDGDSESADLLGKHCGNIAPPTIISSGSMLYIKFTSDYARQGAGFSLRYEIFKTGSEDCSKNFTSPNGTIESPGFPEKYPHNLDCTFTILAKPKMEIILQFLIFDLEHDPLQVGEGDCKYDWLDIWDGIPHVGPLIGKYCGTKTPSELRSSTGILSLTFHTDMAVAKDGFSARYYLVHQEPLENFQCNVPLGMESGRIANEQISASSTYSDGRWTPQQSRLHGDDNGWTPNLDSNKEYLQVDLRFLTMLTAIATQGAISRETQNGYYVKSYKLEVSTNGEDWMVYRHGKNHKVFQANNDATEVVLNKLHAPLLTRFVRIRPQTWHSGIALRLELFGCRVTDAPCSNMLGMLSGLIADSQISASSTQEYLWSPSAARLVSSRSGWFPRIPQAQPGEEWLQVDLGTPKTVKGVIIQGARGGDSITAVEARAFVRKFKVSYSLNGKDWEYIQDPRTQQPKLFEGNMHYDTPDIRRFDPIPAQYVRVYPERWSPAGIGMRLEVLGCDWTDSKPTVETLGPTVKSEETTTPYPTEEEATECGENCSFEDDKDLQLPSGFNCNFDFLEEPCGWMYDHAKWLRTTWASSSSPNDRTFPDDRNFLRLQSDSQREGQYARLISPPVHLPRSPVCMEFQYQATGGRGVALQVVREASQESKLLWVIREDQGGEWKHGRIILPSYDMEYQIVFEGVIGKGRSGEIAIDDIRISTDVPLENCMEPISAFADEYEVDWSNSSSATSGSGAPSTDKEKSWLYTLDPILITIIAMSSLGVLLGATCAGLLLYCTCSYSGLSSRSCTTLENYNFELYDGLKHKVKMNHQKCCSEA

SEQ ID NO: 295 - DNA, 2610 bp, Homo sapiens
cctctggcggcccgccgtcccagacgcgggaagagcttggccggtttcgagtcgctggcctgcagcttccctgtggtttcccgaggcttccttgcttcccgctctgcgaggagcctttcatccgaaggcgggacgatgccggataatcggcagccgaggaaccggcagccgaggatccgctccgggaacgagcctcgttccgcgcccgccatggaaccggatggtcgcggtgcctgggcccacagtcgcgccgcgctcgaccgcctggagaagctgctgcgctgctcgcgttgtactaacattctgagagagcctgtgtgtttaggaggatgtgagcacatcttctgtagtaattgtgtaagtgactgcattggaactggatgtccagtgtgttacaccccggcctggatacaagacttgaagataaatagacaactggacagcatgattcaactttgtagtaagcttcgaaatttgctacatgacaatgagctgtcagatttgaaagaagataaacctaggaaaagtttgtttaatgatgcaggaaacaagaagaattcaattaaaatgtggtttagccctcgaagtaagaaagtcagatatgttgtgagtaaagcttcagtgcaaacccagcctgcaataaaaaaagatgcaagtgctcagcaagactcatatgaatttgtttccccaagtcctcctgcagatgtttctgagagggctaaaaaggcttctgcaagatctggaaaaaagcaaaaaaagaaaactttagctgaaatcaaccaaaaatggaatttagaggcagaaaaagaagatggtgaatttgactccaaagaggaatctaagcaaaagctggtatccttctgtagccaaccatctgttatctccagtcctcagataaatggtgaaatagacttactagcaagtggctccttgacagaatctgaatgttttggaagtttaactgaagtctctttaccattggctgagcaaatagagtctccagacactaagagcaggaatgaagtagtgactcctgagaaggtctgcaaaaattatcttacatctaagaaatctttgccattagaaaataatggaaaacgtggccatcacaatagactttccagtcccatttctaagagatgtagaaccagcattctgagcaccagtggagattttgttaagcaaacggtgccctcagaaaatataccattgcctgaatgttcttcaccaccttcatgcaaacgtaaagttggtggtacatcagggaggaaaaacagtaacatgtccgatgaattcattagtctttcaccaggtacaccaccttctacattaagtagttcaagttacaggcgagtgatgtctagtccctcagcaatgaagctgttgcccaatatggctgtgaaaagaaatcatagaggagagactttgctccatattgcttctattaagggcgacataccttctgttgaataccttttacaaaatggaagtgatccaaatgttaaagaccatgctggatggacaccattgcatgaagcttgcaatcatgggcacctgaaggtagtggaattattgctccagcataaggcattggtgaacaccaccgggtatcaaaatgactcaccacttcacgatgcagccaagaatgggcatgtggatatagtcaagctgttactttcctatggagcctccagaaatgctgttaatatatttggtctgcggcctgtcgattatacagatgatgaaagtatgaaatcgctattgctgctaccagagaagaatgaatcatcctcagctagccactgctcagtaatgaacactgggcagcgtagggatggacctcttgtacttataggcagtgggctgtcttcagaacaacagaaaatgctcagtgagcttgcagtaattcttaaggctaaaaaatatactgagtttgacagtacagtaactcatgttgttgttcctggtgatgcagttcaaagtaccttgaagtgtatgcttgggattctcaatggatgctggattctaaaatttgaatgggtaaaagcatgtctacgaagaaaagtatgtgaacaggaagaaaagtatgaaattcctgaaggtccacgcagaagcaggctcaacagagaacagctgttgccaaagctgtttgatggatgctacttctatttgtggggaaccttcaaacaccatccaaaggacaaccttattaagctcgtcactgcaggtgggggccagatcctcagtagaaagcccaagccagacagtgacgtgactcagaccatcaatacagtcgcataccatgcgagacccgattctgatcagcgcttctgcacacagtatatcatctatgaagatttgtgtaattatcacccagagagggttcggcagggcaaagtctggaaggctccttcgagctggtttatagactgtgtgatgtcctttgagttgcttcctcttgacagctgaatattataccagatgaacatttcaaattgaatttgcacggtttgtgagagcccagtcattgtactgtttttaatgttcacatttttacaaataggtagagtcattcatatttgtctttgaatcaaaaaaaaaaaaaaaaaa

SEQ ID NO: 296 - protein, 777 aa, Homo sapiens
MPDNRQPRNRQPRIRSGNEPRSAPAMEPDGRGAWAHSRAALDRLEKLLRCSRCTNILREPVCLGGCEHIFCSNCVSDCIGTGCPVCYTPAWIQDLKINRQLDSMIQLCSKLRNLLHDNELSDLKEDKPRKSLFNDAGNKKNSIKMWFSPRSKKVRYVVSKASVQTQPAIKKDASAQQDSYEFVSPSPPADVSERAKKASARSGKKQKKKTLAEINQKWNLEAEKEDGEFDSKEESKQKLVSFCSQPSVISSPQINGEIDLLASGSLTESECFGSLTEVSLPLAEQIESPDTKSRNEVVTPEKVCKNYLTSKKSLPLENNGKRGHHNRLSSPISKRCRTSILSTSGDFVKQTVPSENIPLPECSSPPSCKRKVGGTSGRKNSNMSDEFISLSPGTPPSTLSSSSYRRVMSSPSAMKLLPNMAVKRNHRGETLLHIASIKGDIPSVEYLLQNGSDPNVKDHAGWTPLHEACNHGHLKVVELLLQHKALVNTTGYQNDSPLHDAAKNGHVDIVKLLLSYGASRNAVNIFGLRPVDYTDDESMKSLLLLPEKNESSSASHCSVMNTGQRRDGPLVLIGSGLSSEQQKMLSELAVILKAKKYTEFDSTVTHVVVPGDAVQSTLKCMLGILNGCWILKFEWVKACLRRKVCEQEEKYEIPEGPRRSRLNREQLLPKLFDGCYFYLWGTFKHHPKDNLIKLVTAGGGQILSRKPKPDSDVTQTINTVAYHARPDSDQRFCTQYIIYEDLCNYHPERVRQGKVWKAPSSWFIDCVMSFELLPLDS

SEQ ID NO: 297 - DNA, 6364 bp, Homo sapiens
ctgggatagaagcggcaggagcagcgttggcaccggcgaaccatggctgggattttctatttcgccctattttcgtgtctcttcgggatttgcgacgctgtcacaggttccagggtataccccgcgaatgaagttaccttattggattccagatctgttcagggagaacttgggtggatagcaagccctctggaaggagggtgggaggaagtgagtatcatggatgaaaaaaatacaccaatccgaacctaccaagtgtgcaatgtgatggaacccagccagaataactggctacgaactgattggatcacccgagaaggggctcagagggtgtatattgagattaaattcaccttgagggactgcaatagtcttccgggcgtcatggggacttgcaaggagacgtttaacctgtactactatgaatcagacaacgacaaagagcgtttcatcagagagaaccagtttgtcaaaattgacaccattgctgctgatgagagcttcacccaagtggacattggtgacagaatcatgaagctgaacaccgagatccgggatgtagggccattaagcaaaaaggggttttacctggcttttcaggatgtgggggcctgcatcgccctggtatcagtccgtgtgttctataaaaagtgtccactcacagtccgcaatctggcccagtttcctgacaccatcacaggggctgatacgtcttccctggtggaagttcgaggctcctgtgtcaacaactcagaagagaaagatgtgccaaaaatgtactgtggggcagatggtgaatggctggtacccattggcaactgcctatgcaacgctgggcatgaggagcggagcggagaatgccaagcttgcaaaattggatattacaaggctctctccacggatgccacctgtgccaagtgcccaccccacagctactctgtctgggaaggagccacctcgtgcacctgtgaccgaggctttttcagagctgacaacgatgctgcctctatgccctgcacccgtccaccatctgctcccctgaacttgatttcaaatgtcaacgagacatctgtgaacttggaatggagtagccctcagaatacaggtggccgccaggacatttcctataatgtggtatgcaagaaatgtggagctggtgaccccagcaagtgccgaccctgtggaagtggggtccactacaccccacagcagaatggcttgaagaccaccaaagtctccatcactgacctcctagctcataccaattacacctttgaaatctgggctgtgaatggagtgtccaaatataaccctaacccagaccaatcagtttctgtcactgtgaccaccaaccaagcagcaccatcatccattgctttggtccaggctaaagaagtcacaagatacagtgtggcactggcttggctggaaccagatcggcccaatggggtaatcctggaatatgaagtcaagtattatgagaaggatcagaatgagcgaagctatcgtatagttcggacagctgccaggaacacagatatcaaaggcctgaaccctctcacttcctatgttttccacgtgcgagccaggacagcagctggctatggagacttcagtgagcccttggaggttacaaccaacacagtgccttcccggatcattggagatggggctaactccacagtccttctggtctctgtctcgggcagtgtggtgctggtggtaattctcattgcagcttttgtcatcagccggagacggagtaaatacagtaaagccaaacaagaagcggatgaagagaaacatttgaatcaaggtgtaagaacatatgtggacccctttacgtacgaagatcccaaccaagcagtgcgagagtttgccaaagaaattgacgcatcctgcattaagattgaaaaagttataggagttggtgaatttggtgaggtatgcagtgggcgtctcaaagtgcctggcaagagagagatctgtgtggctatcaagactctgaaagctggttatacagacaaacagaggagagacttcctgagtgaggccagcatcatgggacagtttgaccatccgaacatcattcacttggaaggcgtggtcactaaatgtaaaccagtaatgatcataacagagtacatggagaatggctccttggatgcattcctcaggaaaaatgatggcagatttacagtcattcagctggtgggcatgcttcgtggcattgggtctgggatgaagtatttatctgatatgagctatgtgcatcgtgatctggccgcacggaacatcctggtgaacagcaacttggtctgcaaagtgtctgattttggcatgtcccgagtgcttgaggatgatccggaagcagcttacaccaccaggggtggcaagattcctatccggtggactgcgccagaagcaattgcctatcgtaaattcacatcagcaagtgatgtatggagctatggaatcgttatgtgggaagtgatgtcgtacggggagaggccctattgggatatgtccaatcaagatgtgattaaagccattgaggaaggctatcggttaccccctccaatggactgccccattgcgctccaccagctgatgctagactgctggcagaaggagaggagcgacaggcctaaatttgggcagattgtcaacatgttggacaaactcatccgcaaccccaacagcttgaagaggacagggacggagagctccagacctaacactgccttgttggatccaagctcccctgaattctctgctgtggtatcagtgggcgattggctccaggccattaaaatggaccggtataaggataacttcacagctgctggttataccacactagaggctgtggtgcacgtgaaccaggaggacctggcaagaattggtatcacagccatcacgcaccagaataagattttgagcagtgtccaggcaatgcgaacccaaatgcagcagatgcacggcagaatggttcccgtctgagccagtactgaataaactcaaaactcttgaaattagtttacctcatccatgcactttaattgaagaactgcactttttttacttcgtcttcgccctctgaaattaaagaaatgaaaaaaaaaaacaatatctgcagcgttgcttggtgcacagattgctgaaactgtggggcttacagaaatgactgccggtcatttgaatgagacctggaacaaatcgtttctcagaagtacttttctgttcatcaccagtctgtaaaatacatgtacctatagaaatagaacactgcctctgagttttgatgctgtatttgctgccagacactgagcttctgagacatccctgattctctctccatttggaattacaaccattgtattttgtttgtggcataaattacagtcatctgtctttcactggaatgaagaccatgcctaggaacattttttaaggactcagctgtggcttttagggcttggttcataccatgggggaaaaaaaagtcctaggagaaagcgacgtggctcattagtgttgcctcttcagtgctcaagccgcctggtggattcctatgacacagggggcctggaaagaaagggaaagtggatttaaaatatatatatacgtaacccaagccccataacccctaactggacaaatgaggtctgtttctttgggcctgaggctgtgccatataaagtcttattttgggactttacaaacttgtcctaactatcttgtggatagtgggctgtgacaatctggaatagagaacgttcacacttcgctcctttaaagaagcgaccccagatctgcaagggagtagattctgctatcttggcctcacagcccttcctgttgattacaaagcccgtggaagaaaacagaacacaccctcctcagttccgtctaaatgtgtttcttctgcttcaattacaccagttctggggcaaagacactgatgaaacaacacccatacctgaaaagaataaatgtgtgactttcaaatcccctttcgcagtgaaagaaacagcaaacacttaagattcagcatctgttctccagttgcactgaggaatgcactgtctcgcagcaccagctctgcagagcccttgccccagactctttgcggttttatttatatgtatttccatatttcattcctgtgtgtcactgctgcattggtgtggcagcaagtgaccaaatgctacaggtcttactatggacaccaggtcaggtgcaaccacacaaaacaaagccagttccatgagctgcctatgatatgcattgcggaagtaacattttacccagggtgtgccattgcagtgatataaatatatttttttcttagactaaatatgagctgactatctcttttgatgtgtgtacataggtgtgagtgtgtgtgtatgcgtgcctgtctgtgtgcgggtgtgtgtatgtgcatagcctcatgcttaggactacccatgaatgttgtggaatgctacacctggagagttctggttttccaccagtttcaagatgaagaactacatgatacagtggacctggagaccatccccttggaaagacaacccagagatgttcagcatcctgtatctacacgcatcctgtatctacacgtgtattttgtagctgtcacactaaccttaataagaattctacagctttggacagaggcattttcaccttaatggtgaagtaatttaaaatataaatccattcaggtgacaacccatcatcaaaattacaaattttctgattgaactcatctgaatcatcagttccttgatggagagagagaaggagatggaatgtgtctggtaaccccaaatggagtacaagtagcctttgttttcctgcataaatggacttgttgaatgcgaacgaatatatgcaattcatatacttttggagatgaacgtagatatgtgtgtcagctttgagatggtgtgtcctggattaatactttgtctcccaatatcacagaaaaatacatgccagtgactcttgaggttaaggtagttgggatgaaatggcctcaggcaatttcacattccctaattacctggaaagttctacagtaattaatatgcagctaactcctgttgccctcacaagagcatcagccttctagaatcggagctccggagtgtgaagattcagtattgatatgatatgtataccaaactccagccaacttactgccatttttcataatctgagtggctgccttgcttatcctaagctgtggttgcagaaaccgtggccatttatataagctataacatcaaatcagggaaaaatgaggaaaaaaaatagattctgaaccatttattgttgaataagtagagaaaatcatcaataaatatttattacattctgacagggtgtgtggcattgtgttctatgccagagtgacaaagttgattcacccctttttggggaccttaatatattttttaagggatgtgcctatgcattgatgcctgaaaaatatgtataaagaaatgaggttgactcttctgagcagttcatcttttccagaggtaagggtaggaggccaacttcagggtctgggtctgagcccgtgggcaagccctggccgagtgagctccaatgctaactcatgtgccgatctctagagcagtgggaaactaccccgctgcaccaaatcaagtagcttcaccttgtgtatgcaggccccaagttattttttagcaatcttacgagtgaaatgttctggtgggttgaaaaacgttcttattttaaagaaaggttgtgctcgctacactgctggtgtgtgcattctgagacctcttgtattcaatctgtgaaggatatgtgtattaatccgtacacccgtatagcctcaatatttgtctgaagacacttaaattctgacccataaaggaaagttctagaagcaatattttcacttatttaacattctccaaacaacatcaagcattgatacacactgaagagtgcgtttattttttgtatcactctaagtatgttggaatatgcaaggactgtggttcaaattagaatgtataaggcatattataatttagttcatactgaataagaaattaacagaacattgttcggttcacacgttccaaactttgagtgatttctggagttagacatagattttctattttgttttaatttgtcaaggtatttttcttcccttcatgaactttaggtacacataacttatgtcatttatttatggtcttttatacctagtttgtaaaattgtaaaatagcaaactaaatgcaaagagtttgcatttgaaaataataaagtagttgccgtatacaaccctgcaaaaaaaaaaaaaaaaaa

SEQ ID NO: 298 - protein, 986 aa, Homo sapiens
MAGIFYFALFSCLFGICDAVTGSRVYPANEVTLLDSRSVQGELGWIASPLEGGWEEVSIMDEKNTPIRTYQVCNVMEPSQNNWLRTDWITREGAQRVYIEIKFTLRDCNSLPGVMGTCKETFNLYYYESDNDKERFIRENQFVKIDTIAADESFTQVDIGDRIMKLNTEIRDVGPLSKKGFYLAFQDVGACIALVSVRVFYKKCPLTVRNLAQFPDTITGADTSSLVEVRGSCVNNSEEKDVPKMYCGADGEWLVPIGNCLCNAGHEERSGECQACKIGYYKALSTDATCAKCPPHSYSVWEGATSCTCDRGFFRADNDAASMPCTRPPSAPLNLISNVNETSVNLEWSSPQNTGGRQDISYNVVCKKCGAGDPSKCRPCGSGVHYTPQQNGLKTTKVSITDLLAHTNYTFEIWAVNGVSKYNPNPDQSVSVTVTTNQAAPSSIALVQAKEVTRYSVALAWLEPDRPNGVILEYEVKYYEKDQNERSYRIVRTAARNTDIKGLNPLTSYVFHVRARTAAGYGDFSEPLEVTTNTVPSRIIGDGANSTVLLVSVSGSVVLVVILIAAFVISRRRSKYSKAKQEADEEKHLNQGVRTYVDPFTYEDPNQAVREFAKEIDASCIKIEKVIGVGEFGEVCSGRLKVPGKREICVAIKTLKAGYTDKQRRDFLSEASIMGQFDHPNIIHLEGVVTKCKPVMIITEYMENGSLDAFLRKNDGRFTVIQLVGMLRGIGSGMKYLSDMSYVHRDLAARNILVNSNLVCKVSDFGMSRVLEDDPEAAYTTRGGKIPIRWTAPEAIAYRKFTSASDVWSYGIVMWEVMSYGERPYWDMSNQDVIKAIEEGYRLPPPMDCPIALHQLMLDCWQKERSDRPKFGQIVNMLDKLIRNPNSLKRTGTESSRPNTALLDPSSPEFSAVVSVGDWLQAIKMDRYKDNFTAAGYTTLEAVVHVNQEDLARIGITAITHQNKILSSVQAMRTQMQQMHGRMVPV

SEQ ID NO: 299 - DNA, 3184 bp, Homo sapiens
agcttttccaggacaggacgaagtttttggctgtgggctctctgggacagagtggagcgcctgtggatttagccggggacacaccatcctgctcgcaggtgcctggacaggacaggggacgagggaggaacactctctgaggaagcccaactcctatgagctcctctctggcagcactcaaaccagtgaagcttgggaaagtcattgacctccagtcgttctgctgagaaacatctggctctatttccatggagaccagggaatctgaagatttggaaaagacccggaggaaatcagcaagtgatcaatggaacactgataatgaaccagccaaggtgaaacctgagttactcccagaaaaagaggagacttctcaagctgaccaggatatccaagacaaagagcctcattgccacatcccaattaagagaaattccatcttcaatcgctccataagacgcaaaagcaaagccaaggccagagacaaccccgaacggaacgccagctgcctggcagattcacaggacaatggaaaatctgtaaatgagcccctgaccttgaatatcccctggagcagaatgcctccttgcagaacagcaatgcagacagacccaggagcccaggaaatgagtgagtcgtcctccaccccgggaaatggggccacgcccgaggagtggccggccctggccgacagccccaccacgctcaccgaggccctgcggatgatccaccccattcccgccgactcctggagaaacctcattgaacaaatagggctcctgtatcaggaataccgagataaatcgactctccaagaaatcgaaaccaggaggcaacaggatgcagaaatagaagacaataccaatgggtccccggccagtgaggacaccccggaggaggaagaagaagaggaggaggaggaggagccggccagcccaccagagaggaagactctgccccagatctgcctgctcagtaacccccactcaaggttcaacctctggcaggatcttcccgagatccggagcagcggggtgcttgagatcctacagcccgaggagattaagctgcaggaggccatgttcgagctggtcacttccgaggcgtcctactacaagagtctgaacctgctcgtgtcccacttcatggagaacgagcggataaggaagatcctgcacccgtccgaggcgcacatcctcttctccaacgtcctggacgtgctggctgtcagtgagcggttcctcctggagctggagcaccggatggaggagaacatcgtcatctctgacgtgtgtgacattgtgtaccgttatgcggccgaccacttctctgtctacatcacctacgtcagcaatcagacctaccaggagcggacctataagcagctgctccaggagaaggcagctttccgggagctgatcgcgcagctagagctcgaccccaagtgcagggggctgcccttctcctccttcctcatcctgcctttccagaggatcacacgcctcaagctgttggtccagaacatcctgaagagggtagaagagaggtctgagcgggagtgcactgctttggatgctcacaaggagctggaaatggtggtgaaggcatgcaacgagggcgtcaggaaaatgagccgcacggaacagatgatcagcattcagaagaagatggagttcaagatcaagtcggtgcccatcatctcccactcccgctggctgctgaagcagggtgagctgcagcagatgtcaggccccaagacctcccggaccctgaggaccaagaagctcttccacgaaatttacctcttcctgttcaacgacctgctggtgatctgccggcagattccaggagacaagtaccaggtatttgactcagctccgcggggactgctgcgtgtggaggagctggaggaccagggccagacgctggccaacgtgttcatcctgcggctgctggagaacgcagatgaccgggaggccacctacatgctaaaggcgtcctctcagagtgagatgaagcgttggatgacctcactggcccccaacaggaggaccaagtttgtttcgttcacatcccggctgctggactgcccccaggtccagtgcgtgcacccatacgtggctcagcagccagacgagctgacgctggagctcgccgacatcctcaacatcctggacaagactgacgacgggtggatctttggcgagcgtctgcacgaccaggagagaggctggttccccagctccatgactgaggagatcttgaatcccaagatccggtcccagaacctcaaggaatgtttccgtgtccacaagatggatgaccctcagcgcagccagaacaaggaccgcaggaagctgggcagccggaatcggcaatgacccccacccagggggccagcgggagcagggcctgcatgagaccccgacagaaggtgggggggggggggctctgggaagcacaggccagcacctccccaggtggcaggatctggcttggggtgcccggccctcatccctgcccacgcagtgagtgctcatgtgtcttggccccttgctcgcaaactggataaagggtgcccaagcctctcctgatgcatttgtaaacaagaaggtttcagcagtattacaccacctccctcatgcctccgagggggtggaagggggtgggcacactccagggccccccatgcccctggcccccagggactggaagaggctcccaacccagagtgtccctgtgggaggcaggcagaaggtgacaattgacacgatttcctgcacgcgtcctcctctaccttggaagcagttagaatctaccaggcacagatgaggccgcccttgcctgacggagcttgatgagcagcccttggtctccggttccaggactgagagcccagctgcctctgcccacccttccccaggcctctgccagcctctggctgcacggtcaggccctgccccatggcaggcctgccagagcttggctggggacccctcccgcctctggctccctgatgggctggatgtaacttgtgtcttctagccccttaaggagcccaggtgttttaaggaatgaattggtcactgcatcttgtatcgattatggttctgagaaaagcaaatatcacttttggctgcattaaaagaagcatcatatataaaataaagaagatgaaggtcta

SEQ ID NO: 300 - protein, 710 aa, Homo sapiens
METRESEDLEKTRRKSASDQWNTDNEPAKVKPELLPEKEETSQADQDIQDKEPHCHIPIKRNSIFNRSIRRKSKAKARDNPERNASCLADSQDNGKSVNEPLTLNIPWSRMPPCRTAMQTDPGAQEMSESSSTPGNGATPEEWPALADSPTTLTEALRMIHPIPADSWRNLIEQIGLLYQEYRDKSTLQEIETRRQQDAEIEDNTNGSPASEDTPEEEEEEEEEEEPASPPERKTLPQICLLSNPHSRFNLWQDLPEIRSSGVLEILQPEEIKLQEAMFELVTSEASYYKSLNLLVSHFMENERIRKILHPSEAHILFSNVLDVLAVSERFLLELEHRMEENIVISDVCDIVYRYAADHFSVYITYVSNQTYQERTYKQLLQEKAAFRELIAQLELDPKCRGLPFSSFLILPFQRITRLKLLVQNILKRVEERSERECTALDAHKELEMVVKACNEGVRKMSRTEQMISIQKKMEFKIKSVPIISHSRWLLKQGELQQMSGPKTSRTLRTKKLFHEIYLFLFNDLLVICRQIPGDKYQVFDSAPRGLLRVEELEDQGQTLANVFILRLLENADDREATYMLKASSQSEMKRWMTSLAPNRRTKFVSFTSRLLDCPQVQCVHPYVAQQPDELTLELADILNILDKTDDGWIFGERLHDQERGWFPSSMTEEILNPKIRSQNLKECFRVHKMDDPQRSQNKDRRKLGSRNRQ

SEQ ID NO: 301 - DNA, 5623 bp, Homo sapiens
atgtcactttttttaagggtagtatttagtttcacaatgtttggggacctgtttgaagaggagtattccactgtgtctaataatcagtatggaaaagggaagaaattaaagactaaagctttggagccacctgctcctagagaattcaccaatttaagcggaatcagaaatcagggtggaacctgttacctcaattcccttcttcagactcttcatttcacacctgaattcagagaagctctattttctcttggcccagaagagcttggtttgtttgaagataaggataaacccgatgcaaaggttcgaatcatccctttacagttacagcgcttgtttgctcagcttctgctcttagaccaggaagctgcatccacagcagacctcactgacagctttgggtggaccagtaatgaggaaatgaggcaacatgatgtgcaggaactgaatcgaatcctcttcagcgctttggaaacttctttagttgggacctccggtcatgacctcatctatcgtctgtaccatggaaccattgttaaccagattgtttgtaaagaatgtaagaacgttagcgagaggcaggaagacttcttagatctaacagtagcagtcaaaaatgtatccggtttggaagatgctctctggaacatgtatgtagaagaggaagtttttgattgtgacaacttgtaccactgtggaacttgtgacaggctggttaaagcagcaaagtcggccaaattacgtaagctgcctccttttcttactgtttcattactaagatttaattttgattttgtgaaatgcgaacgctacaaggaaactagctgttatacattccctctccggattaatctcaagcccttttgtgaacagagtgaattggatgacttagaatatatatatgacctcttctcagttattatacacaaaggtggctgctacggaggccattaccatgtatatattaaagatgttgatcatttgggaaactggcagtttcaagaggaaaaaagtaaaccagatgtgaatctgaaagatctccagagtgaagaagagattgatcatccactgatgattctaaaagcaatcttattagaggagaataatctaattcctgttgatcagctgggccagaaacttttgaaaaagataggaatatcttggaacaagaagtacagaaaacagcatggaccactgcggaagttcttacagctccattctcagatatttctactcagttcagatgaaagtacagttcgtctcttgaagaatagttctctccaggctgagtctgatttccaaaggaatgaccagcaaattttcaagatgcttcctccagaatccccaggtttaaacaatagcatctcctgtccccactggtttgatataaatgattctaaagtccagccaatcagggaaaaggatattgaacagcaatttcagggtaaagaaagtgcctacatgttgttttatcggaaatcccagttgcagagaccccctgaagctcgagctaatccaagatatggggttccatgtcatttactgaatgaaatggatgcagctaacattgaactgcaaaccaaaagggcagaatgtgattctgcaaacaatacttttgaattgcatcttcacctgggccctcagtatcatttcttcaatggggctctgcacccagtagtctctcaaacagaaagcgtgtgggatttgacctttgataaaagaaaaactttaggagatctccggcagtcaatatttcagctgttagaattttgggaaggagacatggttcttagtgttgcaaagcttgtaccagcaggacttcacatttaccagtcacttggcggggatgaactgacactgtgtgaaactgaaattgctgatggggaagacatctttgtgtggaatggggtggaggttggtggagtccacattcaaactggtattgactgcgaacctctacttttaaatgttcttcatctagacacaagcagtgatggagaaaagtgttgtcaggtgatagaatctccacatgtctttccagctaatgcagaagtgggcactgtcctcacagccttagcaatcccagcaggtgtcatcttcatcaacagtgctggatgtccaggtggggagggttggacggccatccccaaggaagacatgaggaagacgttcagggagcaagggctcagaaatggaagctcaattttaattcaggattctcatgatgataacagcttgttgaccaaggaagagaaatgggtcactagtatgaatgagattgactggctccacgttaaaaatttatgccagttagaatctgaagagaagcaagttaaaatatcagcaactgttaacacaatggtgtttgatattcgaattaaagccataaaggaattaaaattaatgaaggaactagctgacaacagctgtttgagacctattgatagaaatgggaagcttctttgtccagtgccggacagctatactttgaaggaagcagaattgaagatgggaagttcattgggactgtgtcttggaaaagcaccaagttcgtctcagttgttcctgttttttgcaatggggagtgacgttcaacctgggacagaaatggaaatcgtagtagaagaaacaatatctgtgagagattgtttaaagttaatgctgaagaaatctggcctacaaggagatgcctggcatttacgaaaaatggattggtgctatgaagctggagagcctttatgtgaagaagatgcaacactgaaagaacttctgatatgttctggagatactttgcttttaattgaaggacaacttcctcctctgggtttcctgaaggtgcccatctggtggtaccagcttcagggtccctcaggacactgggagagtcatcaggaccagaccaactgtacttcgtcttggggcagagtttggagagccacttccagccaaggtgcttctgggaacgagcctgcgcaagtttctctcctctacttgggagacatagagatctcagaagatgccacgctggcggagctgaagtctcaggccatgaccttgcctcctttcctggagttcggtgtcccgtccccagcccacctcagagcctggacggtggagaggaagcgcccaggcaggcttttacgaactgaccggcagccactcagggaatataaactaggacggagaattgagatctgcttagagccccttcagaaaggcgaaaacttgggcccccaggacgtgctgctgaggacacaggtgcgcatccctggtgagaggacctatgcccctgccctggacctggtgtggaacgcggcccagggtgggactgccggctccctgaggcagagagttgccgatttctatcgtcttcccgtggagaagattgaaattgccaaatactttcccgaaaagttcgagtggcttccgatatctagctggaaccaacaaataaccaagaggaaaaagaaaaaaaaacaagattatttgcaaggggcaccgtattacttgaaagacggagatactattggtgttaagaatctcctgattgacgacgatgatgatttcagtacaatcagagatgacactggaaaagaaaagcagaaacaacgggccctggggagaaggaaaagccaagaagccctccatgagcagagcagctacatcctctccagtgcagagacgcctgcccggccccgagccccggaaacttctctctccatccacgtggggagcttcagataaccgcgccgctgcacggctctactcccgatgaactctccggctgatgccacaaacgtgggtttcctgggcatggggactggctgcctggcgcctccaatcccaaatcctctgcttcctttgagcacagggacggctcctctgaggcctggccagtgcatgtagtcacttagctctgcaacacgtggcagccacgggggctggtgcagctctggatgtcgcccacccagctgccagtaggtgctgggctctctcacacagcacccggccccagctgcctttttttttcttttaaccagaaaatgcacaacgtgtgcgtgaaccgcaggtatggaggcagcggcatgccgttgctccgctgtgggaggtgtgtggggtcaggccagccactttcctccgtgttcagatgactctcgttcgccctgaccggcttctcacagtgtctcaggccactgcgccaccgcgctggtgctgagcagaagcgggcagaagtggggtctgctttcaggacttcatttcccccactcgttccggccccgcatgctccacgtctgccctttggtctgagttaaaactgcgatgctgaaaagtgcgagctctttccacgaggaggagccacacagggtggcctccgagggtgagtcgctctgctaagcaagggcagccgctgcacgtcagcccgcaggccaagggtccagcttatcctgggtgctctgtgatcagaaggtccttggatcccgaggactgcagctgctgccgtccacagcgcctcagcctctcttcctgtgtggaagcggggcaggcagggctgtggcagacaggcctggcatagcccaggttccaggtgtcctgggcagcctgaccggtttcctgagtagcctcaatgaaaacacctgagaaaaagaaaatgtaaactaaggaagggttttcccacttaatccaacccagatttctattcaacttaaaggatttaattggcatttgtgagaaataatagtacctgtgtcactgagttgattgatttgggacatagacggttgactttcccagacagcagcttagcggaaagcagcatcccgaagacggtgtcgcatgtcctgagcctgcttgtcacctgggcctcacggtttctcgtcagccccgtcactgatgggaagcagcactgaagtgtgagggcagaaaggacaccgctggagtcaggcgctcccctgcctgtgacccttttccaacaagctgatgctgagccagcggcctgctttgtccctcatactcctcccaacagtccaaacccctaccagacagaagccacgtcgcttctgcacacgtgtctgagagcgtctgccatagacgtctgtgcgtttccgtgaagcactgcgccctaaggacccaactctgactagcagctgcctcccactcccaaacactaaccccgctcaggagactcgcactgggtgtagactgcgtctttgcagagggagatgatagaggcttctgatgacgccagagctgtaagtgtcgtgacgagctgggcgcccagcccttcttaagctgttctgtttctgtggctttaactgacatatttctgtagcatctgccttcatctcatctcagcgtaatgaaatattaatgaaatcgctgaaaagctttgccttcgagaggccagaagcctcgcggaatgtctgcaagtccaaagacgcgtgtgggttgtgccctgaagtgccgtccagcaggcgcgtgcggccgggccggcctgtgcgtgtggcctttgccttcttccctttcttcctgttttctgtttttttaatttggggattgagaaagctgtacgattttgttaaagaaaaaaataaaccattttttaaagttgtagcccttaaaaaaa

SEQ ID NO: 302 - protein, 1247 aa, Homo sapiens
MSLFLRVVFSFTMFGDLFEEEYSTVSNNQYGKGKKLKTKALEPPAPREFTNLSGIRNQGGTCYLNSLLQTLHFTPEFREALFSLGPEELGLFEDKDKPDAKVRIIPLQLQRLFAQLLLLDQEAASTADLTDSFGWTSNEEMRQHDVQELNRILFSALETSLVGTSGHDLIYRLYHGTIVNQIVCKECKNVSERQEDFLDLTVAVKNVSGLEDALWNMYVEEEVFDCDNLYHCGTCDRLVKAAKSAKLRKLPPFLTVSLLRFNFDFVKCERYKETSCYTFPLRINLKPFCEQSELDDLEYIYDLFSVIIHKGGCYGGHYHVYIKDVDHLGNWQFQEEKSKPDVNLKDLQSEEEIDHPLMILKAILLEENNLIPVDQLGQKLLKKIGISWNKKYRKQHGPLRKFLQLHSQIFLLSSDESTVRLLKNSSLQAESDFQRNDQQIFKMLPPESPGLNNSISCPHWFDINDSKVQPIREKDIEQQFQGKESAYMLFYRKSQLQRPPEARANPRYGVPCHLLNEMDAANIELQTKRAECDSANNTFELHLHLGPQYHFFNGALHPVVSQTESVWDLTFDKRKTLGDLRQSIFQLLEFWEGDMVLSVAKLVPAGLHIYQSLGGDELTLCETEIADGEDIFVWNGVEVGGVHIQTGIDCEPLLLNVLHLDTSSDGEKCCQVIESPHVFPANAEVGTVLTALAIPAGVIFINSAGCPGGEGWTAIPKEDMRKTFREQGLRNGSSILIQDSHDDNSLLTKEEKWVTSMNEIDWLHVKNLCQLESEEKQVKISATVNTMVFDIRIKAIKELKLMKELADNSCLRPIDRNGKLLCPVPDSYTLKEAELKMGSSLGLCLGKAPSSSQLFLFFAMGSDVQPGTEMEIVVEETISVRDCLKLMLKKSGLQGDAWHLRKMDWCYEAGEPLCEEDATLKELLICSGDTLLLIEGQLPPLGFLKVPIWWYQLQGPSGHWESHQDQTNCTSSWGRVWRATSSQGASGNEPAQVSLLYLGDIEISEDATLAELKSQAMTLPPFLEFGVPSPAHLRAWTVERKRPGRLLRTDRQPLREYKLGRRIEICLEPLQKGENLGPQDVLLRTQVRIPGERTYAPALDLVWNAAQGGTAGSLRQRVADFYRLPVEKIEIAKYFPEKFEWLPISSWNQQITKRKKKKKQDYLQGAPYYLKDGDTIGVKNLLIDDDDDFSTIRDDTGKEKQKQRALGRRKSQEALHEQSSYILSSAETPARPRAPETSLSIHVGSFR

SEQ ID NO: 303 - DNA, 1024 bp, Homo sapiens
aatgggagactagcgggccggcgtactggcctggtccagcacctgcggggccctcgggcttggagggctgggccgggcggggaacgggcggggcgggccggaggcggcggcggctgactcgccttctctccggggctgcgaccccgaggcaaccggctgcagatgggagcccgcggagccgaggatgcgggcgggccggggcgcgacgccggcgagggagctgttccgggacgccgccttccccgccgcggactcctcgctcttctgcgacttgtctacgccgctggcccagttccgcgaggacatcacgtggaggcggccccaggtcccagagggtggaaggagccaggacgcacccccactgctgctgcaggagccgctgctgagctgcgtgccacatcgctacgcccaggaggtgagccggctctgcctcctgcctgcgggcacctacaaggttgtgccctccacctacctgccggacacagagggggccttcacagtgaccatcgcaaccaggattgacaggccatccattcacagccaggagatgctgggccagttcctccaagaggtctccgtcatggcagtgatgaaaacctaacagggtggccccctgtgccagctcaggtgactggagcccgagggcctgacaggttcccagcagctgggccggccagccttgcactgtgggggctggtcctgagtcttggcctgcctcccagccctgccaggaggctgcggcctaggggtccacgggaagcctccgtcaggagagacgcagccctgggggccagctggtgctgcaaggaagggtgggaagcttgctggcttctgttgcgccactgagacggcagagaccccaggatcccagagcttcccaggatccctcccagatcctctgctgactccatatggaggcctcacacccagagggtagggcagcagatcttctttataactatttattgttcgaatcacttttaggatgtaactttataaataaacatgagcgctgatgatttgc

SEQ ID NO: 304 - protein, 138 aa, Homo sapiens
MRAGRGATPARELFRDAAFPAADSSLFCDLSTPLAQFREDITWRRPQVPEGGRSQDAPPLLLQEPLLSCVPHRYAQEVSRLCLLPAGTYKVVPSTYLPDTEGAFTVTIATRIDRPSIHSQEMLGQFLQEVSVMAVMKT

SEQ ID NO: 305 - DNA, 2626 bp, Homo sapiens
aatgggagactagcgggccggcgtactggcctggtccagcacctgcggggccctcgggcttggagggctgggccgggcggggaacgggcggggcgggccggaggcggcggcggctgactcgccttctctccggggctgcgaccccgaggcaaccggctgcagatgggagcccgcggagccgaggatgcgggcgggccggggcgcgacgccggcgagggagctgttccgggacgccgccttccccgccgcggactcctcgctcttctgcgacttgtctacgccgctggcccagttccgcgaggacatcacgtggaggcggccccaggagatttgtgccacaccccggctgtttccagatgacccacgggaagggcaggtgaagcaggggctgctgggggattgctggttcctgtgtgcctgcgccgcgctgcagaagagcaggcacctcctggaccaggtcattcctccgggacagccgagctgggccgaccaggagtaccggggctccttcacctgtcgcatttggcagtttggacgctgggtggaggtgaccacagatgaccgcctgccgtgccttgcagggagactctgtttctcccgctgccagagggaggatgtgttctggctccccttactggaaaaggtctacgccaaggtccatgggtcctacgagcacctgtgggccgggcaggtggcggatgccctggtggacctgaccggcggcctggcagaaagatggaacctgaagggcgtagcaggaagcggaggccagcaggacaggccaggccgctgggagcacaggacttgtcggcagctgctccacctgaaggaccagtgtctgatcagctgctgcgtgctcagccccagagcaggtgcccgggagctgggggagttccatgccttcattgtctcggacctgcgggagctccagggtcaggcgggccagtgcatcctgctgctgcggatccagaacccctggggccggcggtgctggcaggggctctggagagaggggggtgaagggtggagccaggtagatgcagcggtagcatctgagctcctgtcccagctccaggaaggggagttctgggtggaggaggaggagttcctcagggagtttgacgagctcaccgttggctacccggtcacggaggccggccacctgcagagcctctacacagagaggctgctctgccatacgcgggcgctgcctggggcctgggtcaagggccagtcagcaggaggctgccggaacaacagcggctttcccagcaaccccaaattctggctgcgggtctcagaaccgagtgaggtgtacattgccgtcctgcagagatccaggctgcacgcggcggactgggcaggccgggcccgggcactggtgggtgacagtcatacttcgtggagcccagcgagcatcccgggcaagcactaccaggctgtgggtctgcacctctggaaggtagagaagcggcgggtcaatctgcctagggtcctgtccatgccccccgtggctggcaccgcgtgccatgcatacgaccgggaggtccacctgcgttgtgagctctcaccgggctactacctggctgtccccagcaccttcctgaaggacgcgccaggggagttcctgctccgagtcttctctaccgggcgagtctcccttagcgccatcagggcagtggccaagaacaccacccccggggcagccctgcctgcgggggagtgggggaccgtgcagctacggggttcttggagagtcggccagacggcggggggcagcaggaactttgcctcataccccaccaacccctgcttccccttctcggtccccgagggccctggcccccgctgcgtccgcatcactctgcatcagcactgccggcccagtgacaccgagttccaccccatcggcttccatatcttccaggtcccagagggtggaaggagccaggacgcacccccactgctgctgcaggagccgctgctgagctgcgtgccacatcgctacgcccaggaggtgagccggctctgcctcctgcctgcgggcacctacaaggttgtgccctccacctacctgccggacacagagggggccttcacagtgaccatcgcaaccaggattgacaggccatccattcacagccaggagatgctgggccagttcctccaagaggtctccgtcatggcagtgatgaaaacctaacagggtggccccctgtgccagctcaggtgactggagcccgagggcctgacaggttcccagcagctgggccggccagccttgcactgtgggggctggtcctgagtcttggcctgcctcccagccctgccaggaggctgcggcctaggggtccacgggaagcctccgtcaggagagacgcagccctgggggccagctggtgctgcaaggaagggtgggaagcttgctggcttctgttgcgccactgagacggcagagaccccaggatcccagagcttcccaggatccctcccagatcctctgctgactccatatggaggcctcacacccagagggtagggcagcagatcttctttataactatttattgttcgaatcacttttaggatgtaactttataaataaacatgagcgctgatgatttgc

SEQ ID NO: 306 - protein, 672 aa, Homo sapiens
MRAGRGATPARELFRDAAFPAADSSLFCDLSTPLAQFREDITWRRPQEICATPRLFPDDPREGQVKQGLLGDCWFLCACAALQKSRHLLDQVIPPGQPSWADQEYRGSFTCRIWQFGRWVEVTTDDRLPCLAGRLCFSRCQREDVFWLPLLEKVYAKVHGSYEHLWAGQVADALVDLTGGLAERWNLKGVAGSGGQQDRPGRWEHRTCRQLLHLKDQCLISCCVLSPRAGARELGEFHAFIVSDLRELQGQAGQCILLLRIQNPWGRRCWQGLWREGGEGWSQVDAAVASELLSQLQEGEFWVEEEEFLREFDELTVGYPVTEAGHLQSLYTERLLCHTRALPGAWVKGQSAGGCRNNSGFPSNPKFWLRVSEPSEVYIAVLQRSRLHAADWAGRARALVGDSHTSWSPASIPGKHYQAVGLHLWKVEKRRVNLPRVLSMPPVAGTACHAYDREVHLRCELSPGYYLAVPSTFLKDAPGEFLLRVFSTGRVSLSAIRAVAKNTTPGAALPAGEWGTVQLRGSWRVGQTAGGSRNFASYPTNPCFPFSVPEGPGPRCVRITLHQHCRPSDTEFHPIGFHIFQVPEGGRSQDAPPLLLQEPLLSCVPHRYAQEVSRLCLLPAGTYKVVPSTYLPDTEGAFTVTIATRIDRPSIHSQEMLGQFLQEVSVMAVMKT

SEQ ID NO: 307 - DNA, 2161 bp, Homo sapiens
aatgggagactagcgggccggcgtactggcctggtccagcacctgcggggccctcgggcttggagggctgggccgggcggggaacgggcggggcgggccggaggcggcggcggctgactcgccttctctccggggctgcgaccccgaggcaaccggctgcagatgggagcccgcggagccgaggatgcgggcgggccggggcgcgacgccggcgagggagctgttccgggacgccgccttccccgccgcggactcctcgctcttctgcgacttgtctacgccgctggcccagttccgcgaggacatcacgtggaggcggccccaggagatttgtgccacaccccggctgtttccagatgacccacgggaagggcaggtgaagcaggggctgctgggggattgctggttcctgtgtgcctgcgccgcgctgcagaagagcaggcacctcctggaccaggtcattcctccgggacagccgagctgggccgaccaggagtaccggggctccttcacctgtcgcatttggcagtttggacgctgggtggaggtgaccacagatgaccgcctgccgtgccttgcagggagactctgtttctcccgctgccagagggaggatgtgttctggctccccttactggaaaaggtctacgccaaggtccatgggtcctacgagcacctgtgggccgggcaggtggcggatgccctggtggacctgaccggcggcctggcagaaagatggaacctgaagggcgtagcaggaagcggaggccagcaggacaggccaggccgctgggagcacaggacttgtcggcagctgctccacctgaaggaccagtgtctgatcagctgctgcgtgctcagccccagagcaggtgcccgggagctgggggagttccatgccttcattgtctcggacctgcgggagctccagggtcaggcgggccagtgcatcctgctgctgcggatccagaacccctggggccggcggtgctggcaggggctctggagagaggggggtgaagggtggagccaggtagatgcagcggtagcatctgagctcctgtcccagctccaggaaggggagttctgggtggaggaggaggagttcctcagggagtttgacgagctcaccgttggctacccggtcacggaggccggccacctgcagagcctctacacagagaggctgctctgccatacgcgggcgctgcctggggcctgggtcaagggccagtcagcaggaggctgccggaacaacagcggctttcccagcaaccccaaattctggctgcgggtctcagaaccgagtgaggtgtacattgccgtcctgcagagatccaggctgcacgcggcggactgggcaggccgggcccgggcactggtgggtgacagtcatacttcgtggagcccagcgagcatcccgggcaagcactaccaggctgtgggtctgcacctctggaaggtcccagagggtggaaggagccaggacgcacccccactgctgctgcaggagccgctgctgagctgcgtgccacatcgctacgcccaggaggtgagccggctctgcctcctgcctgcgggcacctacaaggttgtgccctccacctacctgccggacacagagggggccttcacagtgaccatcgcaaccaggattgacaggccatccattcacagccaggagatgctgggccagttcctccaagaggtctccgtcatggcagtgatgaaaacctaacagggtggccccctgtgccagctcaggtgactggagcccgagggcctgacaggttcccagcagctgggccggccagccttgcactgtgggggctggtcctgagtcttggcctgcctcccagccctgccaggaggctgcggcctaggggtccacgggaagcctccgtcaggagagacgcagccctgggggccagctggtgctgcaaggaagggtgggaagcttgctggcttctgttgcgccactgagacggcagagaccccaggatcccagagcttcccaggatccctcccagatcctctgctgactccatatggaggcctcacacccagagggtagggcagcagatcttctttataactatttattgttcgaatcacttttaggatgtaactttataaataaacatgagcgctgatgatttgc

SEQ ID NO: 308 - protein, 517 aa, Homo sapiens
MRAGRGATPARELFRDAAFPAADSSLFCDLSTPLAQFREDITWRRPQEICATPRLFPDDPREGQVKQGLLGDCWFLCACAALQKSRHLLDQVIPPGQPSWADQEYRGSFTCRIWQFGRWVEVTTDDRLPCLAGRLCFSRCQREDVFWLPLLEKVYAKVHGSYEHLWAGQVADALVDLTGGLAERWNLKGVAGSGGQQDRPGRWEHRTCRQLLHLKDQCLISCCVLSPRAGARELGEFHAFIVSDLRELQGQAGQCILLLRIQNPWGRRCWQGLWREGGEGWSQVDAAVASELLSQLQEGEFWVEEEEFLREFDELTVGYPVTEAGHLQSLYTERLLCHTRALPGAWVKGQSAGGCRNNSGFPSNPKFWLRVSEPSEVYIAVLQRSRLHAADWAGRARALVGDSHTSWSPASIPGKHYQAVGLHLWKVPEGGRSQDAPPLLLQEPLLSCVPHRYAQEVSRLCLLPAGTYKVVPSTYLPDTEGAFTVTIATRIDRPSIHSQEMLGQFLQEVSVMAVMKT

SEQ ID NO: 309 - DNA, 1304 bp, Homo sapiens
gactagcgggccggcgtactggcctggtccagcacctgcggggccctcgggcttggagggctgggccgggcggggaacgggcggggcgggccggaggcggcggcggctgactcgccttctctccggggctgcgaccccgaggcaaccggctgcagatgggagcccgcggagccgaggatgcgggcgggccggggcgcgacgccggcgagggagctgttccgggacgccgccttccccgccgcggactcctcgctcttctgcgacttgtctacgccgctggcccagttccgcgaggacatcacgtggaggcggccccaggagatttgtgccacaccccggctgtttccagatgacccacgggaagggcaggtgaagcaggggctgctgggggattgctggttcctgtgtgcctgcgccgcgctgcagaagagcaggcacctcctggaccaggtctcttgccctgtgcagcttcctgcagactggacttgcaaagtccagcctgtatggctggagttcccatgcctgccaatctcctgtcgactgcgagtcagctccgatacttcaccagattcagccacctgggggagctggaagtgaatctcatcttagctgagccttctgatgagactgcagccccagctgacacctggattgcagactcatgaaagacctgaaactctaccaacagccacctgggggagctggaagtgaatctcctcgtagctgagccttctgatgagactgcagccccggctgacacctggattgcagactcatgaaagacctgaaactctaccaacagccacctgggggagctggaagtgaatctcctcgtagctgagccttctgatgagactgcagccccggctgacacctggattgcagactcatgaaagaccctgagcagaggacccagtttggcagagcccgaattcctgacccacaggaactgggagataaaactctgtggttttaatcttctcattttagaggtaatttttttgtgtagcaataggtagctgacaatgcacagctaaaataatagataattaaccctaatgctagtttcattcatccatcagggtttgcaaagtagtgatattctacttctgtcttccttcattatttattagcagaaatgtatctataaaaagaagtgttccttcattaactctttggtcatgttgaggtacagtttgcataggaaaggcagggcaaatgcttgattctttcccttcctttcctcatttataaaataatgaactgttttcctggcatctttcaacaatgactaatgagttttt

SEQ ID NO: 310 - protein, 139 aa, Homo sapiens
MRAGRGATPARELFRDAAFPAADSSLFCDLSTPLAQFREDITWRRPQEICATPRLFPDDPREGQVKQGLLGDCWFLCACAALQKSRHLLDQVSCPVQLPADWTCKVQPVWLEFPCLPISCRLRVSSDTSPDSATWGSWK

SEQ ID NO: 311 - DNA, 5043 bp, Homo sapiens
gaaaaagaacagtgtgtcatgaagacaggcacctggaggtgatttgggtggcattcatgagaaaattcacgttacccgaatcattgacatagagtaactccacagcatgtgtcttcaagagcttccctaaaagattaaaggttatacaaaacttaaaagaagcagcaattctattcgcttgttattggacttgaaactccctttgacctcggaaactgaagatgaggttgccatgggaactgctggtactgcaatcattcattttgtgccttgcagatgattccacactgcatggcccgatttttattcaagaaccaagtcctgtaatgttccctttggattctgaggagaaaaaagtgaagctcaattgtgaagttaaaggaaatccaaaacctcatatcaggtggaagttaaatggaacagatgttgacactggtatggatttccgctacagtgttgttgaagggagcttgttgatcaataaccccaataaaacccaagatgctggaacgtaccagtgcacagcgacaaactcgtttggaacaattgttagcagagaagcaaagcttcagtttgcttatcttgacaactttaaaacaagaacaagaagcactgtgtctgtccgtcgaggtcaaggaatggtgctactgtgtggcccgccaccccattctggagagctgagttatgcctggatcttcaatgaatacccttcctatcaggataatcgccgctttgtttctcaagagactgggaatctgtatattgccaaagtagaaaaatcagatgttgggaattatacctgtgtggttaccaataccgtgacaaaccacaaggtcctggggccacctacaccactaatattgagaaatgatggagtgatgggtgaatatgagcccaaaatagaagtgcagttcccagaaacagttccgactgcaaaaggagcaacggtgaagctggaatgctttgctttaggaaatccagtaccaactattatctggcgaagagctgatggaaagccaatagcaaggaaagccagaagacacaagtcaaatggaattcttgagatccctaattttcagcaggaggatgctggtttatatgaatgtgtagctgaaaattccagagggaaaaatgtagcaaggggacagctaactttctatgctcaacctaattggattcaaaaaataaatgatattcacgtggccatggaagaaaatgtcttttgggaatgtaaagcaaatggaaggcctaagcctacatacaagtggctaaaaaatggcgaacctctgctaactcgggatagaattcaaattgagcaaggaacactcaacataacaatagtgaacctctcagatgctggcatgtatcagtgtttggcagagaataaacatggagttatcttttccaacgcagagcttagtgttatagctgtaggtccagatttttcaagaacactcttgaaaagagtaactcttgtcaaagtgggaggtgaagttgtcattgagtgtaagccaaaagcgtctccaaaacctgtttacacctggaagaaaggaagggatatattaaaagaaaatgaaagaattaccatttctgaagatggaaacctcagaatcatcaacgttactaaatcagacgctgggagttatacctgtatagccactaaccattttggaactgctagcagtactggaaacttggtagtgaaagatccaacaagggtaatggtacccccttccagtatggatgtcactgttggagagagtattgttttaccgtgccaggtaacgcatgatcactcgctagacatcgtgtttacttggtcatttaatggacacctgatagactttgacagagatggggaccactttgaaagagttggagggcaggattcagctggtgatttgatgatccgaaacatccaactgaagcatgctgggaaatatgtctgcatggtccaaacaagtgtggacaggctatctgctgctgcagacctgattgtaagaggtcctccaggtcccccagaggctgtgacaatagacgaaatcacagataccactgctcagctctcctggagacccgggcctgacaaccacagccccatcaccatgtatgtcattcaagccaggactccattctccgtgggctggcaagcagtcagtacagtcccagaactcattgatgggaagacattcacagcgaccgtggtgggtttgaacccttgggttgaatatgaattccgcacagttgcagccaacgtgattgggattggggagcccagccgcccctcagagaaacggagaacagaagaagctctccccgaagtcacaccagcgaatgtcagtggtggcggaggcagcaaatctgaactggttataacctgggagacggtccctgaggaattacagaatggtcgaggctttggttatgtggtggccttccggccctacggtaaaatgatctggatgctgacagtgctggcctcagctgatgcctctagatacgtgttcaggaatgagagcgtgcaccccttctctccctttgaggttaaagtaggtgtcttcaacaacaaaggagaaggccctttcagtcccaccacggtggtgtattctgcagaagaagaacccaccaaaccaccagccagtatctttgccagaagtctttctgccacagatattgaagttttctgggcctccccactggagaagaatagaggacgaatacaaggttatgaggttaaatattggagacatgaagacaaagaagaaaatgctagaaaaatacgaacagttggaaatcagacatcaacaaaaatcacgaacttaaaaggcagtgtgctgtatcacttagctgtcaaggcatataattctgctgggacaggcccctctagtgcaacagtcaatgtgacaacccgaaagccaccaccaagtcaaccccccggaaacatcatatggaattcatcagactccaaaattatcctgaattgggatcaagtgaaggccctggataatgagtcggaagtaaaaggatacaaagtcttgtacagatggaacagacaaagcagcacatctgtcattgaaacaaataaaacatcggtggagctttctttgcctttcgatgaagattatataatagaaattaagccattcagcgacggaggagatggcagcagcagtgaacaaattcgaattccaaagatatcaaatgcctacgcgagaggatctggggcttccacttcgaatgcatgtacgctgtcagccatcagtacaataatgatttccctcacagctaggtccagtttatgacaaaagttatctgaaggacttgctgtttataatataagcaacatttagctagttgttttgaagacacccagtactaagtaatattgttgttcaagtacatcttattactggaataaaaatgttttttgcttctttaggaatggcattatacagtacttcctcaaagcaaatctagctttgtctgaagtttctttggaaactctgcaatgcactgaagacatctgtaatatgatgttaccaaagcagtttacatatgtccttatatgcatattttttattatatatttagtgttttatagaattttttaaagttaacatataatgtagatattaattttttcctcggctgtaaaatgctatgggcaacacaatcatgcaattataatttgaaaatatttcctttaaagacagagtttgaaactcatcttggtaaataaattgcaaattactcgtacagttttacaaggatctcatggcagaacagcggaagacttggtccgtaactcaaggctgttgtatgcaaactactcttctagtggttaatgcacttgacatgtacagtatgtttcccatgccgttgtgattttgacatgtacagtatgttttcatgccgttgtgaattttgttgttcaacccaacttgagatggtttcaggaatggctgcaatctcaaaagctcaatgtactgcccaagaggcaccttgtgcaatattcccatccctgaatttagcattgtacaggaagattttcttttcactcaactgagttagcattgtctttgtggtagcattatcttagacattaaatttgaagtaacatatatcctgtagtaacatagacccaaagttactatagtcaaccaagtctttcaaaggataaaagatcattttattatctttaactgtatctattttgaatgtaaatttaaaaaaagtaattctctgtcaatggattcgtaatttctttacaaaatttcttatatataatatgtgtatctctgtaataatagagcccttcttttgaatcaaaattacatatggactttggaagattgctcctatttcaacaaatagttgctgcaagaatttttaatatgactctataaaagctctttagtacaattgtatggtttcttgatgattctgttttgcaataggtagcctagttgctttatatgctttaccttctaggtcttaaaatcacacattggaaaatgacaatatcaacaaaactgtattcttatgaaaagaactatttgttacaatgagaaaggttttgtgagtaaaccctactggacagtgacataaaaggcaatggaattttctataaacattttctcatgtaaacatgctgccaccttttcttctttctcagagaactcaaatttgctatagtttgtcatttttgcttacaaataatataacttttcaaccttctagttatatttatccaataaagtcataatcgggattccatttgtgtaaaaactagggtggtaaccggaaaaaaatattgtcagtatttcaagctgtgttcctttcttagtttgatatggttacttctatgttgaaataaaatttaaaatcacatgcaaaaaaaaaatcagcaaaataataaaatgaacgaaaaaaaatgacacccagggagttcccaaccccagtgtaaatgatatttaccagtgatctagcatatgtaatcttttttaaaggtattgttaataaatattctgtcatttgtaaaga

SEQ ID NO: 312 - protein, 1026 aa, Homo sapiens
MRLPWELLVLQSFILCLADDSTLHGPIFIQEPSPVMFPLDSEEKKVKLNCEVKGNPKPHIRWKLNGTDVDTGMDFRYSVVEGSLLINNPNKTQDAGTYQCTATNSFGTIVSREAKLQFAYLDNFKTRTRSTVSVRRGQGMVLLCGPPPHSGELSYAWIFNEYPSYQDNRRFVSQETGNLYIAKVEKSDVGNYTCVVTNTVTNHKVLGPPTPLILRNDGVMGEYEPKIEVQFPETVPTAKGATVKLECFALGNPVPTIIWRRADGKPIARKARRHKSNGILEIPNFQQEDAGLYECVAENSRGKNVARGQLTFYAQPNWIQKINDIHVAMEENVFWECKANGRPKPTYKWLKNGEPLLTRDRIQIEQGTLNITIVNLSDAGMYQCLAENKHGVIFSNAELSVIAVGPDFSRTLLKRVTLVKVGGEVVIECKPKASPKPVYTWKKGRDILKENERITISEDGNLRIINVTKSDAGSYTCIATNHFGTASSTGNLVVKDPTRVMVPPSSMDVTVGESIVLPCQVTHDHSLDIVFTWSFNGHLIDFDRDGDHFERVGGQDSAGDLMIRNIQLKHAGKYVCMVQTSVDRLSAAADLIVRGPPGPPEAVTIDEITDTTAQLSWRPGPDNHSPITMYVIQARTPFSVGWQAVSTVPELIDGKTFTATVVGLNPWVEYEFRTVAANVIGIGEPSRPSEKRRTEEALPEVTPANVSGGGGSKSELVITWETVPEELQNGRGFGYVVAFRPYGKMIWMLTVLASADASRYVFRNESVHPFSPFEVKVGVFNNKGEGPFSPTTVVYSAEEEPTKPPASIFARSLSATDIEVFWASPLEKNRGRIQGYEVKYWRHEDKEENARKIRTVGNQTSTKITNLKGSVLYHLAVKAYNSAGTGPSSATVNVTTRKPPPSQPPGNIIWNSSDSKIILNWDQVKALDNESEVKGYKVLYRWNRQSSTSVIETNKTSVELSLPFDEDYIIEIKPFSDGGDGSSSEQIRIPKISNAYARGSGASTSNACTLSAISTIMISLTARSSL

SEQ ID NO: 313 - DNA, 3072 bp, Homo sapiens
gaggatcttcagccaagatggtttttcttccttcagtgagatcttttgtctatttggcaatggaagaagattagtattagaggatacgtgttggaaatgtggtttttcaggagaccgatgtccagtgtttttttttttacaatcatttccaaccatttcagagctgggtctgccccatcaaagagcaagctctggactgcagatcctcattacgttttcaaccctgtccagtacatcataactgtttaagatagactgactgcaagccctaaatttaaaagactgttaacaaaacgccaaataagatgggtggagaaggatgtagacaagaatgttacaagggaaacaaaaacgatttttgcatttgagtgaaactactgtgatttctgaagaccaccttccttctttcccagacggtccctgaggaattacagaatggtcgaggctttggttatgtggtggccttccggccctacggtaaaatgatctggatgctgacagtgctggcctcagctgatgcctctagatacgtgttcaggaatgagagcgtgcaccccttctctccctttgaggttaaagtaggtgtcttcaacaacaaaggagaaggccctttcagtcccaccacggtggtgtattctgcagaagaagaacccaccaaaccaccagccagtatctttgccagaagtctttctgccacagatattgaagttttctgggcctccccactggagaagaatagaggacgaatacaaggttatgaggttaaatattggagacatgaagacaaagaagaaaatgctagaaaaatacgaacagttggaaatcagacatcaacaaaaatcacgaacttaaaaggcagtgtgctgtatcacttagctgtcaaggcatataattctgctgggacaggcccctctagtgcaacagtcaatgtgacaacccgaaagccaccaccaagtcaaccccccggaaacatcatatggaattcatcagactccaaaattatcctgaattgggatcaagtgaaggccctggataatgagtcggaagtaaaaggatacaaagtcttgtacagatggaacagacaaagcagcacatctgtcattgaaacaaataaaacatcggtggagctttctttgcctttcgatgaagattatataatagaaattaagccattcagcgacggaggagatggcagcagcagtgaacaaattcgaattccaaagatatcaaatgcctacgcgagaggatctggggcttccacttcgaatgcatgtacgctgtcagccatcagtacaataatgatttccctcacagctaggtccagtttatgacaaaagttatctgaaggacttgctgtttataatataagcaacatttagctagttgttttgaagacacccagtactaagtaatattgttgttcaagtacatcttattactggaataaaaatgttttttgcttctttaggaatggcattatacagtacttcctcaaagcaaatctagctttgtctgaagtttctttggaaactctgcaatgcactgaagacatctgtaatatgatgttaccaaagcagtttacatatgtccttatatgcatattttttattatatatttagtgttttatagaattttttaaagttaacatataatgtagatattaattttttcctcggctgtaaaatgctatgggcaacacaatcatgcaattataatttgaaaatatttcctttaaagacagagtttgaaactcatcttggtaaataaattgcaaattactcgtacagttttacaaggatctcatggcagaacagcggaagacttggtccgtaactcaaggctgttgtatgcaaactactcttctagtggttaatgcacttgacatgtacagtatgtttcccatgccgttgtgattttgacatgtacagtatgttttcatgccgttgtgaattttgttgttcaacccaacttgagatggtttcaggaatggctgcaatctcaaaagctcaatgtactgcccaagaggcaccttgtgcaatattcccatccctgaatttagcattgtacaggaagattttcttttcactcaactgagttagcattgtctttgtggtagcattatcttagacattaaatttgaagtaacatatatcctgtagtaacatagacccaaagttactatagtcaaccaagtctttcaaaggataaaagatcattttattatctttaactgtatctattttgaatgtaaatttaaaaaaagtaattctctgtcaatggattcgtaatttctttacaaaatttcttatatataatatgtgtatctctgtaataatagagcccttcttttgaatcaaaattacatatggactttggaagattgctcctatttcaacaaatagttgctgcaagaatttttaatatgactctataaaagctctttagtacaattgtatggtttcttgatgattctgttttgcaataggtagcctagttgctttatatgctttaccttctaggtcttaaaatcacacattggaaaatgacaatatcaacaaaactgtattcttatgaaaagaactatttgttacaatgagaaaggttttgtgagtaaaccctactggacagtgacataaaaggcaatggaattttctataaacattttctcatgtaaacatgctgccaccttttcttctttctcagagaactcaaatttgctatagtttgtcatttttgcttacaaataatataacttttcaaccttctagttatatttatccaataaagtcataatcgggattccatttgtgtaaaaactagggtggtaaccggaaaaaaatattgtcagtatttcaagctgtgttcctttcttagtttgatatggttacttctatgttgaaataaaatttaaaatcacatgcaaaaaaaaaatcagcaaaataataaaatgaacgaaaaaaaatgacacccagggagttcccaaccccagtgtaaatgatatttaccagtgatctagcatatgtaatcttttttaaaggtattgttaataaatattctgtcatttgtaaaga

SEQ ID NO: 314 - protein, 282 aa, Homo sapiens
MIWMLTVLASADASRYVFRNESVHPFSPFEVKVGVFNNKGEGPFSPTTVVYSAEEEPTKPPASIFARSLSATDIEVFWASPLEKNRGRIQGYEVKYWRHEDKEENARKIRTVGNQTSTKITNLKGSVLYHLAVKAYNSAGTGPSSATVNVTTRKPPPSQPPGNIIWNSSDSKIILNWDQVKALDNESEVKGYKVLYRWNRQSSTSVIETNKTSVELSLPFDEDYIIEIKPFSDGGDGSSSEQIRIPKISNAYARGSGASTSNACTLSAISTIMISLTARSSL

SEQ ID NO: 315 - DNA, 2318 bp, Homo sapiens
ataccagatggaggctttgatttgctcaacctaattggattcaaaaaataaatgatattcacgtggccatggaagaaaatgtcttttgggaatgtaaagcaaatggaaggcctaagcctacatacaagtggctaaaaaatggcgaacctctgctaactcgggatagaattcaaattgagcaaggaacactcaacataacaatagtgaacctctcagatgctggcatgtatcagtgtttggcagagaataaacatggagttatcttttccaacgcagagcttagtgttatagctgtaggtccagatttttcaagaacactcttgaaaagagtaactcttgtcaaagtgggaggtgaagttgtcattgagtgtaagccaaaagcgtctccaaaacctgtttacacctggaagaaaggaagggatatattaaaagaaaatgaaagaattaccatttctgaagatggaaacctcagaatcatcaacgttactaaatcagacgctgggagttatacctgtatagccactaaccattttggaactgctagcagtactggaaacttggtagtgaaagatccaacaagggtaatggtacccccttccagtatggatgtcactgttggagagagtattgttttaccgtgccaggtaacgcatgatcactcgctagacatcgtgtttacttggtcatttaatggacacctgatagactttgacagagatggggaccactttgaaagagttggagggcaggattcagctggtgatttgatgatccgaaacatccaactgaagcatgctgggaaatatgtctgcatggtccaaacaagtgtggacaggctatctgctgctgcagacctgattgtaagaggtcctccaggtcccccagaggctgtgacaatagacgaaatcacagataccactgctcagctctcctggagacccgggcctgacaaccacagccccatcaccatgtatgtcattcaagccaggactccattctccgtgggctggcaagcagtcagtacagtcccagaactcattgatgggaagacattcacagcgaccgtggtgggtttgaacccttgggttgaatatgaattccgcacagttgcagccaacgtgattgggattggggagcccagccgcccctcagagaaacggagaacagaagaagctctccccgaagtcacaccagcgaatgtcagtggtggcggaggcagcaaatctgaactggttataacctgggagacggtccctgaggaattacagaatggtcgaggctttggttatgtggtggccttccggccctacggtaaaatgatctggatgctgacagtgctggcctcagctgatgcctctagatacgtgttcaggaatgagagcgtgcaccccttctctccctttgaggttaaagtaggtgtcttcaacaacaaaggagaaggccctttcagtcccaccacggtggtgtattctgcagaagaagaacccaccaaaccaccagccagtatctttgccagaagtctttctgccacagatattgaagttttctgggcctccccactggagaagaatagaggacgaatacaaggttatgaggttaaatattggagacatgaagacaaagaagaaaatgctagaaaaatacgaacagttggaaatcagacatcaacaaaaatcacgaacttaaaaggcagtgtgctgtatcacttagctgtcaaggcatataattctgctgggacaggcccctctagtgcaacagtcaatgtgacaacccgaaagccaccaccaagtcaaccccccggaaacatcatatggaattcatcagactccaaaattatcctgaattgggatcaagtgaaggccctggataatgagtcggaagtaaaaggatacaaagtcttgtacagatggaacagacaaagcagcacatctgtcattgaaacaaataaaacatcggtggagctttctttgcctttcgatgaagattatataatagaaattaagccattcagcgacggaggagatggcagcagcagtgaacaaattcgaattccaaagatatcaaatgcctacgcgagaggatctggggcttccacttcgaatgcatgtacgctgtcagccatcagtacaataatgatttccctcacagctaggtccagtttatgacaaaagttatctgaaggacttgctgtttataatataagcaacatttagctagttgttttgaagacacccagtactaagtaatattgttgttcaagtacatcttattactggaataaaaatgttttttgcttctttaaaaaaaaaaaaaaaaaa

SEQ ID NO: 316 - protein, 698 aa, Homo sapiens
MEENVFWECKANGRPKPTYKWLKNGEPLLTRDRIQIEQGTLNITIVNLSDAGMYQCLAENKHGVIFSNAELSVIAVGPDFSRTLLKRVTLVKVGGEVVIECKPKASPKPVYTWKKGRDILKENERITISEDGNLRIINVTKSDAGSYTCIATNHFGTASSTGNLVVKDPTRVMVPPSSMDVTVGESIVLPCQVTHDHSLDIVFTWSFNGHLIDFDRDGDHFERVGGQDSAGDLMIRNIQLKHAGKYVCMVQTSVDRLSAAADLIVRGPPGPPEAVTIDEITDTTAQLSWRPGPDNHSPITMYVIQARTPFSVGWQAVSTVPELIDGKTFTATVVGLNPWVEYEFRTVAANVIGIGEPSRPSEKRRTEEALPEVTPANVSGGGGSKSELVITWETVPEELQNGRGFGYVVAFRPYGKMIWMLTVLASADASRYVFRNESVHPFSPFEVKVGVFNNKGEGPFSPTTVVYSAEEEPTKPPASIFARSLSATDIEVFWASPLEKNRGRIQGYEVKYWRHEDKEENARKIRTVGNQTSTKITNLKGSVLYHLAVKAYNSAGTGPSSATVNVTTRKPPPSQPPGNIIWNSSDSKIILNWDQVKALDNESEVKGYKVLYRWNRQSSTSVIETNKTSVELSLPFDEDYIIEIKPFSDGGDGSSSEQIRIPKISNAYARGSGASTSNACTLSAISTIMISLTARSSL

SEQ ID NO: 317 - DNA, 1732 bp, Homo sapiens
gaggggcgggggctggaggcagcagcgcccccgcactccccgcgtctcgcacacttgcaccggtcgctcgcgcgcagcccggcgtcgccccacgccgcgctcgctcctccctccctcctcccgctccgtggctcccgtgctcctggcgaggctcaggcgcggagcgcgcggacgggcgcaccgacagacggccccggggacgcctcggctcgcgcctcccgggcgggctatgttgattgccccgccggggccggcccgcgggatcagcacagcccggcccgcggccccggcggccaatcgggactatgaaccggaaagcgcggcgctgcctgggccacctctttctcagcctgggcatggtctacctccggatcggtggcttctcctcagtggtagctctgggcgcaagcatcatctgtaacaagatcccaggcctggctcccagacagcgggcgatctgccagagccggcccgacgccatcatcgtcataggagaaggctcacaaatgggcctggacgagtgtcagtttcagttccgcaatggccgctggaactgctctgcactgggagagcgcaccgtcttcgggaaggagctcaaagtggggagccgggaggctgcgttcacctacgccatcattgccgccggcgtggcccacgccatcacagctgcctgtacccagggcaacctgagcgactgtggctgcgacaaagagaagcaaggccagtaccaccgggacgagggctggaagtggggtggctgctctgccgacatccgctacggcatcggcttcgccaaggtctttgtggatgcccgggagatcaagcagaatgcccggactctcatgaacttgcacaacaacgaggcaggccgaaagatcctggaggagaacatgaagctggaatgtaagtgccacggcgtgtcaggctcgtgcaccaccaagacgtgctggaccacactgccacagtttcgggagctgggctacgtgctcaaggacaagtacaacgaggccgttcacgtggagcctgtgcgtgccagccgcaacaagcggcccaccttcctgaagatcaagaagccactgtcgtaccgcaagcccatggacacggacctggtgtacatcgagaagtcgcccaactactgcgaggaggacccggtgaccggcagtgtgggcacccagggccgcgcctgcaacaagacggctccccaggccagcggctgtgacctcatgtgctgtgggcgtggctacaacacccaccagtacgcccgcgtgtggcagtgcaactgtaagttccactggtgctgctatgtcaagtgcaacacgtgcagcgagcgcacggagatgtacacgtgcaagtgagccccgtgtgcacaccaccctcccgctgcaagtcagattgctgggaggactggaccgtttccaagctgcgggctccctggcaggatgctgagcttgtcttttctgctgaggagggtacttttcctgggtttcctgcaggcatccgtgggggaaaaaaaatctctcagagccctcaactattctgttccacacccaatgctgctccaccctcccccagacacagcccaggtccctccgcggctggagcgaagccttctgcagcaggaactctggacccctgggcctcatcacagcaatatttaacaatttattctgataaaaataatattaatttatttaattaaaaagaattcttccacaaaaaaaaaaaaaaaaaa

SEQ ID NO: 318 - protein, 349 aa, Homo sapiens
MNRKARRCLGHLFLSLGMVYLRIGGFSSVVALGASIICNKIPGLAPRQRAICQSRPDAIIVIGEGSQMGLDECQFQFRNGRWNCSALGERTVFGKELKVGSREAAFTYAIIAAGVAHAITAACTQGNLSDCGCDKEKQGQYHRDEGWKWGGCSADIRYGIGFAKVFVDAREIKQNARTLMNLHNNEAGRKILEENMKLECKCHGVSGSCTTKTCWTTLPQFRELGYVLKDKYNEAVHVEPVRASRNKRPTFLKIKKPLSYRKPMDTDLVYIEKSPNYCEEDPVTGSVGTQGRACNKTAPQASGCDLMCCGRGYNTHQYARVWQCNCKFHWCCYVKCNTCSERTEMYTCK

SEQ ID NO: 319 - DNA, 2182 bp, Homo sapiens
aaaatgatggctatgtggacatgagcagctccaacacctctaagaacaatcagcagagcacagaccaggacgcagaaagacagagtcttgccctgttgcccaggctggagtatagtagtgcagtggtgtgatcatagctcactgtaacttcgaccacctgggctcaaacaatccttcttcctctgcctcccaagtagctgggactacagagcaggacccaggatgcaagaccctaggcatccccaaggccttccactgtccccaggccttccaaagagacagcggcaggaccgcacaatctacaactggaaacagcaggaagtgctagaaaatcactttaaggaggaacagtacccagactatgacacacgacaagagctggcggagatgctcaatctcagggagtaccaagtgcaggtgtggttcaagaatcgccgggccaaacgctctcgggagcggtggttccagaagcagctccagcagctccagaagcatcctcagcagcagcatcctcagcagcagcatccccagcagcagctccagcagcagcagccccagcagcagccacagcagcagcagccccagcagcagccacagcagcagcagccccagcagcagcagctccaccagcagccccagtagcagctctagcagcagcagcagcagcagccccagcagcagcaactccagtagcagctccagcagcagcagccccagcagtagctccagcagcagcagcagcagccccagtagcagctccagcagccccagtagcagctccagcagcagcagcagcagccccagtagcagctccagcagccccagtagcagctctagcagcagcagctccagcagcagcagtcccagcagcagcagccccagtagcagcggcagcagccccagtagcagcaacagcagccccagtagtagcagcagcagccccagtagcagcagcagcagccccagcccccgtagcagcagccccagcagcagcagctccagcaccagcagtcccagcaccagcagtcccagcagcagcagtcccagcagcagcagccccagcagcagctgccccagtgcagccctgggcaggaggccacagagcccacagagctcgcactgtgccccctttccctgaagctgcggcctctgccccccatcagcctggcctcttgggaattctcccacagggagaggccccatgggtattctcccacaatctgcagcctccaccaggccttgagtagctttgggtgcagagccaggagggcgtttggctgtcctaggtctagcccctggcccaatcccagccccattccaggcccactcaaaagccaaggcccaatcccaggtccaggctcaatcctaggccctggcctgattccaagccaggcttactcccaggcccaggcttagtcctagccccaatcccaggtcctggcccaatcccaaacttaggatccctcccagccccagccctagtccccttgtgacctcagagcacttatgcctccaatttcttgccagacagtcattccctgacttcacagagctcctcccacccctagaccagttcgaggaatccttggtctccaccacgacatcccagtaccaagagggggatggctctatggacaaaaagactcgggccccaagtgattaatggatttatagggggcctgtgtctgcaaagtcctgcggataccagtggacctggagtggctggttggtctacactgctggtgaatgcaccaccaccatttaaccaccctgccgctggtgggcatttgctgtcttcactgtgtggccatcacgactagctctgctatgaatgcacctgccctcatttgagttgagcctgagcatttcgcagctgggattggagtcgctgctcatggggatgtttggcattagtggatgctacttgagagctttgtaaagagctttactcagcacttctgatagtcagcattctccctgacacttaggattgtgagactttttaatgtttgtggatccaatggcttatggcttccctgatgactgagaggttgagaagttctcacatgttaattgaaccttagaaatcctcatatgtgtccatttgtttgcccatttttcttcatttatttgaatgtatttttatattctcttgataattaaagtgctgcaaacacccccc

SEQ ID NO: 320 - DNA, 1646 bp, Homo sapiens
tagtttccggctgaggttggcctggccgcggttgcgagggcgccgaggcaggcgcgcggcgggcaggcctgggagggggcgggtccgcgcgggcttcggaggagcccgccctgccagaggagagggaggtcacggcgtaaaggtgcagctgccgccaccgccgcttctgcaaggtctcagggacgggctgcagccatgtcctattgccggcaggaaggctttgcccaggatggttccttctggaatgtctattcccctccttccctccctgaagctctttgtcagggacaaaggtaggatccctccccttccgtcttctccactggatgcctgtgtcgtattcatctgtgaccaccaggtactaccacagagctggagctgaggaagggaaggatcgaatcatatttgtaaccaaagaagatcatgaaactccaagcagtgcagaattggtggctgatgaccccaacgatccatacgaggagcatggattgatactgccaaatggaaacattaactggaactgcccatgccttgggggaatggccagcggtccctgtggagaacagtttaagtcagccttttcctgcttccactatagcacggaggagatcaaggggtcagactgtgtagaccagttccgggccatgcaggaatgcatgcagaaatacccagacctctatccccaagaggatgaggatgaggaagaggaaagagagaagaagccagcagaacaagcagaagaaacagctcccattgaggccactgcaaccaaagaagaggagggatcaagttaatgaaggccacaaggcactgggcaccagtccttttggagtggaccttttgcaaaaggccttgtcatcaccttccaagaaagtttccttctgttgtcctgtgcattataatatacaaaataacttattttgatgatcagaggtcttgaggtcttgacatcttgacatatacactgaaaaaaatgggggttgtatgtatgtgtgtcctacccaaacctgtggccgccacttttgaattctcagattgccctgaattttgccacttttaaataatgtgctgaataagctcagcaactaaaaaccattacccaagaacgtttcttgtgagtgagctgatttattctgattcattatattccttttggtagattttataccccttggggaaataatacaacaaaaacatctcttaaaaatgctgggatggggccatatctactagcagaggccagatggtcagatatgatttctgcaaacccatcttgaccttgagtatgtgaaggggtactgtactttattcctgatacattttggtttccatgtaggtgttgagctcctggttttctgtgtttggatgatgaagatttggacccttccattcataatccctttctaagtgaagggagaggctggcttggctgttccttgttattccgaaagccctggtttggggcccatgttcacactggctctcagtctagtcaggtgcaatgttcttgagaggtggggacctaattattaccagagtagcagcaagagaggaaacgttgtgaattaagtattcaattaaaaggaaacatgatttctacctgaaaaaaaaaaaaaaaaaaaaaaaaaaaaaaaaaaaaaaaaaaa

SEQ ID NO: 321 - protein, 155 aa, Homo sapiens
MPVSYSSVTTRYYHRAGAEEGKDRIIFVTKEDHETPSSAELVADDPNDPYEEHGLILPNGNINWNCPCLGGMASGPCGEQFKSAFSCFHYSTEEIKGSDCVDQFRAMQECMQKYPDLYPQEDEDEEEEREKKPAEQAEETAPIEATATKEEEGSS

SEQ ID NO: 322 - DNA, 3254 bp, Homo sapiens
ggtaactgcagtaagtcccgcttggccctggagtccacgcggattttcgaagctggggctggcaagaggccgctggacaccacgctccagtcgtcagcccacttcctagctgaacagcgcgaggcggcggcagcgagccgggtcccaccatggccgcgaattattccagtaccagtacccggagagaacatgtcaaagttaaaaccagctcccagccaggcttcctggaacggctgagcgagacctcgggtgggatgtttgtggggctcatggccttcctgctctccttctacctaattttcaccaatgagggccgcgcattgaagacggcaacctcattggctgaggggctctcgcttgtggtgtctcccgacagcatccacagtgtggctccggagaatgaaggaaggctggtgcacatcattggcgccttacggacatccaagcttttgtctgatccaaactatggggtccatcttccggctgtgaaactgcggaggcacgtggagatgtaccaatgggtagaaactgaggagtccagggagtacaccgaggatgggcaggtgaagaaggagacgaggtattcctacaacactgaatggaggtcagaaatcatcaacagcaaaaacttcgaccgagagattggccacaaaaaccccagtgccatggcagtggagtcattcatggcaacagccccctttgtccaaattggcaggtttttcctctcgtcaggcctcatcgacaaagtcgacaacttcaagtccctgagcctatccaagctggaggaccctcatgtggacatcattcgccgtggagactttttctaccacagcgaaaatcccaagtatccagaggtgggagacttgcgtgtctccttttcctatgctggactgagcggcgatgaccctgacctgggcccagctcacgtggtcactgtgattgcccggcagcggggtgaccagctagtcccattctccaccaagtctggggataccttactgctcctgcaccacggggacttctcagcagaggaggtgtttcatagagaactaaggagcaactccatgaagacctggggcctgcgggcagctggctggatggccatgttcatgggcctcaaccttatgacacggatcctctacaccttggtggactggtttcctgttttccgagacctggtcaacattggcctgaaagcctttgccttctgtgtggccacctcgctgaccctgctgaccgtggcggctggctggctcttctaccgacccctgtgggccctcctcattgccggcctggcccttgtgcccatccttgttgctcggacacgggtgccagccaaaaagttggagtgaaaagaccctggcacccgcccgacacctgcgtgagccctaggatccaggtcctctctcacctctgacccagctccatgccagagcaggagccccggtcaattttggactctgcactccctctcctcttcaggggccagacttggcagcatgtgcaccaggttggtgttcaccagctcatgtcttccccacatctcttcttgccagtaagcagctttggtgggcagcagcagctcatgaatggcaagctgacagcttctcctgctgtttccttcctctcttggactgagtgggtacggccagccactcagcccattggcagctgacaacgcagacacgctctacggaggcctgctgataaagggctcagccttgccgtgtgctgcttctcatcactgcacacaagtgccatgctttgccaccaccaccaagcacatctgtgatcctgaagggcggccgttagtcattactgctgagtcctgggtcaccagcagacacactgggcatggacccctcaaagcaggcacacccaaaacacaagtctgtggctagaacctgatgtggtgtttaaaagagaagaaacactgaagatgtcctgaggagaaaagctggacatatactgggcttcacacttatcttatggcttggcagaatctttgtagtgtgtgggatctctgaaggccctatttaagtttttcttcgttactttgctgcttcatgtgtactttcctaccccaagaggaagttttctgaaataagatttaaaaacaaaacaaaaaaaacacttaatatttcagactgttacaggaaacaccctttagtctgtcagttgaattcagagcactgaaaggtgttaaattggggtatgtggtttgattgataaaaagttacctctcagtattttgtgtcactgagaagctttacaatggatgcttttgaaacaagtatcagcaaaaggatttgttttcactctgggaggagagggtggagaaagcacttgctttcatcctctggcatcggaaactcccctatgcacttgaagatggtttaaaagattaaagaaacgattaagagaaaaggttggaagctttatactaaatgggctccttcatggtgacgccccgtcaaccacaatcaagaactgaggcctgaggctggttgtacaatgcccacgcctgcctggctgctttcacctgggagtgctttcgatgtgggcacctgggcttcctagggctgcttctgagtggttctttcacgtgttgtgtccatagctttagtcttcctaaataagatccacccacacctaagtcacagaatttctaagttccccaactactctcacacccttttaaagataaagtatgttgtaaccaggatgtcttaaatgattctttgtgtaccttttctgtcatattcagaaaccgttttgtgcctgctgggagtaattcctttagcaattaagtatttggtagctgaataaggggtcagaacttctgaaaccagagatctgtaatcatctctattggcctggggtgcctgtgctataaatgagtttcttcacatgaaaaacacagccagcccaagatgacttatctgggtttaggattcaatagtattcactaactgcttattacatgagcaatttcatcaaatctccaaactcttaaaggatgctttcggaaaacacgctgtatacctagatgatgactaaatgcaaaatccttgggctttggtttttttctagtaaggattttaaataactgccgacttcaaaagtgttcttaaaacgaaagataatgttaagaaaaatttgaaagctttggaaaaccaaatttgtaatatcattgtattttttattaaaagttttgtaataaatttctaaattataaaaaaaaaaaaaaaaaa

SEQ ID NO: 323 - protein, 400 aa, Homo sapiens
MAANYSSTSTRREHVKVKTSSQPGFLERLSETSGGMFVGLMAFLLSFYLIFTNEGRALKTATSLAEGLSLVVSPDSIHSVAPENEGRLVHIIGALRTSKLLSDPNYGVHLPAVKLRRHVEMYQWVETEESREYTEDGQVKKETRYSYNTEWRSEIINSKNFDREIGHKNPSAMAVESFMATAPFVQIGRFFLSSGLIDKVDNFKSLSLSKLEDPHVDIIRRGDFFYHSENPKYPEVGDLRVSFSYAGLSGDDPDLGPAHVVTVIARQRGDQLVPFSTKSGDTLLLLHHGDFSAEEVFHRELRSNSMKTWGLRAAGWMAMFMGLNLMTRILYTLVDWFPVFRDLVNIGLKAFAFCVATSLTLLTVAAGWLFYRPLWALLIAGLALVPILVARTRVPAKKLE

SEQ ID NO: 324 - DNA, 3714 bp, Homo sapiens
cggggccggcgttctagcgcatcgcggccgggtgcgtcactcgcgaagtggaatttgcccagacaagcaacatggctcggaaacgcgcggccggcggggagccgcggggacgcgaactgcgcagccagaaatccaaggccaagagcaaggcccggcgtgaggaggaggaggaggatgcctttgaagatgagaaacccccaaagaagagccttctctccaaagtttcacaaggaaagaggaaaagaggctgcagtcatcctgggggttcagcagatggtccagcaaaaaagaaagtggccaaggtgactgttaaatctgaaaacctcaaggttataaaggatgaagccctcagcgatggggatgacctcagggactttccaagtgacctcaagaaggcacaccatctgaagagaggggctaccatgaatgaagacagcaatgaagaagaggaagaaagtgaaaatgattgggaagaggttgaagaacttagtgagcctgtgctgggtgacgtgagagaaagtacagccttctctcgatctcttctgcctgtgaagccagtggagatagagattgaaacgccagagcaggcgaagacaagagaaagaagtgaaaagataaaactggagtttgagacatatcttcggagggcgatgaaacgtttcaataaaggggtccatgaggacacacacaaggttcaccttctctgcctgctagcaaatggcttctatcgaaataacatctgcagccagccagatctgcatgctattggcctgtccatcatcccagcccgctttaccagagtgctgcctcgagatgtggacacctactacctctcaaacctggtgaagtggttcattggaacatttacagttaatgcagaactttcagccagtgaacaagataacctgcagactacattggaaaggagatttgctatttactctgctcgagatgatgaggaattggtccatatattcttactgattctccgggctctgcagctcttgacccggctggtattgtctctacagccaattcctctgaagtcagcaacagcaaagggaaagaaaccttccaaggaaagattgactgcggatccaggaggctcctcagaaacttccagccaagttctagaaaaccacaccaaaccaaagaccagcaaaggaaccaaacaagaggaaacctttgctaagggcacctgcaggccaagtgccaaagggaagaggaacaagggaggcagaaagaaacggagcaagccctcctccagcgaggaagatgagggcccaggagacaagcaggagaaggcaacccagcgacgtccgcatggccgggagcggcgggtggcctccagggtgtcttataaagaggagagtgggagtgatgaggctggcagcggctctgattttgagctctccagtggagaagcctctgatccctctgatgaggattccgaacctggccctccaaagcagaggaaagcccccgctcctcagaggacaaaggctgggtccaagagtgcctccaggacccatcgtgggagccatcgtaaggacccaagcttgccagcggcatcctcaagctcttcaagcagtaaaagaggcaagaaaatgtgcagcgatggtgagaaggcagaaaaaagaagcatagctggtatagaccagtggctagaggtgttctgtgagcaggaggaaaagtgggtatgtgtagactgtgtgcacggtgtggtgggccagcctctgacctgttacaagtacgccaccaagcccatgacctatgtggtgggcattgacagtgacggctgggtccgagatgtcacacagaggtacgacccagtctggatgacagtgacccgcaagtgccgggttgatgctgagtggtgggccgagaccttgagaccataccagagcccatttatggacagggagaagaaagaagacttggagtttcaggcaaaacacatggaccagcctttgcccactgccattggcttatataagaaccaccctctgtatgccctgaagcggcatctcctgaaatatgaggccatctatcccgagacagctgccatccttgggtattgtcgtggagaagcggtctactccagggattgtgtgcacactctgcattccagggacacgtggctgaagaaagcaagagtggtgaggcttggagaagtaccctacaagatggtgaaaggcttttctaaccgtgctcggaaagcccgacttgctgagccccagctgcgggaagaaaatgacctgggcctgtttggctactggcagacagaggagtatcagcccccagtggccgtggacgggaaggtgccccggaacgagtttgggaatgtgtacctcttcctgcccagcatgatgcctattggctgtgtccagctgaacctgcccaatctacaccgcgtggcccgcaagctggacatcgactgtgtccaggccatcactggctttgatttccatggcggctactcccatcccgtgactgatggatacatcgtctgcgaggaattcaaagacgtgctcctgactgcctgggaaaatgagcaggcagtcattgaaaggaaggagaaggagaaaaaggagaagcgggctctagggaactggaagttgctggccaaaggtctgctcatcagggagaggctgaagcgtcgctacgggcccaagagtgaggcagcagctccccacacagatgcaggaggtggactctcttctgatgaagaggaggggaccagctctcaagcagaagcggccaggatactggctgcctcctggcctcaaaaccgagaagatgaagaaaagcagaagctgaagggtgggcccaagaagaccaaaagggaaaagaaagcagcagcttcccacctgttcccatttgagaagctgtgagctgagcgcccactagaggggcacccaccagttgctgctgccccactacaggccccacacctgccctgggcatgcccagcccctggtggtgggggcttctctgctgagaaggcaaactgaggcagcatgcacggaggcggggtcaggggagacgaggccaagctgaggaggtgctgcaggtcccgtctggctccagcccttgtcagattcacccagggtgaagccttcaaagctttttgctaccaaagcccactcaccctttgagctacagaacactttgctaggagatactcttctgcctcctagacctgttctttccatctttagaaacatcagtttttgtatggaagccaccgggagatttctggatggtggtgcatccgtgaatgcgctgatcgtttcttccagttagagtcttcatctgtccgacaagttcactcgcctcggttgcggacctaggaccatttctctgcaggccacttaccttcccctgagtcaggcttactaatgctgccctcactgcctctttgcagtaggggagagagcagagaagtacaggtcatctgctgggatctagttttccaagtaacattttgtggtgacagaagcctaaaaaaagctaaaatcaggaaagaaaaggaaaaatacgaattgaaaattaaggaaatgttagtaaaatagatcagtgttaaactagattgtattcattactagataaaatgtataaagctctctgtactaaggagaaatgacttttataacattttgagaaaataataaagcatttatctaaaaaaaaaaaaaaaaaaaaaaaaaaaaa

SEQ ID NO: 325 - protein, 940 aa, Homo sapiens
MARKRAAGGEPRGRELRSQKSKAKSKARREEEEEDAFEDEKPPKKSLLSKVSQGKRKRGCSHPGGSADGPAKKKVAKVTVKSENLKVIKDEALSDGDDLRDFPSDLKKAHHLKRGATMNEDSNEEEEESENDWEEVEELSEPVLGDVRESTAFSRSLLPVKPVEIEIETPEQAKTRERSEKIKLEFETYLRRAMKRFNKGVHEDTHKVHLLCLLANGFYRNNICSQPDLHAIGLSIIPARFTRVLPRDVDTYYLSNLVKWFIGTFTVNAELSASEQDNLQTTLERRFAIYSARDDEELVHIFLLILRALQLLTRLVLSLQPIPLKSATAKGKKPSKERLTADPGGSSETSSQVLENHTKPKTSKGTKQEETFAKGTCRPSAKGKRNKGGRKKRSKPSSSEEDEGPGDKQEKATQRRPHGRERRVASRVSYKEESGSDEAGSGSDFELSSGEASDPSDEDSEPGPPKQRKAPAPQRTKAGSKSASRTHRGSHRKDPSLPAASSSSSSSKRGKKMCSDGEKAEKRSIAGIDQWLEVFCEQEEKWVCVDCVHGVVGQPLTCYKYATKPMTYVVGIDSDGWVRDVTQRYDPVWMTVTRKCRVDAEWWAETLRPYQSPFMDREKKEDLEFQAKHMDQPLPTAIGLYKNHPLYALKRHLLKYEAIYPETAAILGYCRGEAVYSRDCVHTLHSRDTWLKKARVVRLGEVPYKMVKGFSNRARKARLAEPQLREENDLGLFGYWQTEEYQPPVAVDGKVPRNEFGNVYLFLPSMMPIGCVQLNLPNLHRVARKLDIDCVQAITGFDFHGGYSHPVTDGYIVCEEFKDVLLTAWENEQAVIERKEKEKKEKRALGNWKLLAKGLLIRERLKRRYGPKSEAAAPHTDAGGGLSSDEEEGTSSQAEAARILAASWPQNREDEEKQKLKGGPKKTKREKKAAASHLFPFEKL

SEQ ID NO: 326 - DNA, 1369 bp, Homo sapiens
agtctaacttccgcgcatctacgagggccgggactgccgctacctttctggaaggcgccggccggccagtcaccggagggatcccgccagaggcggctccgcgtctccagcagcggggcagggacccgggcgccccgccctcgccagcgcccgcccccgcccgcccccggcccgccctctgtatctggcccctgggcagctgcccggggaggcggccagcgagctggggccgcgcaatgtcgcacggagccgggctcgtccgcaccacgtgcagcagcggcagcgcgctcggacccggggccggcgcggcccagcccagcgcgagccccttggaggggctgctggacctcagctacccccgcacccacgcggccctgctgaaagtggcgcaaatggtcaccctgctgattgccttcatctgtgtgcggagctccctgtggaccaactacagcgcctacagctactttgaagtggtcaccatttgcgacttgataatgatcctcgccttttacctggtccacctcttccgcttctaccgcgtgctcacctgtatcagctggcccctgtcggaacttctgcactatttaatcggtaccctgctcctcctcatcgcctccattgtggcagcttccaagagttacaaccagagcggactggtagccggagcgatctttggtttcatggccaccttcctctgcatggcaagcatatggctgtcctataagatctcgtgtgtaacccagtccacagatgcagccgtctgatgaggccacaacccctaggcccctcaggagctttgcagagaggaggacgtgtactccaggcgaggcctctggacctgtgttcctgtgccaaagtcctgtcaggctggtgggcaccaggaaaggcctgcaccctcttcctgctctcccaggaagccagctccctgagctcctgagccagccggaaactcttcctccagccttccggggagaacatccctcccattctgggaaaggaaagcagcctccagggaaatgttttctgccttcctgcttctagaaccacctcaggtactgatgaaccccacttagcacagctgaaggggtttgtgaatactcccgcctaaatcccttctacttcactcctcaggggagtgaagtgccttaagaaacaaagccctgtcctaatttatctagcttgtcagtccggtcttagagataccctctttcctgaagtgaggcgtgcctgtagaaacactatgtggtcagcctgtccccaaggagatcttgtgtctcctctccatctctgcctttgttaccagtgtgcatgtgtttgtgtgttttttaataaaatattgactcggccagttaaaaaaaaaaaaaaaaaa

SEQ ID NO: 327 - protein, 175 aa, Homo sapiens
MSHGAGLVRTTCSSGSALGPGAGAAQPSASPLEGLLDLSYPRTHAALLKVAQMVTLLIAFICVRSSLWTNYSAYSYFEVVTICDLIMILAFYLVHLFRFYRVLTCISWPLSELLHYLIGTLLLLIASIVAASKSYNQSGLVAGAIFGFMATFLCMASIWLSYKISCVTQSTDAAV

SEQ ID NO: 328 - DNA, 1270 bp, Homo sapiens
agtctaacttccgcgcatctacgagggccgggactgccgctacctttctggaaggcgccggccggccagtcaccggagggatcccgccagaggcggctccgcgtctccagcagcggggcagggacccgggcgccccgccctcgccagcgcccgcccccgcccgcccccggcccgccctctgtatctggcccctgggcagctgcccggggaggcggccagcgagctggggccgcgcaatgtcgcacggagccgggctcgtccgcaccacgtgcagcagcggcagcgcgctcggacccggggccggcgcggcccagcccagcgcgagccccttggaggggctgctggacctcagctacccccgcacccacgcggccctgctgaaagtggcgcaaatggtcaccctgctgattgccttcatctgtgtgcggagctccctgtggaccaactacagcgcctacagctactttgaagtggtcaccatttgcgacttgataatgatcctcgccttttacctggtccacctcttccgcttctaccgcgtgctcacctgtatcagctggcccctgtcgatctttggtttcatggccaccttcctctgcatggcaagcatatggctgtcctataagatctcgtgtgtaacccagtccacagatgcagccgtctgatgaggccacaacccctaggcccctcaggagctttgcagagaggaggacgtgtactccaggcgaggcctctggacctgtgttcctgtgccaaagtcctgtcaggctggtgggcaccaggaaaggcctgcaccctcttcctgctctcccaggaagccagctccctgagctcctgagccagccggaaactcttcctccagccttccggggagaacatccctcccattctgggaaaggaaagcagcctccagggaaatgttttctgccttcctgcttctagaaccacctcaggtactgatgaaccccacttagcacagctgaaggggtttgtgaatactcccgcctaaatcccttctacttcactcctcaggggagtgaagtgccttaagaaacaaagccctgtcctaatttatctagcttgtcagtccggtcttagagataccctctttcctgaagtgaggcgtgcctgtagaaacactatgtggtcagcctgtccccaaggagatcttgtgtctcctctccatctctgcctttgttaccagtgtgcatgtgtttgtgtgttttttaataaaatattgactcggccagttaaaaaaaaaaaaaaaaaa

SEQ ID NO: 329 - protein, 142 aa, Homo sapiens
MSHGAGLVRTTCSSGSALGPGAGAAQPSASPLEGLLDLSYPRTHAALLKVAQMVTLLIAFICVRSSLWTNYSAYSYFEVVTICDLIMILAFYLVHLFRFYRVLTCISWPLSIFGFMATFLCMASIWLSYKISCVTQSTDAAV

SEQ ID NO: 330 - DNA, 3962 bp, Homo sapiens
cgcgctcggcgccctgctcgccgggcagaggggaaggcggcggccggctggggatgggcggcccggctgcgccgaggggcgccgggaggctccgcgcgctgctgctggcgctggtggtcgcggggatccccgcgggcgcctacaacctcgacccgcagcgccccgtgcacttccagggccccgctgactcgttcttcggctacgcagttctggagcatttccacgacaacacgcgctgggtccttgtgggcgcaccaaaggcagattccaaatacagcccttcagtgaagtctcctggggctgtgtttaagtgccgtgttcacaccaaccctgaccggagatgcaccgaactggacatggctcgagggaagaatcggggcacgtcctgcggaaagacctgccgggaagaccgcgatgatgagtggatgggggtgagcctggcccgacagcccaaggctgatggccgtgtgttggcctgtgctcatcgctggaagaacatctactatgaagccgaccacatcctaccccatggcttctgctacatcatcccctccaacctccaggccaaaggcaggacgctgatcccttgctatgaagagtataagaagaagtacggagaggaacacggctcctgccaggctgggatagcgggcttcttcaccgaggagctggtggtgatgggtgctccagggtcattttattgggctggaaccatcaaagtgctgaaccttacggacaacacctatttaaaactgaacgacgaagtgatcatgaacaggcggtacacctacctgggctacgcagtgaccgctggccacttctctcacccgtccaccattgatgtggtaggaggtgccccacaggacaaaggcatcggcaaggtttatattttcagagctgaccgaagatcaggcaccttaattaagatctttcaagcatcaggtaaaaagatgggctcttacttcggctcctccttgtgcgcagttgacctgaatggggacggcctctctgacctgctggtgggggcccccatgttttctgagatcagggatgagggacaggtcactgtctacatcaacagaggaaatggagccctcgaggagcagctggctctgactggggatggtgcctacaatgcgcactttggagagagcattgccagcctggacgatctggacaatgatgggttcccagatgtggccattggtgcacccaaggaggatgacttcgcaggggcggtctatatctatcatggtgatgccggtgggatagtccctcagtactcaatgaaactgtctgggcagaagataaatccagtgctccggatgtttggtcagtccatatcgggaggcattgatatggatggaaatggctatcctgatgtcactgttggagccttcatgtccgacagcgtggttcttctcagagcaaggcctgtcattacggtggatgtctccatcttcctcccgggctccatcaacatcacagcgcctcagtgtcacgacggacagcagcctgtgaactgcctgaacgtcaccacctgcttcagcttccatggcaaacacgttccaggagagattggcctgaattatgttctgatggctgacgtggccaaaaaggagaagggccagatgcccagggtctactttgtgctgctgggagagaccatgggtcaggtcacagagaagctgcagctgacttacatggaggagacgtgtcgtcactatgtggcccatgtgaagcggagggtgcaggacgtcatcagcccgatcgtgtttgaagcagcctacagcctcagtgagcatgtgactggagaggaggagagggaactgccgcctctgacaccagttctccgctggaaaaagggacaaaagattgcccaaaagaatcagactgtttttgaaaggaattgccgttcagaggactgtgccgcagacctgcagcttcagggtaaactgctgctctccagtatggatgagaaaaccctgtatctagctttgggggctgtgaagaacatctccctaaacatctctatctccaacctcggagatgatgcctatgatgccaacgtgtccttcaatgtttcccgggagctcttcttcatcaacatgtggcagaaggaggagatgggcatctcctgtgagctgctggaatcggacttcctcaaatgcagcgtgggatttcctttcatgaggtcaaagtcaaagtatgaattcagcgtgatctttgatacaagccacctgtctggggaagaggaagttctcagcttcattgttactgctcagagtggcaacacggagcgctctgaatccctgcatgacaacaccctcgtgctgatggtgccactgatgcacgaggtggacacgtccatcaccggaatcatgtctccaacctcctttgtatatggcgagtccgtggacgcagccaacttcattcagctggatgacctggagtgtcactttcagcccatcaatatcacccttcaggtctacaacactggcccaagcacccttccagggtcatctgtcagcatctctttccctaatcgactctcatctggtggtgcagagatgtttcatgtccaggaaatggtggtgggccaagagaagggaaactgctctttccagaaaaacccaactccctgcatcatccctcaagaacaagaaaatatcttccacacaatatttgcttttttcacaaagtctggaagaaaagtcttggactgtgaaaaaccaggaatttcttgcctaacagcacactgtaactttagtgctcttgctaaagaagaaagtcgtactatagacatttacatgctgctgaacacagaaatactgaaaaaggacagttcgtctgtcatccagttcatgtcccgcgccaaggtgaaggtggatcctgccctaagggtggtggaaatagctcatgggaacccagaagaggtgacggtggtcttcgaggccctgcacaatctggagccccgtggctacgtcgtggggtggatcatcgccatcagtttgttggtgggaatcctcatcttcctgctgctggccgtgctgctctggaagatgggcttctttcgccgaaggtacaaagaaattatcgaagctgagaagaaccggaaagagaatgaagacagttgggactgggtccagaaaaaccagtgagctgccacaccagtcacatgacctgatcactagcctgtcatccttggtctttgtatcttccatatttggaagaaaaaaatcttctccagatttttcggaggccccactgatgctgttctcttcttcattctatcaagcccaggtgccagcctgaggcagccacttcggccaggtcacacgaccggggccagcaccacttcctttaaagatgaactctgaactttggagagtgagctacagagccgagcaatatttatggatgcaacacgcatggtcaaccctcaggggaaaactgttacctaaagtatttttataaatataagccttttatactgattatgtcttttatatttgtatcgatgttttattatttctattaaatagttatataattcactcaagcactgatatctggcctaaaatcttggaagtacatgtccatgaatacaaattttaaaggatgaaaatcttaccgtactttggaacttgctgtttaaaaagacagatgaaataagttgaagaaacctcatgtaatgaatccaccaggctggcagtggtgcatataaactgtgggtgtggcaagaccccgaagacatttcacatctttatcgcctcgatcaagtgtggagtcacatgctaatgtgtgctaaagaactgtaagtgttttttcatatgtacttttcattggaagattcccaacaagaatttggatggaaaacctgatccctagcaagaagtctgctctgtatcacctttatatagcagacatgtcaccctgcttctacacagatgatggatgaa

SEQ ID NO: 331 - protein, 1035 aa, Homo sapiens
MGGPAAPRGAGRLRALLLALVVAGIPAGAYNLDPQRPVHFQGPADSFFGYAVLEHFHDNTRWVLVGAPKADSKYSPSVKSPGAVFKCRVHTNPDRRCTELDMARGKNRGTSCGKTCREDRDDEWMGVSLARQPKADGRVLACAHRWKNIYYEADHILPHGFCYIIPSNLQAKGRTLIPCYEEYKKKYGEEHGSCQAGIAGFFTEELVVMGAPGSFYWAGTIKVLNLTDNTYLKLNDEVIMNRRYTYLGYAVTAGHFSHPSTIDVVGGAPQDKGIGKVYIFRADRRSGTLIKIFQASGKKMGSYFGSSLCAVDLNGDGLSDLLVGAPMFSEIRDEGQVTVYINRGNGALEEQLALTGDGAYNAHFGESIASLDDLDNDGFPDVAIGAPKEDDFAGAVYIYHGDAGGIVPQYSMKLSGQKINPVLRMFGQSISGGIDMDGNGYPDVTVGAFMSDSVVLLRARPVITVDVSIFLPGSINITAPQCHDGQQPVNCLNVTTCFSFHGKHVPGEIGLNYVLMADVAKKEKGQMPRVYFVLLGETMGQVTEKLQLTYMEETCRHYVAHVKRRVQDVISPIVFEAAYSLSEHVTGEEERELPPLTPVLRWKKGQKIAQKNQTVFERNCRSEDCAADLQLQGKLLLSSMDEKTLYLALGAVKNISLNISISNLGDDAYDANVSFNVSRELFFINMWQKEEMGISCELLESDFLKCSVGFPFMRSKSKYEFSVIFDTSHLSGEEEVLSFIVTAQSGNTERSESLHDNTLVLMVPLMHEVDTSITGIMSPTSFVYGESVDAANFIQLDDLECHFQPINITLQVYNTGPSTLPGSSVSISFPNRLSSGGAEMFHVQEMVVGQEKGNCSFQKNPTPCIIPQEQENIFHTIFAFFTKSGRKVLDCEKPGISCLTAHCNFSALAKEESRTIDIYMLLNTEILKKDSSSVIQFMSRAKVKVDPALRVVEIAHGNPEEVTVVFEALHNLEPRGYVVGWIIAISLLVGILIFLLLAVLLWKMGFFRRRYKEIIEAEKNRKENEDSWDWVQKNQ

SEQ ID NO: 332 - DNA, 1014 bp, Homo sapiens
atagtctccatcggccattttgtgcgagaagccgcagcgccgcctcttctctcgcgccctcgcctcttcctccgcctcctccttcgcctcttcctgcctcctcccggcttccgccgccgccactccagcctaatcccaaccccagggcgaagcgttttcttatttatttccgttttctcgccactacagcctcctgacaaggtgatccgggcgggccccgcaggaattttatcccctcaccggcctcacactagtatcgcatgtccactatccagaacctccaatctttcgacccctttgctgatgcaactaagggtgacgacttactcccggcagggactgaggattacattcatataagaatccagcaacggaacggcagaaagacactgactactgttcagggcattgcagatgattatgacaaaaagaaacttgtgaaagctttcaaaaagaaatttgcctgtaatggtactgtgattgaacatcctgaatacggagaggttattcagcttcaaggtgaccaaagaaaaaacatctgccagtttctcttggaggttggcattgtaaaggaggaacagcttaaggttcatggattctaaaatgaacctaaatacgtggagaatttcttgaatagttttgttctctaaacccggtttggctgccttgtgaaatgattccctgcagtaaacggacttttcatttatttaatcattcaaacttccattcacatctgcatgattacagaaaacatggggtatgtagactagtaacacataagaaaattgcagtaagatggtaacaaaacctcatattgtctttacatgtttccaatggaaaatgttttgagtgtttattgttcagtttattacgtttcacttgattaaatttttttgttgttgtattaaaccatgtacgttgcagcttaacaataaaaaaaaatctatgaatctttgtgagcaattatgctcccaaatctaagcaagtaaaatacacattttgtctttcttaaaa

SEQ ID NO: 333 - protein, 113 aa, Homo sapiens
MSTIQNLQSFDPFADATKGDDLLPAGTEDYIHIRIQQRNGRKTLTTVQGIADDYDKKKLVKAFKKKFACNGTVIEHPEYGEVIQLQGDQRKNICQFLLEVGIVKEEQLKVHGF

SEQ ID NO: 334 - DNA, 2807 bp, Homo sapiens
gagctgacacctccttagcgctggccgcgggccgcctctgcggcagcgctagtcgccttctccgaatcggctccgcacagctaggagaaaagatgttcactgtgctgacccgccaaccatgtgagcaagcaggcctcaaggccctctaccgaactccaaccatcattgccttggtggtcttgcttgtgagtattgtggtacttgtgagtatcactgtcatccagatccacaagcaagaggtcctccctccaggactgaagtatggtattgtgctggatgccgggtcttcaagaaccacagtctacgtgtatcaatggccagcagaaaaagagaataataccggagtggtcagtcaaaccttcaaatgtagtgtgaaaggctctggaatctccagctatggaaataacccccaagatgtccccagagcctttgaggagtgtatgcaaaaagtcaaggggcaggttccatcccacctccacggatccacccccattcacctgggagccacggctgggatgcgcttgctgaggttgcaaaatgaaacagcagctaatgaagtccttgaaagcatccaaagctacttcaagtcccagccctttgactttaggggtgctcaaatcatttctgggcaagaagaaggggtatatggatggattacagccaactatttaatgggaaatttcctggagaagaacctgtggcacatgtgggtgcacccgcatggagtggaaaccacgggtgccctggacttaggtggtgcctccacccaaatatccttcgtggcaggagagaagatggatctgaacaccagcgacatcatgcaggtgtccctgtatggctacgtatacacgctctacacacacagcttccagtgctatggccggaatgaggctgagaagaagtttctggcaatgctcctgcagaattctcctaccaaaaaccatctcaccaatccctgttaccctcgggattatagcatcagcttcaccatgggccatgtatttgatagcctgtgcactgtggaccagaggccagaaagttataaccccaatgatgtcatcacttttgaaggaactggggacccatctctgtgtaaggagaaggtggcttccatatttgacttcaaagcttgccatgatcaagaaacctgttcttttgatggggtttatcagccaaagattaaagggccatttgtggcttttgcaggattctactacacagccagtgctttaaatctttcaggtagcttttccctggacaccttcaactccagcacctggaatttctgctcacagaattggagtcagctcccactgctgctccccaaatttgatgaggtatatgcccgctcttactgcttctcagccaactacatctaccacttgtttgtgaacggttacaaattcacagaggagacttggccccaaatacactttgaaaaagaagtggggaatagcagcatagcctggtctcttggctacatgctcagcctgaccaaccagatcccagctgaaagccctctgatccgtctgcccatagaaccacctgtctttgtgggcaccctcgctttcttcacagcggcagccttgctgtgtctggcatttcttgcatacctgtgttcagcaaccagaagaaagaggcactccgagcatgcctttgaccatgcagtggattctgactgagccttcaaagcagctcctggagtccaatggctgcttagagtcagcctgggtggcaccaggcaatgcaggtgaagtggctgccttcaggaaatacaactaactaaaatcaaacacctaggtcacgtgcctctcaaatactgatttctgccacagcacctcttgaggcatcccttggctattctgtgcatattgttcttcagagacctcactacccacatgctgatctattggggaacagagaagagacaggccacgaaggtcaggctctttatattaagttccccagaggaagagtaagttgagaaggtatcagtttaatgttgaagaattgacctcagggctcagtttccatttccctccctcagtattcttcctggcaagatacccattaagcatttcgccaatcagaatctcattttatagtttttcccattggtctttaactaagactttcttgtagcaatctcgtaagcagtgaaccccctcagatcagtagaatatagtatctgggggagaagacttacttccttcagggcagcagccacagccaggcttctgtcatacaggtagatcccgaagcacagagacataaaaaaggtctcccagaaaactatagaccattctccaagtggaattcccacttagggctctggtcactagattgcaacctgtgtgtttgtcatcatcctcatctcaccattgtattgctatgccctcccataaaaacacattgatccctagcaagattattgcattccagattttactgcctttgctaggcttttgcttagcaaagggctgactttccattgttatcatggtgtatatatttttgtcaccattcccacaagtatacttgatgttgtcatagaacgaacatcctactctatgatttactaaccaattactttcccagatcatagacctctctgcatagtagtcataggtcttgactttggggaaagaaaaggaagctgcaggaatatttatctccaaagtcgaatgagaaagaactccagcaaatccaatggctacaaactaaaaatcagcattatttcatattgctgtttcttagctgaatatggaataaagaactattattttattttgaaaaaaaaaaaaaaa

SEQ ID NO: 335 - protein, 529 aa, Homo sapiens
MFTVLTRQPCEQAGLKALYRTPTIIALVVLLVSIVVLVSITVIQIHKQEVLPPGLKYGIVLDAGSSRTTVYVYQWPAEKENNTGVVSQTFKCSVKGSGISSYGNNPQDVPRAFEECMQKVKGQVPSHLHGSTPIHLGATAGMRLLRLQNETAANEVLESIQSYFKSQPFDFRGAQIISGQEEGVYGWITANYLMGNFLEKNLWHMWVHPHGVETTGALDLGGASTQISFVAGEKMDLNTSDIMQVSLYGYVYTLYTHSFQCYGRNEAEKKFLAMLLQNSPTKNHLTNPCYPRDYSISFTMGHVFDSLCTVDQRPESYNPNDVITFEGTGDPSLCKEKVASIFDFKACHDQETCSFDGVYQPKIKGPFVAFAGFYYTASALNLSGSFSLDTFNSSTWNFCSQNWSQLPLLLPKFDEVYARSYCFSANYIYHLFVNGYKFTEETWPQIHFEKEVGNSSIAWSLGYMLSLTNQIPAESPLIRLPIEPPVFVGTLAFFTAAALLCLAFLAYLCSATRRKRHSEHAFDHAVDSD

SEQ ID NO: 336 - DNA, 936 bp, Homo sapiens
cttctcgcctaacgccgccaacatggtgagtcttactgttgcgggctccggggccgtcgaccatgccgctcgacctccacctccgctgggaagctgaggcgccgaacggctcccagagggtcccgggaagcgcatggtgttcaggcgcttcgtggaggttggccgggtggcctatgtctcctttggacctcatgccggaaaattggtcgcgattgtagatgttattgatcagaacagggctttggtcgatggaccttgcactcaagtgaggagacaggccatgcctttcaagtgcatgcagctcactgatttcatcctcaagtttccgcacagtgcccaccagaagtatgtccgacaagcctggcagaaggcagacatcaatacaaaatgggcagccacacgatgggccaagaagattgaagccagagaaaggaaagccaagatgacagattttgatcgttttaaagttatgaaggcaaagaaaatgaggaacagaataatcaagaatgaagttaagaagcttcaaaaggcagctctcctgaaagcttctcccaaaaaagcacctggtactaagggtactgctgctgctgctgctgctgctgctgctgctaaagttccagcaaaaaagatcaccgccgcgagtaaaaaggctccagcccagaaggttcctgcccagaaagccacaggccagaaagcagcgcctgctccaaaagctcagaagggtcaaaaagctccagcccagaaagcacctgctccaaaggcatctggcaagaaagcataagtggcaatcataaaaagtaataaaggttctttttgacctgttgacaaatgtatttaagcctttggatttaaagcctgttgaggctggagttaggaggcagattgatagtaggattataataaacattaaataatcaaaaaaaaaaaaaaaaaaaa

SEQ ID NO: 337 - protein, 215 aa, Homo sapiens [sequence omitted]

SEQ ID NO: 338 - DNA, 854 bp, Homo sapiens
acatgcgcagggttgggcgggtcttcttccttctcgcctaacgccgccaacatggtgttcaggcgcttcgtggaggttggccgggtggcctatgtctcctttggacctcatgccggaaaattggtcgcgattgtagatgttattgatcagaacagggctttggtcgatggaccttgcactcaagtgaggagacaggccatgcctttcaagtgcatgcagctcactgatttcatcctcaagtttccgcacagtgcccaccagaagtatgtccgacaagcctggcagaaggcagacatcaatacaaaatgggcagccacacgatgggccaagaagattgaagccagagaaaggaaagccaagatgacagattttgatcgttttaaagttatgaaggcaaagaaaatgaggaacagaataatcaagaatgaagttaagaagcttcaaaaggcagctctcctgaaagcttctcccaaaaaagcacctggtactaagggtactgctgctgctgctgctgctgctgctgctgctaaagttccagcaaaaaagatcaccgccgcgagtaaaaaggctccagcccagaaggttcctgcccagaaagccacaggccagaaagcagcgcctgctccaaaagctcagaagggtcaaaaagctccagcccagaaagcacctgctccaaaggcatctggcaagaaagcataagtggcaatcataaaaagtaataaaggttctttttgacctgttgacaaatgtatttaagcctttggatttaaagcctgttgaggctggagttaggaggcagattgatagtaggattataataaacattaaataatcaaaaaaaaaaaaaaaaaaaa

SEQ ID NO: 339 - protein, 215 aa, Homo sapiens [sequence omitted]

SEQ ID NO: 340 - DNA, 2200 bp, Homo sapiens
aatgcttccgtcttggccaccttgcgagcgctcgggttgagtttcccgggcttccctgactcggctacctgttctggaggtcaggctttgggcccttgcagaggtcgccgaggggcccgcgccgccgccagagcctgggcccagtccccagtcttcagagacgccctcgaccttcctgctccgaggagctggcctgatgtcctcgggtcgcgctccgcaggttcttacttttccaaacctagagggcagtgcatgaagccaggggtcatcagccatgctccagacagtgtggttccagggcttgggcaggaacctgttgtttcaggagccagtaacctttgaggatgtggctgtgtacttcacccagaatgaatgggccagcctgcaccctacgcagagggccctatacagggaggtgatgctggagaattatgcaaatgtgacttccttgtcagcatttccattccccaaaccagatctgatattccagctggagcaaggagaagcagcatggggcccagatccctggacacttgctgggggagaggccctgagaggcatgtgcacaggctggagtgcaatggcgtgatcttcactcaccgcaacctctgccttccaggtggtaaaaccaagactgagaatgaggaaaaaactgcacagctaaacatttctaaagaatcagagtcccacagactgatagtggagggactgctgatggacgttccccagcaccctgacttcaaggacaggttagagaagtcacagctacatgatacagggaataaaacaaagataggggattgcacagatttgacagtccaggatcatgaatcttccaccactgaaagggaggagatagccaggaaattggaagaaagtagtgtcagcacacatctcattacaaagcagggttttgccaaagaacaggtgttttataaatgtggtgagtgtggcagttactacaacccacattcagactttcacctgcatcagagagttcacactaatgagaagccctacacatgcaaagaatgtgggaaaaccttcagatataactcaaaactgtcacggcatcagaaaatccacactggagagaaaccatactcatgtgaggaatgtggacaagccttcagtcaaaattcccaccttcttcagcatcagaagctccatggtggacagaggccctatgaatgtactgactgtggtaaaaccttcagttataattcaaaactgattcggcatcagagaatccatactggggagaagccctttaaatgtaaggaatgtgggaaagccttcagttgtagctatgactgcatcatccatgaacgaattcacaatggggagaagccctatgaatgtaaggagtgtgggaagagtttgagttctaattcagttctgattcagcatcagagaatccacactggggagaaaccttatgaatgtaaagagtgtggcaaggccttccaccgcagttcggtatttcttcagcaccagaggttccacactggggaacaactctacaaatgtaatgaatgttggaaaactttcagctgtagctcccgcttcatagtgcatcagagaatccacaatggggagaaaccctatgaatgccaggaatgtgggaagacattcagtcaaaagatcactctggttcagcatcagcgagttcacactggggagaaaccttatgagtgtaaggagtgcgggaaagccttcagatggaatgcaagtttcatccagcatcagaagtggcatactaggaagaaactcatcaatggaacagggctatccgcagttaagccctactgtccctgcgccatcctctctcctctgcctccccaacatacctgctctgccctagccccaccagggcctcccttatcttcttcacatgcagtggtacttcctccctctgtgcctttcttcctgctgcttccctcatctgaaaaggccaacccttcacctgtccaaatagcacatttttttcaggatctcgcttttcctgggaagtcatcccttcagagcccgaatcctttgtctcactccctgtaagccccgtcacgttctcaaaatcctttgcacctcaagttagggattccactggtctcctgattgtgtctattgatattcctctggtcttgtcttgtataagttgttactgttttcctaacttcattttaaattctcacgcttaagg

SEQ ID NO: 341 - protein, 560 aa, Homo sapiens
MGQPAPYAEGPIQGGDAGELCKCDFLVSISIPQTRSDIPAGARRSSMGPRSLDTCWGRGPERHVHRLECNGVIFTHRNLCLPGGKTKTENEEKTAQLNISKESESHRLIVEGLLMDVPQHPDFKDRLEKSQLHDTGNKTKIGDCTDLTVQDHESSTTEREEIARKLEESSVSTHLITKQGFAKEQVFYKCGECGSYYNPHSDFHLHQRVHTNEKPYTCKECGKTFRYNSKLSRHQKIHTGEKPYSCEECGQAFSQNSHLLQHQKLHGGQRPYECTDCGKTFSYNSKLIRHQRIHTGEKPFKCKECGKAFSCSYDCIIHERIHNGEKPYECKECGKSLSSNSVLIQHQRIHTGEKPYECKECGKAFHRSSVFLQHQRFHTGEQLYKCNECWKTFSCSSRFIVHQRIHNGEKPYECQECGKTFSQKITLVQHQRVHTGEKPYECKECGKAFRWNASFIQHQKWHTRKKLINGTGLSAVKPYCPCAILSPLPPQHTCSALAPPGPPLSSSHAVVLPPSVPFFLLLPSSEKANPSPVQIAHFFQDLAFPGKSSLQSPNPLSHSL

SEQ ID NO: 342 - DNA, 2102 bp, Homo sapiens
aagctttccccggtgtcggcggcaggtggaatttccacgctttatctgcgcctgcgccgcgcgggattcgcggtccgagctgaagaggttcgcggtccggtttcacttctccgaaccctgaggcagtgtgtgaagctgggacgccagccatgttccagaccgcttggcgccaggaaccagtgacctttgaggatgtggctgtgtacttcacccagaatgaatgggccagcctggactctgtgcagagggccctgtacagggaagtgatgctggagaattatgcaaatgtggcttccctggcattcccattcaccacgcctgttctggtctcccagctggagcaaggggaactgccatggggcctcgatccctgggaacctatgggcagggaggctctcagaggtatctgtccaggggatgaggccagaactgagaaggaaggattaactccaaaggatcatgtgtccaaagaaacagagtccttcagactgatggtggggggcctgccagggaatgtttcccagcaccttgactttgggagcagcctagagcagccacaaggtcattggataattaagacaaagtcaaagaggagacatttcacagatacctcagccaggcaccatgaggcctatgaggtcaagaatggagagaagtttgagaaattaggaaaaaatattagcgtcagcacacaactcactacaaatcagacaaatcctagtggtcagatatcttatgaatgtggacaatgtggcagatatttcattcaaatggcagacttccaccgacatgagaaatgtcacactggtgaaaagtcttttgaatgcaaagaatgtggaaaatacttcagatataactcattacttattcggcatcagataattcacactggaaagaaaccatttaaatgtaaagaatgtggaaaaggtttaagttcagacacagccttgattcagcatcagagaatccacactggagaaaagccctatgaatgtaaggagtgcggcaaggccttcagtagcagctctgtcttcctccagcaccagaggttccacactggggagaagctctatgaatgtaacgaatgttggaaaactttcagttgcagctcaagtttcactgtccatcagcgaatgcacactggggagaaaccttatgaatgtaaagagtgtggaaaacgattaagctccaacacagccttgactcagcatcagcgaattcacactggggagaagccctttgaatgtaaggagtgtgggaaggcattcaatcagaaaataaccctgattcagcaccagcgagttcacactggcgagaaaccttatgagtgtaaagtgtgtggtaaaaccttcagctggtgtggaagattcattctgcatcagaaactacacactcagaagacacctgtccaagcatagggctatccatagttaggcccactgtgcctctccttttttctctttattttcatgctttttatcagtgtcctcgctgtccttcctggttagacacttggctttcatcatgaactcttctttaagttttttgaacctgtttccccaacatgaagtctctttatggttagagaagaccaaaaaacaaacaaacaaacttagaaacaaaaaggaaatgtaagtttccagatttaaaggacatgctgggtgcccagcaggatggattcaagggaaacctacattaaggaaaattgctgtgaattatgaaaacaccaagtttgaataagaggatcatggagaaaaaatgagaccctaaaaagtttctagagagagaaaacaaaagatcagaaatgaaagcggggccaggcgcggtggctcgtgcctgtaatcccagcactttgggaggctgaggcgggtggatcatgaggtcaggagttcgagaccagcccgcccaatatggtgaaaccccgtctctcctgaaaaaaaaaaaacacaaaaattagccaggcatggtggcgcatgcctgtaatcccagctactagagaggctgaggcaggagaatcacttgaatccctgaggcagaggttgcagtgagctgagatcgcaccactgcactccagcctgggcgacagagtgagactttgtctc

SEQ ID NO: 343 - protein, 422 aa, Homo sapiens
MFQTAWRQEPVTFEDVAVYFTQNEWASLDSVQRALYREVMLENYANVASLAFPFTTPVLVSQLEQGELPWGLDPWEPMGREALRGICPGDEARTEKEGLTPKDHVSKETESFRLMVGGLPGNVSQHLDFGSSLEQPQGHWIIKTKSKRRHFTDTSARHHEAYEVKNGEKFEKLGKNISVSTQLTTNQTNPSGQISYECGQCGRYFIQMADFHRHEKCHTGEKSFECKECGKYFRYNSLLIRHQIIHTGKKPFKCKECGKGLSSDTALIQHQRIHTGEKPYECKECGKAFSSSSVFLQHQRFHTGEKLYECNECWKTFSCSSSFTVHQRMHTGEKPYECKECGKRLSSNTALTQHQRIHTGEKPFECKECGKAFNQKITLIQHQRVHTGEKPYECKVCGKTFSWCGRFILHQKLHTQKTPVQA

SEQ ID NO: 344 - DNA, 8287 bp, Homo sapiens
ggggcgggtctggccacggggcgaccgagatggcggcctccgggggcctagagggaccctgggcgtgcactcgcccttccggctcggcctttagttagtgaccagctcctcggcgttctgcagagcgtgggtttcagcgagttctacgtgccaggtccgcccggtgccggcttcctcgctgcccctggcggctcgtcagcccccactacccctgaacttggtcccaatggcggcccgcccctccttcacccggaccgtgggcatctgggcctcgccgaagccgtcaaggtggctgctcgggcttctagagcccgtgtccagccctttgccaccgaggcctgatcctcttttctgccctaaagaacttgccctgacagcctctggctcccgctcttgaggatcttgcttgtccaaacccagaagacagtgcatgaagccaggggacatccgccatgctccaaacaacttggcctcaggagtcagtgacctttgaggatgtggctgtttacttcacccagaatcaatgggccagcctcgaccctgcgcagagggccctgtacggggaggtgatgctggagaattatgcaaatgtggcttctctggtagcgtttccattccccaaacctgctctgatctcccacctggagagaggggaagcaccatggggcccagatccctgggacaccgagattctgagaggcatcagtcaaggtggtgagtcctggatcaaaaatgaagggctagttataaagcaggaagcctctgaagaaacagagttgcacagaatgccagtaggaggacttctcaggaacgtttctcagcactttgattttaaaaggaaggcactgaagcagactttcaatctaaatccaaatctgatacttcgaggtggaatgaagttctatgaatgtaaagaatgtgggaaaatcttccgatataactcaaagcttattcggcatcagatgagtcatactggggaaaagccctttaagtgtaaggagtgtggcaaagctttcaagtccagctatgattgtattgtacatgagaaaaaccacattggagaagggccctatgaatgtaaggagtgtggcaaaggtttgagttccaacacagccttgactcaacatcagaggatccacactggagagaaaccctatgaatgtaaagagtgtggaaaggctttccgtaggagtgcggcatacctgcagcatcagagattacacacgggagagaaactctataaatgtaaggaatgttggaaagctttcggttgtaggtcactttttattgtccatcagagaattcatactggggagaaaccttatcaatgtaaggagtgtggcaaagccttcacccagaaaatagcctccattcagcatcagagagttcacactggggagaagccttatgaatgtaaggtgtgtgggaaagccttcaaatggtatggaagttttgttcagcatcagaaattgcaccctgtggagaagaagccagtcaaggtccttgggccatccctggtcagtccccagtgctcctctccagccatacctcctgttcttctccagggatcctgttctgcttcagccgtagctgtgccttcactgacctttccacatgctgtgctcattcctacctctgggaattttttcatgctgctgcctacatctggaataccttcttcatctgcccaaatagtgcgtgtcttccagggtcttactcccactgtgaaaccttccccagttattctcaccccttcttctcactcctcatgagctttatcttggcagtcttacggctcttatgcctagcaaatctccagcctaattttatatatttttttgagaaagggtcttgctctgtcacccaggctagagtgcggtggtgtgatcttggctcactgcaacctccccctcctgggttcaagcgattctcctccttcagactctcgaatagctgggattacaggcacgcctcaccacgcccagctaatttctgtatttttagaagagatggggtttcgccatcttggccaggctggtctcaaacacctgacctcaagtgatccgcctgccttggccccccaaagtgctgggattacaggagtgagccactgtgcccagcctccaacctaatttgagtttcatttgtatttttttcatcaccttacatgtgttaacagctgtttcaacataaactccattataatctatatacatttaaagaccgtgtttacataatctcttctgggtagaaaatggaaatacttaacctttgcattggtccctttcaggcttgaacaacagtggctgtatctgcatcgtggggttgctggtggtagaacactttggtgttaggaaagtttggaaaagaggatatccctgtattaggccattatgattagagataagcagcctgggagaaacatacaagacctgtggctactggtagagaattggaataagcttccaacaatggactgtagagattaatggagattgtttagtgggcccatggctaggtggggtattaatacagttgaagttatgttgcccttggcacagatctttgagaatctcatacatctgtgaaaaagataatgtgaaataaacagtaaaaaaaaaaagtatgttgatggcagtgagagtaatcatgtctttaaacgtgaagtttttttttctttagttttgctcttgatagctagatgtttcttttaacttttatttcgtaagtaaatatacacaaaggcattcatctttgttgaatctgttgtgcagatttttcttgatgagcattctgtttttttttctttgtgagcactggcttctatattttatttcatatttatgaattataaatatgaatttaattactaaagaaataaaaataatggtgtaaagccaactcgaggggaatctgaataagcttccaaaatttttttttttaagaaataaagggagctgtgtagtgggtcagtggctaggtaggttagtgaagtggaatttggggttgctcttggaagtggccttgatgaggatcctttacaactattcagaggactgtgtgaagtagttactggaaaaagaacttgaattatgcatttattggcattaatgtaaacagtaagtcctaagctttgatggaagggtccatacattttttttttttttttgctgatgttgctatctagatgtttctctatagcaattaatagcaaaacctttacattcttggtttttaaactttaccatgtgtctgaattacatagtgtgcttgtaaaaagaagagttttctctcttgcacaaattctgattttggctatctgtggtgatggccagatctttagcatggaccatactttgagagatatgcttcaaacagaaaatgcccacccctcctcctttacccagcataaactctatggttaattcttaaaataatgccttacagtctccattaactcccttgcccttctcttgctttgtcatgctcgcttggcaaaacctcatctctgactaaatgcagttctttgccttctctgttcctgcaccaaaaatgatcaggagaaagcatattaccaggctgaactgtcactttaaattcatgaccagtaacttcatggaggcccttaacgtttcctgatggtcatactacaatttttggagtccacttaactcccctgctttcctaggccactactttatactttctctcttctgtaacttccaaagcatccctctcagttctcatgctcagctgatggttatgtttctgccttcggcgagagaacagcaagctccagaaagtggctgcgccttcagccccgtgctagaatgagaacatatggagccaacttgagttcggaagggctgtggccacctcgtttcgcccatctacttttcaccttgccgtatctgattcttcaccaccgtattctcagtcacttccactaaacagtgccagtgttttaaggttctgtcacactcagtaacccacttctggttcctcattccgtgtcagtgatcagcagtagactgaagaatctaccttagatttgctccatactattaattagcttacaaaatgtctaagaggagctaagctgggatgccacataggcagaagccaggaaaaatgaccaaccacagaaccaagtggttccagtggaaactcagcagctgctggtgcctgctactggactgccaccccccattgaagagactggaccaccaggaaggtcgtttcacattctgtagtaaaaatacccctacaatcattttggtagggtcttctgtcttcagccagggtgtacctgctcggtgggagttggttatatatgtatgtccaagttgcaggggcttctgggaaatacaggttttggattctgcctgggaagagagtcatagtatgaagaagtctgaaaatggggaagggattttcagaatatgttgagcagctgtaaaatatcagatacccattataggcattgaaggttacctaaatgacagaaggatgcactatattcatgggtaggaaagattagtttcatcaagatttcaatttttatcaattcataaattaaaaacaatataaaaattccagaggggtgtgtgtatagagaggcaaaggacacagagtagctaacctagttttgaagaacaagatggggggttttatgctaccagatattatatacaatgatcatcaaacacagaacaaagcaaaaaacaaactccccaaacccaagttgaaacaaaaaaaacccccagactgtaatagtattattattattttttaagatggaatcttgctctgttgctcaggctggagtgcagtggtgcaatcttggctcactgcaacctacacctcccgggttcaagtgattctcttgcctcagcctcctgagtagtgtgtgccaccacgcccagctaattttttaatttttagtagagacagggtttcaccatgttggccaggctggtcttgaactcctggcagcctcaagtgatccacccacctcggtctcccaaagtgttgggattacaggcgtgagccactgcacctggcctgtaacatgatttgctgaaatttttaaaaatcttaaataatgtactgtttagaaatatacatattttatacaaaattataaagaaagcatagagaggtaagcattagtggcacagctgagaaaatataaaaggtagttctgtctctatcctgtctcctttattctgctactgctctcattctgtctcatcccaggaatccagtcccaagtgctgcctgccaatcgtccagcaccctccacctttgccacctatttcttgttgtaaaacagatgtttgtttctaaaatataatgaattaatgattatcaaagtacaggcatacctcattttattgcagtttgttttattgtgtcttgcggatattgcattttttacaaactgaaggtttgtggcaggcctgtgttgagcaagactatcagtgccattttttttcaacagcatgtgctcatttcatttttctgtgtcttacacagaaacttaaaatatttcaaacttttcattatatgtgttttggtgattagtgacttttatgtttctattgtaattgttttggggtgccacagactgcatccatctaagacagtgagcttagttgatgtgtgtgtgtgtgttctgattactccactaactgatggttccccatctctctccctctcctcagacctcactattctctcagacacaacagtattgaaattagaccaattgataaccttacaaacacctttaagtgtttaagtgaaaaagtcacatgcctctcactttaaatcaaaagctagaaatgattaagcttagtgaggaaggctaatgtcaacagctgagataggccaaaagctagactgcttctgccaaacagtcaagttgtgaatgcaaaagaaaagttcttgaaggaaatgaaaagtacttctccagggaacacatgaacgataataaagtggccaggtgcagtggctgacacctagaatcccagcacttcggggagccaaagcgggaggatcccctgaagccaggagtccgagaccagcttgggccacaaagtgagacccctgtctctacaaaaaattaaaaatttagctgggtgtggttgtgcatgcctgtagtccgatctacttgggaggctgaagtgagaggatccctttagccagggagttcgagactgcagtgagctatgattgtgccactgcactctagcctgtgtgacagaatgaaaccaaaaaaagtgaaacagcattattactgatatggagaaagttttaggggtctggatcaaaccaaccacaaattcccttaagccaaaacctaatccagagcaaggccataactgccattgtatgaaggctgagagaagtgaggaagctgcaggaaagtttgaagctagcagaggttggttcatgaggtttaagaagtcatcttatcataaaagtgcaaggtgaagcagcaagtgctggtgtagaagctgtagcaatttatccagatctagctaagttaattgatgaagttgctacaccacgagattttcagtgtattccaaacagccttcttttggaagaagaaaccatctaggactttcatggagaagagaagttaatccctggcttaaaagcatcaaaggacagctcgtctctcttgttaggggttcatgcagctggtaactttaagttgaagccaatgctcatttaccattcagaaaatcctagggcccataagaattatgctaaatccactctgcctgtgctctagaaatggaagatcaaagcctggatgacagcacatctgtttacagcatggattactgaatattttaagcccactgttgagacctactaaatattaggaaaaaagaattctgtcaggtgtggtggctcacacttgtaatcccaacactttgggaggccaaggcaggtggatcagttgaggtcaggagtttgagaccagcctgaccaacatggagaaaccctatctctactaaaaatacaaaaattagctggatgtggtggtgtgtgcctgtaatcccagctacttgggaggctgaggcaggagaattgcttgaatccagaggcagaggttgcagtgagctgaggttgcaccactgtgcttcagcctgggtaacagagtgagactgtctcaaaaaaaaaaaaaatttagttccaaatattactgctcgttgataatgtgtctggtcacccaagagttctgatggagatgtacaaagagattaatgtttttatgtctgctaaacaacatccattctgcaggatccattactccatgggtcaaggagtaattttgactttcaagtattatttaaggaatacattttgtaaggctgtggctgccatagtggttgttctgtacaaagtaacttgaaaaccttctggaaaggattcatcattctagatgccattaaggacatttgtgattcatgggagaaggtcaaaatatcaacattaacaggagttcagaagacattgacctcaaccctgatggatgatcttgaggggttcaagacttcagtggacgaagtaactgcagatgtggtggaaatagcaagataactagacttagaagtggaacctgcatatgtgactgaattgctgcaatctcatgataaaacgtgaacaaatgaggagttgcttctaatataagagccacaaaagtggtttcttgagatggaaactactcctggtgaagatcctgtgaccattgttgaaatgacaacaaaggacttagaatattacataaacttagttgataaaacagcagcagagtttgagaggattgacttcaattttgaagaatgttccactgtgggtaaaaggctatccaacagcaacacatgctacagataaatctttcggaaaggaagagtcagttgatgttgcagccttccttgttgtctcatttaaagaaatctctagagccacactaaccttcagcaaccaccacaccgatcattcagcagccatcaacagtgaggcaagactgtcttccagcaacaaagactcactgaagacttagattatcgttaacatcttttagcaataaaatatttttaaattaaagtatgtacattgtcagatataatgctattgcaaacttaatagactataatatagattaaacataacttttataggtactggaaaataaaaataattgtgtgactcccaaaaaaaaaaaaaaaaaaaaaaaaaaaaaaaaaaaaaaaaaaaaaaaaaaaaa

SEQ ID NO: 345 - protein, 439 aa, Homo sapiens
MLQTTWPQESVTFEDVAVYFTQNQWASLDPAQRALYGEVMLENYANVASLVAFPFPKPALISHLERGEAPWGPDPWDTEILRGISQGGESWIKNEGLVIKQEASEETELHRMPVGGLLRNVSQHFDFKRKALKQTFNLNPNLILRGGMKFYECKECGKIFRYNSKLIRHQMSHTGEKPFKCKECGKAFKSSYDCIVHEKNHIGEGPYECKECGKGLSSNTALTQHQRIHTGEKPYECKECGKAFRRSAAYLQHQRLHTGEKLYKCKECWKAFGCRSLFIVHQRIHTGEKPYQCKECGKAFTQKIASIQHQRVHTGEKPYECKVCGKAFKWYGSFVQHQKLHPVEKKPVKVLGPSLVSPQCSSPAIPPVLLQGSCSASAVAVPSLTFPHAVLIPTSGNFFMLLPTSGIPSSSAQIVRVFQGLTPTVKPSPVILTPSSHSS

SEQ ID NO: 346 - DNA, 4860 bp, Homo sapiens
cctgttagcgcacaggcacgggaggcttcttccggctcggccgtgctgctcagcgggtgtaaacagcctctgcggtgtaaacagcctctgcggtgtaaacagccgcggcgggcaggccaggactgtcagtgcccgcccctcggggcaggtaatttcatgctcccaaaatgggacataaagtggttgtcttcgacatttctgtcatcagagccttgtgggaaactcgtgtcaagaagcacaaagcttggcagaagaaggaggtggaaaggcttgagaagagcgccttggagaagataaaggaggagtggaactttgtggccgaatgcaggaggaagggcatcccccaggctgtatactgcaagaatggcttcatagacaccagcgtgcggcttctggacaagattgaaaggaacactctcacaaggcagagttcacttcccaaggacagaggcaaacggagcagtgcgtttgtgtttgaactttctggggagcactggacggagctcccagattcattgaaggagcagacacacctgagagaatggtacataagcaataccttgattcaaatcattcctacatatattcagttatttcaagagatgagaattctggatctgccaaaaaaccaaatctcacatcttccagcagaaatcggttgtttgaagaacctgaaagaactcaatgtgggtttcaactatctgaagagcattcctccagaattgggagattgtgaaaatctagagagactggattgttctggaaatctagaattaatggagctgccctttgaattaagtaatttgaagcaagttacatttgtagatatctcagcaaacaagttttccagtgtcccaatctgtgtcctgcggatgtcgaatttgcagtggttggatatcagcagcaataacctgaccgacctgccgcaagatatagacaggctagaggagctgcagagctttctcttgtataaaaacaagttgacctaccttccctattccatgctgaacctgaagaagctcactctgttagtcgtcagtggggaccatttggtggagctcccaactgccctttgtgactcatccacacctttaaaatttgtaagccttatggacaatcctattgataatgcccaatgtgaagatggcaatgaaataatggaaagtgaacgggatcgccaacattttgataaagaagttatgaaagcctatattgaagaccttaaagaaagagaatctgttcccagctataccaccaaagtgtcttttagccttcaactttgatatccatcagaagactgcaaatctcactattctctggagctatatataaatctttgttatgatcatgtcatataggaagaatggcttgtgcttaaggacaaagtctagaaaccactatcatagttgctaaaaaaaatggttttcaaatgtcaaatacatgagtatctccctccatggactggagaattgaaaaattggtttgtatattgatatttccaggttcatttgcatatacttttttccaaataatgcacatttaatatgttttaaaatgtcttatttttaagaattataactaaaagaccaaatactgaagttaagtgcattgttttcaggaatcaaaagataaaggggccgggtgtggtggctcacacctgtaatcccagcactttgggaggccgaagtgggtggatcacctgaggtccggagttcgaggctggtttggccagcatggcgaaaccccatctctactaaaaatacaaaaaattagctgggcatggtggcagttgcctgtaatcctagctactcaggaggctgaggcaggagaatcgcttgaacctgggaggtggagttgcagtgagccgagatcatgggactgcactccagcctgggtgacagagccagactctgtctcaaaaaaaaaaaaaaagaaaagaaaaagataaagggattgtgaaaagagcatttatattggactaatcagatgagagtgttttgttattttgaaagagtttcttttactgagaataatcttccttgagtttatataaactgctatttccatatgttttaagttatattttggcaagtgtagactcccaggagagacttgtaggtacaatctaggccttgaagaaacaaaggctggaatatctgcccatgctttgggcatgagatgctcagatggtgcgtgggtagatctagttgaggaagtgtgggcctggctgttcatgggaagtcttcagtggccttcatggatggccatccagtcctgagtggtcaccctgggggtcctgggacacacctcagtaaagagcaaaggcaacgccctcagggtcccttcctccaagatggccatgtagggtaatggagatgaccagtccacactgataaggagttcctagcaaggcttccttgtgggtaccacaggacaactctgcccatagcaaagatgcttcagtccagagggagcccatgggctgtttgaatttgggagaggtgggattcattacaagactttgggctcttatgtcacatcacatgatttggagaaattagacacaatctcttatttttataccactgtcttgggctaaaataaacaggttgtggctgatggtgttgaagataaataagcttaaacaaataactttggccgggcacggtggctcacacctataatcccagcactatgggaggctgaggcaagcaggttgtttgagcccaggaatttgagaacaggattttgagaacagcttggacatcatgacgaaaccccatctccacaaaaaaattcaaaaaattagccaggtgtggtggcatgtgcctgtggtcccagctactcaggaggctgaggtgggaaaatcacttgagcccaggaggtcgaggctgcagtgtgctgtgattgtgacactgccctccagcctgggtgacagagtgagaccctgtctcaaaagcaaaacaaacagcaataacaatattattattgttataactaaaaaaaaaaaaacaaaaacaagcagcttttgtgactaagaaggaaaatatgcatatagtggcatatttttatatgaatcatctcctctgtggtcttgcccagtaccatccagtggagctttctgcagtgacggaaatgttctgtatttgcgttgtccaacgtggtaaaccagacacatgtgattcttgagcacttgaacaatgactgatgtgattgaagaacccatctttcaattcaattaaatttaaatagccacatttaactccagccttgggtttgacctgatggaaaattcccatgagagagtgctccaaaccgttccaaggtggggccagttgcgattctaaaggaagaagcactaaatggcagggtgatcagtccaaagcatttatgaggggagcttacatacagcatgggctgcagcgtccttgtgatgggcagtgagacaagggatgttctacctgggcatgtccccagcgagggggttgggggatggagttcacatgaagatgtaaggaatttgggtgggggctgggctggcttctacatgtttagcaacacggctgatctttcagtgtttccagcaacaacctaagcaccgttatcagtgcctaggaatgttcaaggcccaggctggggttcagacctgcagaggaaaacatcagctggctgggtcaaggcaccatgtgttacttggtcaggacagagacaaaaatgaggaaaactaggggaccccacacacatgtggctaccatactcctgaacaggtctagctagttatttgtttttttggaagttaatctggggtagaaatgtatggtgatttttattttctctgtctgaagaaccagccatttttaaaaaggttattattgacatcccaatattttgtcttggtgggcttactcataagtccaaacattttattctcaacaggtgtaaaacaggcagagcattctaaaaccacatggtagtgctttggtggaggactgcttccacttagaaacaaactctgagaagtaggctaagagaagacaagagggccgggcgcggtgactcacgcctataatcccagcactttgggaggccgagatgggtgaatcatgaggtcaggagttcgagaccagcctaaacaacatagtgaaaccctgtctctattaaaaatgcaaaaaattagccgggcgtggtgggcacccgtaatcccagctactcaggaggctgaggcaggagaattgcttgaacccaggaagcagaggttgcagtaagctgagatcccaccattgcactccagcctgggcaacagagtgagactccatctcaaaaaaaaaaagagagagagatgaaaagagtaggaaaatgagaaatcaccttcgttgaatcttaaatagttacatttttttctttttaacactaaaaatacaattcaaatttattagctctactacttgaatgattttggaattttatgtcatgctaaggtatgtgttacatatggccaagtggaaaatatatctgaagaggggctttcatacaaatagactgttcataatttatgtaaattttattttaataaaatcagttttttgtttaaaaaccttgtttcactgtcacatatgaaaaaaatactgcattgatatataattatttcatgttacataataacccaaaacaaataattacttgaatatgtttgtagagatactatttaatttattcatataaatgtgcagaaagattccaaaggagaatatatatcttgtgaaaatatggagatttgaaaatttgacatgatgcaaatagactgatacataatttggaaaggttctttacatggcagaatacatgtatgaatattaaagt

SEQ ID NO: 347 - protein, 371 aa, Homo sapiens
MGHKVVVFDISVIRALWETRVKKHKAWQKKEVERLEKSALEKIKEEWNFVAECRRKGIPQAVYCKNGFIDTSVRLLDKIERNTLTRQSSLPKDRGKRSSAFVFELSGEHWTELPDSLKEQTHLREWYISNTLIQIIPTYIQLFQEMRILDLPKNQISHLPAEIGCLKNLKELNVGFNYLKSIPPELGDCENLERLDCSGNLELMELPFELSNLKQVTFVDISANKFSSVPICVLRMSNLQWLDISSNNLTDLPQDIDRLEELQSFLLYKNKLTYLPYSMLNLKKLTLLVVSGDHLVELPTALCDSSTPLKFVSLMDNPIDNAQCEDGNEIMESERDRQHFDKEVMKAYIEDLKERESVPSYTTKVSFSLQL

SEQ ID NO: 348 - DNA, 1946 bp, Homo sapiens
aaagaggagaacctccgcttaccacagccgggtagaaatgcctgaggaaagcagcggagctgaccgtgccagcatttacacagggaacacttcttgggcagccaggtgtcatggggcacagacccacagttcctgagaatgaacaggtaatttcatgctcccaaaatgggacataaagtggttgtcttcgacatttctgtcatcagagccttgtgggaaactcgtgtcaagaagcacaaagcttggcagaagaaggaggtggaaaggcttgagaagagcgccttggagaagataaaggaggagtggaactttgtggccgaatgcaggaggaagggcatcccccaggctgtatactgcaagaatggcttcatagacaccagcgtgcggcttctggacaagattgaaaggaacactctcacaaggcagagttcacttcccaaggacagaggcaaacggagcagtgcgtttgtgtttgaactttctggggagcactggacggagctcccagattcattgaaggagcagacacacctgagagaatggtacataagcaataccttgattcaaatcattcctacatatattcagttatttcaagcgatgagaattctggatctgccaaaaaaccaaatctcacatcttccagcagaaatcggttgtttgaagaacctgaaagaactcaatgtgggtttcaactatctgaagagcattcctccagaattgggagattgtgaaaatctagagagactggattgttctggaaatctagaattaatggagctgccctttgaattaagtaatttgaagcaagttacatttgtagatatctcagcaaacaagttttccagtgtcccaatctgtgtcctgcggatgtcgaatttgcagtggttggatatcagcagcaataacctgaccgacctgccgcaagatatagacaggctagaggagctgcagagctttctcttgtataaaaacaagttgacctaccttccctattccatgctgaacctgaagaagctcactctgttagtcgtcagtggggaccatttggtggagctcccaactgccctttgtgactcatccacacctttaaaatttgtaagccttatggacaatcctattgataatgcccaatgtgaagatggcaatgaaataatggaaagtgaacgggatcgccaacattttgataaagaagttatgaaagcctatattgaagaccttaaagaaagagaatctgttcccagctataccaccaaagtgtcttttagccttcaactttgatatccatcagaagactgcaaatctcactattctctggagctatatataaatctttgttatgatcatgtcatataggaagaatggcttgtgcttaaggacaaagtctagaaaccactatcatagttgctaaaaaaaatggttttcaaatgtcaaatacatgagtatctccctccatggactggagaattgaaaaattggtttgtatattgatatttccaggttcatttgcatatacttttttccaaataatgcacatttaatatgttttaaaatgtcttatttttaagaattataactaaaagcccaaatactgaagttaagtgcattgttttcaggaatcaaaagataaaggggccgggtgtggtggctcacacctgtaatcccagcactttgggaggccgaagtgggtggatcacctgaggtccggagttcgaggctggtttggccagcatggcgaaaccccatctctactaaaaatacaaaaaattagctgggcatggtggcagttgcctgtaatcctagctactcaggaggctgaggcaggagaatcgcttgaacctgggaggtggagttgcagtgagccgagatcatgggactgcactccagcctgggtgacagagccagactctgtcccaaaaaaaaaaaaaaaaaaaaaaaaaaaaaaa

SEQ ID NO: 349 - protein, 371 aa, Homo sapiens
MGHKVVVFDISVIRALWETRVKKHKAWQKKEVERLEKSALEKIKEEWNFVAECRRKGIPQAVYCKNGFIDTSVRLLDKIERNTLTRQSSLPKDRGKRSSAFVFELSGEHWTELPDSLKEQTHLREWYISNTLIQIIPTYIQLFQAMRILDLPKNQISHLPAEIGCLKNLKELNVGFNYLKSIPPELGDCENLERLDCSGNLELMELPFELSNLKQVTFVDISANKFSSVPICVLRMSNLQWLDISSNNLTDLPQDIDRLEELQSFLLYKNKLTYLPYSMLNLKKLTLLVVSGDHLVELPTALCDSSTPLKFVSLMDNPIDNAQCEDGNEIMESERDRQHFDKEVMKAYIEDLKERESVPSYTTKVSFSLQL

SEQ ID NO: 350 - DNA, 2033 bp, Homo sapiens
ggagaatccccggaaaggctgagtctccagctcaaggtcaaaacgtccaaggccgaaagccctccagtttcccctggacgccttgctcctgcttctgctacgaccttctggggaaaacgaatttctcattttcttcttaaattgccattttcgctttaggagatgaatgttttcctttggctgttttggcaatgactctgaattaaagcgatgctaacgcctcttttccccctaattgttaaaagctatggactgcaggaagatggcccgcttctcttacagtgtgatttggatcatggccatttctaaagtctttgaactgggattagttgccgggctgggccatcaggaatttgctcgtccatctcggggatacctggccttcagagatgacagcatttggccccaggaggagcctgcaattcggcctcggtcttcccagcgtgtgccgcccatggggatacagcacagtaaggagctaaacagaacctgctgcctgaatgggggaacctgcatgctggggtccttttgtgcctgccctccctccttctacggacggaactgtgagcacgatgtgcgcaaagagaactgtgggtctgtgccccatgacacctggctgcccaagaagtgttccctgtgtaaatgctggcacggtcagctccgctgctttcctcaggcatttctacccggctgtgatggccttgtgatggatgagcacctcgtggcttccaggactccagaactaccaccgtctgcacgtactaccacttttatgctagttggcatctgcctttctatacaaagctactattaatcgacattgacctatttccagaaatacaattttagatatcatgcaaatttcatgaccagtaaaggctgctgctacaatgtcctaactgaaagatgatcatttgtagttgccttaaaataatgaatacaatttccaaaatggtctctaacatttccttacagaactacttcttacttctttgccctgccctctcccaaaaaactacttcttttttcaaaagaaagtcagccatatctccattgtgcctaagtccagtgtttctttttttttttttttttgagacggagtctcactctgtcacccaggctggactgcaatgacgcgatcttggttcactgcaacctccgcatccggggttcaagccattctcctgcctaagcctcccaagtaactgggattacaggcatgtgtcaccatgcccagctaatttttttgtattttagtagagatgggggtttcaccatattggccagtctggtctcgaactctgaccttgtgatccatcgatcagcctctcgagtgctgagattacacacgtgagcaactgtgcaaggcctggtgtttcttgatacatgtaattctaccaaggtcttcttaatatgttcttttaaatgattgaattatatgttcagattattggagactaattctaatgtggaccttagaatacagttttgagtagagttgatcaaaatcaattaaaatagtctctttaaaaggaaagaaaacatctttaaggggaggaaccagagtgctgaaggaatggaagtccatctgcgtgtgtgcagggagactgggtaggaaagaggaagcaaatagaagagagaggttgaaaaacaaaatgggttacttgattggtgattaggtggtggtagagaagcaagtaaaaaggctaaatggaagggcaagtttccatcatctatagaaagctatataagacaagaactcccctttttttcccaaaggcattataaaaagaatgaagcctccttagaaaaaaaattatacctcaatgtccccaacaagattgcttaataaattgtgtttcctccaagctattcaattcttttaactgttgtagaagacaaaatgttcacaatatatttagttgtaaaccaagtgatcaaactacatattgtaaagcccatttttaaaatacattgtatatatgtgtatgcacagtaaaaatggaaactatattgacctaaaaaaaaaaaaa

SEQ ID NO: 351 - protein, 188 aa, Homo sapiens
MDCRKMARFSYSVIWIMAISKVFELGLVAGLGHQEFARPSRGYLAFRDDSIWPQEEPAIRPRSSQRVPPMGIQHSKELNRTCCLNGGTCMLGSFCACPPSFYGRNCEHDVRKENCGSVPHDTWLPKKCSLCKCWHGQLRCFPQAFLPGCDGLVMDEHLVASRTPELPPSARTTTFMLVGICLSIQSYY

SEQ ID NO: 352 - DNA, 2364 bp, Homo sapiens
agttgccggcgttgggttgtgcgagacgctaactgtaccctccgggtttaacgctgtgaggcagcagcgcgggggaactggggataagcgccccggagcccccaaacagagcgcggccgctgggggacagcgcgcggcgccgggtcggggcggggcggcttttctgtcggaggacgcgaaccggcacgctgcgcctttaaggagtccagctgggctgggcgccggagctgggagcggcgcgggtaggagcccggcggcaggtcccagcccggggctagagaccgagggccggggtccgggcccggcggcgggacccaggcggttgaggctggtcaggagtcagccagcctgaaagagcaggatggatcttgatgtggttaacatgtttgtgactgcgggcggcacgctggccatcccaatcctggcatttgtggcttcatttcttctgtggccttcagcactgataagaatctattattggtactggcggaggacattgggcatgcaagtccgctatgttcaccatgaagactatcagttctgttattccttccggggcaggcctgggcacaaaccctccatcctcatgctccacggattctctgcccacaaggatatgtggctcagtgtggtcaagttccttccaaagaacctgcacttggtctgcgtggacatgccaggacatgagggcaccacccgctcctccctggatgacctgtccatagatgggcaagttaagaggatacaccagtttgtagaatgcccgaagctgaacaaaaaacctttccacctggtaggcacctccatgggtggccaggtggctggggtgtatgctgcttactacccatcggatgtctccagcctgtgtctcgtgtgtcctgctggcctgcagtactcaactgacaatcaatttgtacaacggctcaaagaactgcagggctctgccgccgtggagaagattcccttgatcccgtctaccccagaagagatgagtgaaatgcttcagctctgctcctatgtccgcttcaaggtgccccagcagatcctgcaaggccttgtcgatgtccgcatccctcataacaacttctaccgaaagttgtttttggaaatcgtcagtgagaagtccagatactctctccatcagaacatggacaagatcaaggttccgacgcagatcatctgggggaaacaagaccaggtgctggatgtgtctggggcagacatgttggccaagtcaattgccaactgccaggtggagcttctggaaaactgtgggcactcagtagtgatggaaagacccaggaagacagccaagctcataatcgactttttagcttctgtgcacaacacagacaacaacaagaagctggactgaggccccgactgcagcctgcattctgcacacagcatctgctcccatcccccaagtctgacgcagccaccactctcagggatcctgccccaaatgcggtcggagcgccagtgaccctgaggaagcccgtcccttatccctggtatccacggttccccagagctttggggaccacgcgaaaacctccaagatatttttcacaaaatagaaactcatatggaacaaaataagaaaccccagccatgaaatctaccatgaagtcttcaagttcatgtcactgagaagcttgtgcaaagcagccaccttggaccataattaaatcaaggacattttctttgagacattccttatagttggagactcaagatatttttgttgcatcaggtgtattcccttgcatgggcagtggcttttataggagcattagtcctcattcgctgaaccctgttgtttaggtctaatttaagttttacatagagacccatgtatgactgcagcccattggctgcaagaccagggaggaaagtggcaagctgtagaaaatgtttacacgcatggaggggcattgctctagccctcagagcgtccggagcagcagggtacatgggtgggaggttcattcagcacccaccagtcaggtatgttctgagtgaacccacagcagtcgcagaatgagcacctggcagggtgggtttcctaggaataatttattatttttaaaaataggcctaataaagcaataatgttctagacatctgtctaagtaatcagactcaggttccacacacaagcaacaactcgtgggcctcttttctatttcaatgtgctactaagaacccttggatgtaacatactagttagttaatgaattctgtgaattctgtgaagagtaatgtgattgaaaataagtctaaacagctgtaaaagtgaccacaatgacatgaaataaatttaataagtctagatcagcaaaaaaaaaaaaaaaaaaaaaa

SEQ ID NO: 353 - protein, 337 aa, Homo sapiens
MDLDVVNMFVTAGGTLAIPILAFVASFLLWPSALIRIYYWYWRRTLGMQVRYVHHEDYQFCYSFRGRPGHKPSILMLHGFSAHKDMWLSVVKFLPKNLHLVCVDMPGHEGTTRSSLDDLSIDGQVKRIHQFVECPKLNKKPFHLVGTSMGGQVAGVYAAYYPSDVSSLCLVCPAGLQYSTDNQFVQRLKELQGSAAVEKIPLIPSTPEEMSEMLQLCSYVRFKVPQQILQGLVDVRIPHNNFYRKLFLEIVSEKSRYSLHQNMDKIKVPTQIIWGKQDQVLDVSGADMLAKSIANCQVELLENCGHSVVMERPRKTAKLIIDFLASVHNTDNNKKLD

SEQ ID NO: 354 - DNA, 3264 bp, Homo sapiens
atccgcctgggcgtcacgcttcgtggggcgggacgaggagaagccaaacgtaaagacaccaggagtttctcgggcccagctgtggctgctgccggggagccccaagccttggcgggtccttgcggcgaataggagtctggtcaggcgtcaggctagtccgacgaagagtgggtgtgatcagcactggaaaagatgcctgcccctgctgccacatatgaaagagtagtttacaaaaacccttccgagtaccactacatgaaagtctgcctagaatttcaagattgtggagttggactgaatgctgcacagttcaaacagctgcttatttcggctgtgaaggacctgtttggggaggttgatgccgccttacctttggacatcctaacctatgaagagaagaccttgtcagccatcttgagaatatgtagcagtggtcttgtcaaattgtggagctctttgaccctgttaggatcctataaaggcaaaaaatgtgctttccgggtgattcaggtttctccatttcttcttgcattatctggtaatagtagggaactagtattggattgaatgaatagtcttccattttggaaacgttcatccactctcatatttattttttggtgcctgcatgtttgaagactgaagcaggctaaaagctcttgatgaaatttgagggtgctgaagatgttcccactaatttccagccatcacctttggtggggtgggcttcggaggacagtctgtctgaacctgccagtgctgaccctgcagcactttcagcatatgcacatcaaagttggagaccgcgctgaacttaggagggccttcacacagactgatgtggctaccttctcagaattaacaggggatgtcaatcctttgcatttgaatgaagactttgcaaaacacaccaagtttggaaatacaattgtacatggagttttgatcaacggacttatctcagctctcctaggaactaaaatgccagggccaggctgtgtatttctttcccaggaaattagctttccagcccctttatatattggagaagttgttttagcttctgcagaagtgaaaaagctgaagcggttcattgctattattgcagtgtcatgttctgtaatagaaagtaaaaagactgttatggaaggctgggttaaagttatggttccagaagcttccaaatcctgaaatagatgttttaaagatgcaacctcaaacaccaatgctgttgttaaagagcctatggggaattgctgctctttaccaaagaatggttgataggcccagaagcccatcttagttaggggaagggagcaggaagagggttgttcaaatgcccactttccagtttggccttatgcttcatgcagacttgagtgtatgcaggatttcattatctgcctgggttttttgtttgttttttgttttttaattcaagaagtaggctgggcccggtggctcatgcctgtaatcctggcactttgggaggctgcggcaggcggatcacttgaggtcaggagtccaagaccagcctggccaacatggtgaaaccccatctctaccaaaaaaaaaaaaaaaaaaaaagtgcaactagctgtgcttggtgacttggccctgtagtcccagttgcttgggaggctgaggtgggagaattgcttgggcctgagagctggaggttatggtgagaaactgagattgcaccactgcactgtagcctgagtgacagagcgagaccctgtctcaagaaagaagtattgggaaggttatttaaagactctacttttaaatcaggcgtggcagctcacgcctgtaatcccagcattttgggaggctgaggcaggcgaatcacttgaggtcaggagttcaagaccagcctggccaacatgtgaaaccccatctctactaaaaatacaaaaactaaccgggcatggtggcgggcacctgtaatcccagctacttgggaggctgaggcaggagaatctcttgaacctgggaggttgcagtgagctgaaatcacaccactgcacttcagcctgggtgacagagcaaaactccacctcaaaaaaaaaaaaaagattctacttttagaaattcagacctagatagatttgcatttggataacaaatccctacctatagccatgtggaagcagcttgtcactgtattttaactgtgtaacaattattgaaggcgaaaatagaagttgggtcatctttgaacacctaccttttatcaatgaatatttttagactgttcttcagtatctgagtcagagtttattgtaatttgttatttacaccaaggtggcatcttagtctaccttcagtgagacttgcgtttcaggggaggggcgtatgtgcatcctcggtctcagttatgtaaacggtctgatctgtaaaatagtggtagcacatgccatgtgggatagttggtggagatgatagatggagttaagcacagggcccagcctgtcagcagtagctactattattgttgcccatttcccctgcaactgaggtgagaggttttcctgagtttgaagctgactggcccacagttaaacgtaacagaccagtttttcagggtgtcagccaacctctattagtgttcttaagtacagtttctgttataaaagttcagattattccttgaaaatttggatctacctcccattattatgagtaatacatgcttatagtaaaaaaaaaaaaattgtaagaaataaatattaagaagattatggaggccaaattcttaagactttgggggctggggtcagggaggttatattgaaggggagatgtgcctaacatgttactactaaatggccatcccaacacagccaacacttttgtttcccatttttttttgtttcccgttttttaataaaattgagatataattcacataccataaaattcaccttttaaaagtgtacagtttagtggttttcagaatatccacaaagttgtacaaccatcaccaaatcaattttttatagcatttttcatcacccccaaaagaacctcccattagcagtcaatccatttctctcctccagtctttgggaatcaccagtctactttctgtctctatgggtttccctgttctggacatttcataaaagttcatacaatgtatgatcctttggaactggcttctttgatatagcatgttttcagggttcatccatgttacagcatgtatcagtacatcattttattttatggctgaataatattccattgtatttacccata

SEQ ID NO: 355 - protein, 124 aa, Homo sapiens
MPAPAATYERVVYKNPSEYHYMKVCLEFQDCGVGLNAAQFKQLLISAVKDLFGEVDAALPLDILTYEEKTLSAILRICSSGLVKLWSSLTLLGSYKGKKCAFRVIQVSPFLLALSGNSRELVLD

SEQ ID NO: 356 - DNA, 2048 bp, Homo sapiens
gtgttgacagcggcggcggtggaaccgggcgggcggcgggagtcggcgcctcgggttcctacctcgcgtccctaggcggcggcggccgggcgtcccgggatggccttcatggagaagccgccagccggcaaggtgctgctggacgacacggtgccgctgacagcagccatcgaggcgagccagagcctgcagtcccacacggaatatattattcgagtgcaaagaggaatttctgtggaaaacagctggcagattgttagaagatacagtgactttgatttgcttaacaacagcttacagattgcaggcctaagtctacctcttcctcccaaaaaattgattggtaacatggatcgtgaattcatagctgaaaggcagaaaggtcttcagaactatctcaacgtgatcacaacaaatcatatcttgtctaattgtgagctggttaagaagtttttagatccaaacaactattccgcaaactatactgagattgccttgcaacaggtttccatgttcttccgatcagaaccaaagtgggaggtggtggaacctttgaaagacataggttggagaataaggaagaaatatttcttgatgaagattaaaaatcagccaaaggaacggctagtgttaagctgggctgaccttggcccagacaagtatttgtcagataaagattttcagtgtctaatcaaacttctgccttcttgtttgcacccttacatctatcgggttacctttgccacagctaatgaatcctcagcgttgctaattaggatgtttaacgaaaagggaacattgaaggatctgatctacaaggcaaaaccaaaagacccatttctaaagaagtactgcaaccctaagaagattcagggcctggaactccagcaaataaaaacatatggacggcaaatattagaggtactgaagtttcttcatgacaagggattcccttatgggcatcttcacgcctccaatgtgatgctcgatggggacacttgccggctgctggaccttgagaattccttattgggcctgccttccttctaccgatcttatttttcacaattcaggaaaatcaatacattggaaagtgtggatgtccactgctttggccacttactgtatgaaatgacttatggacgaccgccagactcggtgcctgtggactccttccctcctgccccgtccatggctgtggtggccgtgttggagtctacgctgtcttgtgaagcctgtaaaaatggcatgcctaccatctcccggctcttacagatgccattattcagcgatgttttactaaccacttctgaaaaaccacagtttaagatccctacaaagttaaaagaggcattgagaattgccaaagaatgtatagagaagagactaattgaggaacagaaacagattcaccagcatcgaagactgacaagagctcagtcccaccatggatctgaggaggaaagaaaaaaaagaaagattttagctcgaaagaagtcaaaacgatctgctcttgaaaatagtgaagagcattcagcgaagtacagcaactccaataattcagcaggatctggggccagctcacctctcacgtccccgtcatcgccaactccaccctctacatcagggatatctgcattacctccacctcctccacctccaccaccaccagcagctcccttgcctcctgcgagcaccgaggcacctgcccagctctcgtctcaggctgtgaatggcatgagccgaggggccttgctcagctccatccagaatttccaaaaaggaactttgaggaaagccaaaacctgtgatcacagtgctccgaagatcggctgaagcttcctgtttacacttggagggaaaagttcttttttattcctactcacccctaccccccaaactaccctcttcctgggaaagtaattgctgagccagtacagccacaaacagtactattttgcagatgctcatgtaagcagcttttcgagagaaataattctttaagcagaataaagttaggctggcatgcaaaaaaaaaaaaaaaaaaa

SEQ ID NO: 357 - protein, 578 aa, Homo sapiens
MAFMEKPPAGKVLLDDTVPLTAAIEASQSLQSHTEYIIRVQRGISVENSWQIVRRYSDFDLLNNSLQIAGLSLPLPPKKLIGNMDREFIAERQKGLQNYLNVITTNHILSNCELVKKFLDPNNYSANYTEIALQQVSMFFRSEPKWEVVEPLKDIGWRIRKKYFLMKIKNQPKERLVLSWADLGPDKYLSDKDFQCLIKLLPSCLHPYIYRVTFATANESSALLIRMFNEKGTLKDLIYKAKPKDPFLKKYCNPKKIQGLELQQIKTYGRQILEVLKFLHDKGFPYGHLHASNVMLDGDTCRLLDLENSLLGLPSFYRSYFSQFRKINTLESVDVHCFGHLLYEMTYGRPPDSVPVDSFPPAPSMAVVAVLESTLSCEACKNGMPTISRLLQMPLFSDVLLTTSEKPQFKIPTKLKEALRIAKECIEKRLIEEQKQIHQHRRLTRAQSHHGSEEERKKRKILARKKSKRSALENSEEHSAKYSNSNNSAGSGASSPLTSPSSPTPPSTSGISALPPPPPPPPPPAAPLPPASTEAPAQLSSQAVNGMSRGALLSSIQNFQKGTLRKAKTCDHSAPKIG

SEQ ID NO: 358 - DNA, 1045 bp, Homo sapiens
atgccacaaaaccatggcccacaccttgacagtacattcagtcactggatgattttgtattgaagtctgtaagttcaagaactaaaacaatccaaaacggctactacaggtgaagttgagagcaatggcccaacctcagctgtatctaccagaaccctttaagattgcctacagaaaagttggacagtgccgaagattccagcaactcaagaagaaaaatggctcattcaaaaggaaggggatagaaagatggcatagagctgtgtctaccaacttactaaaacaaaatgtattggtccctaaagaggaatcatccagtgatagtgacatgggatttcatgaaagccagcaaaatcagaaaagtaatttgaagacgaaagtgaagactgcttttgggaggatgctgtcctacaagtatagaagcaagccagcatgtgccagccaagagggctccactgaccataaagaagccctcctgtcaaacacgcagagccttctccctaggattgtcaaggagttttcatctcccaagttatttacagcaaaaatgagaaagctctcagagaatgcgactatacaacttgatgttgtagaggcagagacagaggagataacccagggaaacacactccttcgggccaggagaaccaccaagcggttatctgtgacatctcttccttcaggactgcaaaaggggccatattcaccaaaaaagagaccacactttccagcacttaaaaaaaagaagcgtggcatggaaaacatccttcgaaaatcagatttgacagtaggaaagcttcaaatgcaggtggatgacctcatagaaacagtgactgataaatccatgaagctactggcccaaagacatgctgagcttcaacagtgctggccgtggtggctcacgcctgtaatctcagcactttgggaggccgagcgagtggatcacttgatgtctggagttcaaaaccagcctggccaacatggtgaaaccctgtctctactaaaaatacaaaaattatccaggagtggttcatggtcctcctaa

SEQ ID NO: 359 - protein, 306 aa, Homo sapiens [sequence omitted]

SEQ ID NO: 360 - DNA, 1937 bp, Homo sapiens
cccgaatgcactggagtggggatggtccatcggcaactataaactgattctcatcaggaaactgcacattatctccccatcacttcaaaggtctcgtcaggcagaggtgacgccaggagatgatttaaaggtgaaaatgacaaggtttccacccctcaaaccttggctccttttctgacaatacagtctgaatgaacccgatgtctttttttttactgtggaaataggatcggaagagagtaacatttttttttttttaatcctgataaagaagattgttgggaagctctttgaaaaaaaattttaaattgtggcacagatggattttaaaaagtgttagatctttccaatgaacactaatagagtactctgctcttggctggatttttcagagaatggcaatggtctctgcgatgtcctgggtcctgtatttgtggataagtgcttgtgcaatgctactctgccatggatcccttcagcacactttccagcagcatcacctgcacagaccagaaggagggacgtgtgaagtgatagcagcacaccgatgttgtaacaagaatcgcattgaggagcggtcacaaacagtaaagtgttcctgtctacctggaaaagtggctggaacaacaagaaaccggccttcttgcgtcgatgcctccatagtgattgggaaatggtggtgtgagatggagccttgcctagaaggagaagaatgtaagacactccctgacaattctggatggatgtgcgcaacaggcaacaaaattaagaccacgagaattcacccaagaacctaacagaagcatttgtggtagtaaaggaaaaccaaccctctggaaaatacattttgagaatctcaaacatctcacatatatacaagccaaatggatttcttacttgcactttgactggctaccagataatcacagtgcgtttactgtgtgtaacgaaatatcctacagtgagaagacacagcgttttggcaacaccatggaaagtgggcttaaaaaagggttttctcagtgaaatttttgggcatcatgaagaacgatcaactatcttctaatttgaatctatagttactttgtaccatttgaaatatatgtatatatatatatataatattttgaaatattatctattctcttcaagaaatgaacagtaccacagtttgagacggctggtgtacccctttgagttttggatgttttgtctgttttgctttgttttgttagtcatttctttttctaacggcaaggaagatatgtgcccttttgagaattcaagatggcactgacacgggaaggccagctacaggtggactcctggaatttgaggcatcataatgatactgaatcaagaacttccttctgcttctaccagatggcccaaggaagcacatcgtcctgttttattgctttctaccctgtgcaatattagcatgcaagcttggcttacatagtcatactttatattcaattgatatataataaccgttctaacctcttccaggaaaatatttttagaactactagcttttccacttagaagaaaatgaggattcttaagggagccactccaccatgctattaagactctggcagagttatgggtaggatatggatccctacatgaataagtcctgtaaatacaatgtcttaaggctttgtatagctgtcctagactgcagaaatgtcctctgattaaatccaaagtctggcatcgttaactacatagtgctgtagcaacaagtcttatcatggcatctctttctatgtttggtttgctttttccaagagtattcaggtctcctcttgtgagataggaaggccatgaaaacaattagatttcaagatgatctatgtgaccaaatgttggacagccctattaaagtggtaaacaacttctttctaaaaaaaaaaaaaaaaaaaaaaaaa

SEQ ID NO: 361 - protein, 133 aa, Homo sapiens [sequence omitted]

SEQ ID NO: 362 - DNA, 4161 bp, Homo sapiens
gcgcgcgggcggcgtagccggcctgtctgggccgcctcgtggggagggagggggcgcccggccgcccggcggcgaccccggggcctggccgccaccatgggcttcgagctggaccgcttcgacggcgacgtggacccggacctgaagtgcgcgctgtgccacaaggtcctggaggacccgctgaccacgccgtgcggccacgtcttctgcgccggctgcgtgctgccctgggtggtgcaggagggcagctgcccggcgcgctgccgcggtcgcctgtcggccaaagagctcaaccacgtcctgccgctcaagcgccttatcctcaagctggacatcaagtgcgcgtacgcgacgcgcggctgcggccgggtggtcaagctgcagcagctgccggagcacctcgagcgctgcgacttcgcgcccgcgcgctgtcgccacgcgggttgcggccaggtgctgctgcggcgcgacgtggaggcgcacatgcgcgacgcgtgcgacgcgcggccagtgggccgctgccaggagggctgcgggctacccttgacgcacggcgagcagcgcgcgggcggccactgctgcgcgcgagcgctgcgggcgcacaacggcgcgctccaggcccgcctgggcgcgctgcacaaggcgctcaagaaggaggcgctgcgcgctgggaagcgcgagaagtcgctggtggcccagctggccgcggcgcagcttgagctgcagatgaccgcgctgcgctaccagaagaaattcaccgaatacagcgcgcgcctcgactcgctcagccgctgcgtggccgcgccgcccggcggcaagggcgaagaaaccaaaagtctgactcttgtcctgcatcgggactccggctccctgggattcaatattattggtggccggccgagtgtggataaccacgatggatcatccagtgaaggaatctttgtatccaagatagttgacagtgggcctgcagccaaggaaggaggcctgcaaattcatgacaggattattgaggtcaacggcagagacttatccagagcaactcatgaccaggctgtggaagctttcaagacagccaaggagcccatagtggtgcaggtgttgagaagaacaccaaggaccaaaatgttcacgcctccatcagagtctcagctggtggacacgggaacccaaaccgacatcacctttgaacatatcatggccctcactaagatgtcctctcccagcccacccgtgctggatccctatctcttgccagaggagcatccctcagcccatgaatactacgatccaaatgactacattggagacatccatcaggagatggacagggaggagctggagctggaggaagtggacctctacagaatgaacagccaggacaagctgggcctcactgtgtgctaccggacggacgatgaagacgacattgggatttatatcagtgagattgaccctaacagcattgcagccaaggatgggcgcatccgagaaggagaccgcattatccagattaatgggatagaggtgcagaaccgtgaagaggctgtggctcttctaaccagtgaagaaaataaaaacttttcattgctgattgcaaggcctgaactccagctggatgagggctggatggatgatgacaggaacgactttctggatgacctgcacatggacatgctggaggagcagcaccaccaggccatgcaattcacagctagcgtgctgcagcagaagaagcacgacgaagacggtgggaccacagatacagccaccatcttgtccaaccagcacgagaaggacagcggtgtggggcggaccgacgagagcacccgtaatgacgagagctcggagcaagagaacaatggcgacgacgccaccgcatcctccaacccgctggcggggcagaggaagctcacctgcagccaggacaccttgggcagcggcgacctgcccttcagcaacgagtctttcatttcggccgactgcacggacgccgactacctggggatcccggtggacgagtgcgagcgcttccgcgagctcctggagctcaagtgccaggtgaagagcgccaccccttacggcctgtactaccctagcggccccctggacgccggcaagagtgaccctgagagcgtggacaaggagctggagctgctgaacgaagagctgcgcagcatcgagctggagtgcctgagcatcgtgcgcgcccacaagatgcagcagctcaaggagcagtaccgcgagtcctggatgctgcacaacagcggcttccgcaactacaacaccagcatcgacgtgcgcagacacgagctctcagatatcaccgagctcccggagaaatccgacaaggacagctcgagcgcctacaacacaggcgagagctgccgcagcaccccgctcaccctggagatctcccccgacaactccttgaggagagcggcggagggcatcagctgcccgagcagcgaaggggctgtggggaccacggaagcctacgggccagcctccaagaatctgctctccatcacggaagatcccgaagtgggcacccctacctatagcccgtccctgaaggagctggaccccaaccagcccctggaaagcaaagagcggagagccagcgacgggagccggagccccacgcccagccagaagctgggcagcgcctacctgccctcctatcaccactccccatacaagcacgcgcacatcccggcgcacgcccagcactaccagagctacatgcagctgatccagcagaagtcggccgtggagtacgcgcaaagccagatgagcctggtgagcatgtgcaaggacctgagctctcccaccccgtcggagccgcgcatggagtggaaggtgaagatccgcagcgacgggacgcgctacatcaccaagaggcccgtgcgggaccgcctgctgcgggagcgcgccctgaagatccgggaagagcgcagcggcatgaccaccgacgacgacgcggtgagcgagatgaagatggggcgctactggagcaaggaggagaggaagcagcacctggtgaaggccaaggagcagcggcggcggcgcgagttcatgatgcagagcaggttggattgtctcaaggagcagcaagcagccgatgacaggaaggagatgaacattctcgaactgagccacaaaaagatgatgaagaagaggaataagaaaatcttcgataactggatgacgatccaagaactcttaacccacggcacaaaatccccggacggcactagagtatacaattccttcctatcggtgactactgtataattttcacttctgcattatgtacataaaggagaccactaccactggggtagaaattcctgcctcgttcaatgcggcaagtttttgtatataagataagtacggtcttcatgtttatagtccaaatttgcaaaccctacaactctgggtgtcataggtctattttaagggaagagagagaaaaacacccttactatcttggaaggcaatattaacaaacagagcttttttcaaatagcaattgtacttttctacctgtacccttttacataaagtgtttaaatttcagaaagatcttttattaagcatactttcacagaataacttgtttaaactatattcatataaaaaagttaaacacgctttttttcctgcctaaaacacaaatacaactgccagtatgtatttttaatggaaccctattttataatggtacgttactgaatgtgtttcatatgcgtgaccgttaagatattatcatttaggtgaaggtttcaactcaaaaccacccaacccggtggttaacgatttaatacatataaccaaaccggcagcgtttagagttgggatatacatttaaacattttcctggttaaggttcccaagagagtgtaaaggttttagcagaaagcaaaatatcttgcatctttatggaagtttaaagcatgtttgcaaatattgcagcccattgaaagaatttgcatgtacaggaaagttgtggatggagacggtttgtggaattttaagtgctcattgtagtaaacttttgctttgtagatttgaaggtacagacttatacaggcaagttcacaaaatcatgattagttacaaacagtaaaatgaagttaaaataaattattattttct

SEQ ID NO: 363 - protein, 1066 aa, Homo sapiens
MGFELDRFDGDVDPDLKCALCHKVLEDPLTTPCGHVFCAGCVLPWVVQEGSCPARCRGRLSAKELNHVLPLKRLILKLDIKCAYATRGCGRVVKLQQLPEHLERCDFAPARCRHAGCGQVLLRRDVEAHMRDACDARPVGRCQEGCGLPLTHGEQRAGGHCCARALRAHNGALQARLGALHKALKKEALRAGKREKSLVAQLAAAQLELQMTALRYQKKFTEYSARLDSLSRCVAAPPGGKGEETKSLTLVLHRDSGSLGFNIIGGRPSVDNHDGSSSEGIFVSKIVDSGPAAKEGGLQIHDRIIEVNGRDLSRATHDQAVEAFKTAKEPIVVQVLRRTPRTKMFTPPSESQLVDTGTQTDITFEHIMALTKMSSPSPPVLDPYLLPEEHPSAHEYYDPNDYIGDIHQEMDREELELEEVDLYRMNSQDKLGLTVCYRTDDEDDIGIYISEIDPNSIAAKDGRIREGDRIIQINGIEVQNREEAVALLTSEENKNFSLLIARPELQLDEGWMDDDRNDFLDDLHMDMLEEQHHQAMQFTASVLQQKKHDEDGGTTDTATILSNQHEKDSGVGRTDESTRNDESSEQENNGDDATASSNPLAGQRKLTCSQDTLGSGDLPFSNESFISADCTDADYLGIPVDECERFRELLELKCQVKSATPYGLYYPSGPLDAGKSDPESVDKELELLNEELRSIELECLSIVRAHKMQQLKEQYRESWMLHNSGFRNYNTSIDVRRHELSDITELPEKSDKDSSSAYNTGESCRSTPLTLEISPDNSLRRAAEGISCPSSEGAVGTTEAYGPASKNLLSITEDPEVGTPTYSPSLKELDPNQPLESKERRASDGSRSPTPSQKLGSAYLPSYHHSPYKHAHIPAHAQHYQSYMQLIQQKSAVEYAQSQMSLVSMCKDLSSPTPSEPRMEWKVKIRSDGTRYITKRPVRDRLLRERALKIREERSGMTTDDDAVSEMKMGRYWSKEERKQHLVKAKEQRRRREFMMQSRLDCLKEQQAADDRKEMNILELSHKKMMKKRNKKIFDNWMTIQELLTHGTKSPDGTRVYNSFLSVTTV

SEQ ID NO: 364 - DNA, 1340 bp, Homo sapiens
atgggggaggtcctaggtggctgtcacttcctggaatggtgtgactcacctttcagacacttacgcatgagtacgggacacgtcaaaaacataggcacgtttagagcgactgtcagcggaaagctgtccatcacatgcactaaggaagggcagctgctgcagtggatggctgcttctgtgaggtgctcttttgacaatgagagccctgctagcatcagaagcaaaagtaaaacgatggtgtggaatgtgaagggtcctggaggtctgccagagtggatctccatcctgcaggggctgaggcacccagctgctaccagtactaccaccatgaggctccaactcatcctaactgccctgagaggtttccatgatcaaatccaggagcaggaggcagaagagctgaggctcacaaatggcccatccgggcttttccgtggagcccgtttctgcccgacccccctgaggaatgggacccgagaagggcgcactcgcacgggccgcggaggccaacgccgagcctgcgcggcgggaggcgctgagaactcactgcgcacgcgccggtcggctggccgcacccacgcggcgcagctcccaaagttgcagacagcccggcgaaccgcgcaatgcgcttcttctgcctgcagcagagaaaaggaaagaaaactccgcaggggctccgttggcttctccacgagtgacaaccatgttttcccagatagaagaccggagccctgctcctttgcgatccgccgagggctgcagagagcatcctcatccatttgggcacccctgcccaggaagagcccggccatccctttccggactggatccttaagaggtgaattttcttccgtggattccgatttgctccgtctgaccagcctaggcaatccagcatcgcgtggtaccagtgccgctgggcacactggcttcacgccggctccgcctcaccagcaagcgcattcccagatggagtctcactctctcgcccagactggagtgcagtgaagcaatctcagctcactgcaacctccaccctcccgggttcaagtaattctcctgcttcagcctcctgagtagctaggattacaggcatgcaccatcatacctggctgtagcccttattttaaattcaatgtactgtaatgatttacttggtttattgtcttaactttctgttccactggaatacaggttcaataaggagggattttaatcaattttgttctctgaagtgtcttcagaaccaaatgagtaaaaaattatcattgttgacgttttcacttcgtgctagcatatgggcaatctcaatttatttctaataactccctgtatctttc

SEQ ID NO: 365 - protein, 335 aa, Homo sapiens
MGEVLGGCHFLEWCDSPFRHLRMSTGHVKNIGTFRATVSGKLSITCTKEGQLLQWMAASVRCSFDNESPASIRSKSKTMVWNVKGPGGLPEWISILQGLRHPAATSTTTMRLQLILTALRGFHDQIQEQEAEELRLTNGPSGLFRGARFCPTPLRNGTREGRTRTGRGGQRRACAAGGAENSLRTRRSAGRTHAAQLPKLQTARRTAQCASSACSREKERKLRRGSVGFSTSDNHVFPDRRPEPCSFAIRRGLQRASSSIWAPLPRKSPAIPFRTGSLRGEFSSVDSDLLRLTSLGNPASRGTSAAGHTGFTPAPPHQQAHSQMESHSLAQTGVQ

SEQ ID NO: 366 - DNA, 2568 bp, Homo sapiens
aactacgaagatggcggttgcgcgcttggcagctgtggcggcctgggtaccttgtcggagctggggctgggcagccgtccccttcggtccccaccgtggcctcagcgtgctgcttgcacggatacctcagcgggcgccacggtggctcccagcttgtagacaaaagacgtcactctcattccttaatcgaccagaccttccaaacctggcttataagaagctaaaaggcaaaagtccaggaattatcttcatccctggctatctttcttatatgaatggtacaaaagcgttggcgattgaggagttttgcaaatctctaggtcacgcctgcataaggtttgattactcaggagttggaagttcagatggtaactcagaggaaagcacactggggaaatggagaaaagatgttctttctataattgatgacttagctgatgggccacagattcttgttggatctagcctcggagggtggcttatgcttcatgctgcaattgcacgaccagagaaggtcgtggctcttattggtgtagctacagctgcagataccttagtgacaaagtttaatcagcttcctgttgagctaaaaaaggaagtagagatgaaaggtgtgtggagcatgccatcaaaatactctgaagaaggagtttataacgttcagtacagtttcattaaagaagctgaacatcactgcttgttacatagcccaattcctgtgaactgccccataagattgctccatggcatgaaggatgacattgtaccttggcatacatcaatgcaggttgccgatcgagtactcagcacagatgtggatgtcatcctccgaaaacacagtgatcaccgaatgagggaaaaagcagacattcaacttcttgtttacactattgatgacttaattgataagctctcaactatagttaactagtatcacatgtttagttggtatgtaaactaatgtatccagaagattggaagagggataagaaatgaaagatcctgatactttaggcttttccctttcctctattttgtaaatataagatgagtattatttaatgatgtatttgcataagtaatgcaaattgtgaagaaggaccagctgctgtttagaaaattttctccttccttctgtccttgattttttttcattaaagtatttcctttttttaattcaagaaaagtttacctttcttatgcttatgttagctatgccagctcttaattgcatccttttctaattaggattattaataaagcgtgaatattttgttttttattatagacagaaatttgtaacattacttctgatttgaaaatgcaattcacaaaatatagggaaatttttattgaataaatttgaaatgatggagaaatttcagaagcataataaagttcacaataaggataatactttatataatgtataaagtatatataatataatatatatgttatataaactgcacattatattcaaacttaaaattgagctttttttttaaaggcccaaaattgtacagtgatacaaggagctatttctaaaatttggcttatgtataatatatttaaatggggaatttcatctaaagcaatgatgtagtatttttaatattctgattggtaaaattaaagaggaaattaatctttatatattatttcttgcagaaacattcattattttattaatattgccctaagtacaactaggcaagtgattgccacctaaatcagaagacgttctaaagtcagtaagaaagtgtgaaatgctagtataaaggttattttttttctttcctaaataactaaagtgaggtgtagattgagccttgatattatttagttaatgttttttattaattaattttggctggactttatttagcttgattaggttattatctgtcaaaccttttaagttgacaacatgactcatatatatacatgtgtataagatgagcatgtgtcaaagacttattcgactcattaatgaggaaaccagcagatagtaaacctggttcaaagtacaattcaagaaactgagtatttatgggcattgaagaaaaaatgttgagataaaattgctgtgcagaaaaaagtgttaatgaagccgacctgactacttaaccttagagacctgctttacaaggttggcccttgattggcatctgggaacttggagttcagggggcttccaccattcccagaactgatcaaagtagcttactatatctaaactgtaaaacaatatagtttctcctgaacacctgctttccttctgggagtctggaattttggtatgtgccaggcagagactacctttgtgaccagctcccagtaaaaaccccaggcactcagtctctaacaagcttttctggttgacagtgtttcacaagtgctgttacaactggttgctgggagaattaagctcatcctctgtgattccactggcggaggattcttggaagcttgcacttagtttcccctgacttcaccccatgtgtcttttttcctttgctgattttgttttgtatcctttcactgtaataaatcatggccgtgagc

SEQ ID NO: 367 - protein, 306 aa, Homo sapiens
MAVARLAAVAAWVPCRSWGWAAVPFGPHRGLSVLLARIPQRAPRWLPACRQKTSLSFLNRPDLPNLAYKKLKGKSPGIIFIPGYLSYMNGTKALAIEEFCKSLGHACIRFDYSGVGSSDGNSEESTLGKWRKDVLSIIDDLADGPQILVGSSLGGWLMLHAAIARPEKVVALIGVATAADTLVTKFNQLPVELKKEVEMKGVWSMPSKYSEEGVYNVQYSFIKEAEHHCLLHSPIPVNCPIRLLHGMKDDIVPWHTSMQVADRVLSTDVDVILRKHSDHRMREKADIQLLVYTIDDLIDKLSTIVN

SEQ ID NO: 368 - DNA, 1329 bp, Homo sapiens
gtgcagctgctggcctcgtagacaatcggctgtctccccagaagagggaaagaattgtgcagatgagaaagaggctctcagcgggagggaggcaggcgggcttgattgacacaggagagggctggctttttggagggctcttagcaacggccctggttgagccccctcagccatgagaaaatcaaatcaatgtgccattcttccaggcgcgaggcagcagcggctgcagttcaacatgaaaggaggcttcctccctgcctgctaattacctgctcttcccgatctcatcgtttctgcctttgcaaagtgctactgagaagggggaagaaacgtccgccacccatcccccttgctgcctgggggttcagacttgattagatggctaacaggggcccgagctatggcttaagccgagaggtgcaggagaagatcgagcagaagtatgatgcggacctggagaacaagctggtggactggatcatcctgcagtgcgccgaggacatagagcacccgccccccggcagggcccattttcagaaatggttaatggacgggacggtcctgtgcaagctgataaatagtttatacccaccaggacaagagcccatacccaagatctcagagtcaaagatggcttttaagcagatggagcaaatctcccagttcctaaaagctgcggagacctatggtgtcagaaccaccgacatctttcagacggtggatctatgggaagggaaggacatggcagctgtgcagaggaccctgatggctttaggcagcgttgcagtcaccaaggatgatggctgctatcggggagagccatcctggtttcacaggaaagcccagcagaatcggagaggcttttccgaggagcagcttcgccagggacagaacgtaataggcctgcagatgggcagcaacaagggagcctcccaggcgggcatgacagggtacgggatgcccaggcagatcatgtaggacgcggcatcctgcccctggtagagaggacgaatgttccacaccatggtctctacgaaaaagaaatagttagtcaccttctgaccttctcctctttctcaaagccttctgtccctggtttttgcaagtgctgcatttccgccgagaatccgcgttgcctactgctgccacctcctgttcatttagaactatgcaaagactccgcttccgttttcctgagctcctcgggccccagagtctctgtttgattatttatttatttatttatttatttgccaaaaattctcctcttcaacttatagaatgcacctaataaagtaattagtcttgtgtcttaaaaaaaaaaaaaaa

SEQ ID NO: 369 - protein, 199 aa, Homo sapiens
MANRGPSYGLSREVQEKIEQKYDADLENKLVDWIILQCAEDIEHPPPGRAHFQKWLMDGTVLCKLINSLYPPGQEPIPKISESKMAFKQMEQISQFLKAAETYGVRTTDIFQTVDLWEGKDMAAVQRTLMALGSVAVTKDDGCYRGEPSWFHRKAQQNRRGFSEEQLRQGQNVIGLQMGSNKGASQAGMTGYGMPRQIM

SEQ ID NO: 370 - DNA, 1214 bp, Homo sapiens
ggagggggattccagcccccctggaccggccggaggtttattctagagttactggcgggtagctgtgcttttctttcccgtttgtaggtgaaaccccattggcttcattggctccttgatttaaaccacgcccggctttctgccctctttgctgctgctgggccaggttgcccagccatatcccagccccgtctgcagggagccggaggctgctgctgctgctattgtgtggatgccgcgcgtgtcttctcttctttccagagatggctaacaggggcccgagctatggcttaagccgagaggtgcaggagaagatcgagcagaagtatgatgcggacctggagaacaagctggtggactggatcatcctgcagtgcgccgaggacatagagcacccgccccccggcagggcccattttcagaaatggttaatggacgggacggtcctgtgcaagctgataaatagtttatacccaccaggacaagagcccatacccaagatctcagagtcaaagatggcttttaagcagatggagcaaatctcccagttcctaaaagctgcggagacctatggtgtcagaaccaccgacatctttcagacggtggatctatgggaagggaaggacatggcagctgtgcagaggaccctgatggctttaggcagcgttgcagtcaccaaggatgatggctgctatcggggagagccatcctggtttcacaggaaagcccagcagaatcggagaggcttttccgaggagcagcttcgccagggacagaacgtaataggcctgcagatgggcagcaacaagggagcctcccaggcgggcatgacagggtacgggatgcccaggcagatcatgtaggacgcggcatcctgcccctggtagagaggacgaatgttccacaccatggtctctacgaaaaagaaatagttagtcaccttctgaccttctcctctttctcaaagccttctgtccctggtttttgcaagtgctgcatttccgccgagaatccgcgttgcctactgctgccacctcctgttcatttagaactatgcaaagactccgcttccgttttcctgagctcctcgggccccagagtctctgtttgattatttatttatttatttatttatttgccaaaaattctcctcttcaacttatagaatgcacctaataaagtaattagtcttgtgtcttaaaaaaaaaaaaaaa

SEQ ID NO: 371 - protein, 199 aa, Homo sapiens; identical to SEQ ID NO: 369

SEQ ID NO: 372 - DNA, 1503 bp, Homo sapiens
gtgcagctgctggcctcgtagacaatcggctgtctccccagaagagggaaagaattgtgcagatgagaaagaggctctcagcgggagggaggcaggcgggcttgattgacacaggagagggctggctttttggagggctcttagcaacggccctggttgagccccctcagccatgagaaaatcaaatcaatgtgccattcttccaggcgcgaggcagcagcggctgcagttcaacatgaaaggaggcttcctccctgcctgctaattacctgctcttcccgatctcatcgtttctgcctttgcaaagtgctactgagaagggggaagaaacgtccgccacccatcccccttgctgcctgggggttcagacttgattgtgaaaccccattggcttcattggctccttgatttaaaccacgcccggctttctgccctctttgctgctgctgggccaggttgcccagccatatcccagccccgtctgcagggagccggaggctgctgctgctgctattgtgtggatgccgcgcgtgtcttctcttctttccagagatggctaacaggggcccgagctatggcttaagccgagaggtgcaggagaagatcgagcagaagtatgatgcggacctggagaacaagctggtggactggatcatcctgcagtgcgccgaggacatagagcacccgccccccggcagggcccattttcagaaatggttaatggacgggacggtcctgtgcaagctgataaatagtttatacccaccaggacaagagcccatacccaagatctcagagtcaaagatggcttttaagcagatggagcaaatctcccagttcctaaaagctgcggagacctatggtgtcagaaccaccgacatctttcagacggtggatctatgggaagggaaggacatggcagctgtgcagaggaccctgatggctttaggcagcgttgcagtcaccaaggatgatggctgctatcggggagagccatcctggtttcacaggaaagcccagcagaatcggagaggcttttccgaggagcagcttcgccagggacagaacgtaataggcctgcagatgggcagcaacaagggagcctcccaggcgggcatgacagggtacgggatgcccaggcagatcatgtaggacgcggcatcctgcccctggtagagaggacgaatgttccacaccatggtctctacgaaaaagaaatagttagtcaccttctgaccttctcctctttctcaaagccttctgtccctggtttttgcaagtgctgcatttccgccgagaatccgcgttgcctactgctgccacctcctgttcatttagaactatgcaaagactccgcttccgttttcctgagctcctcgggccccagagtctctgtttgattatttatttatttatttatttatttgccaaaaattctcctcttcaacttatagaatgcacctaataaagtaattagtcttgtgtcttaaaaaaaaaaaaaaa

SEQ ID NO: 373 - protein, 199 aa, Homo sapiens; identical to SEQ ID NO: 369

SEQ ID NO: 374 - DNA, 4984 bp, Homo sapiens
ggttatttgtggttcgctttgatcccgagggggaacctgaaactctcacattcctggcatagcagccgcctccggcgcgggccgaccctggggctgcgcgctggggcgcgaacagccagagcgtcggcgccacggccgagaacacatcttcgccgccgagctgagctgggccgagccggaggttgtggtgtctgactgcgctgggcaccctcgggccgcagcggtgctctggggccaggtgccaccggccattgtccaggcagctgtgtgcaagccaaagaagcatgaggacactggaagactcctcggggacagtcctgcaccgcctcatccaggagcagctgcgctacggcaacctgactgagacgcgcacgctgctagccatccagcagcaggccctgaggggtggggctggaactgggggtacagggagcccccaggcctccctggagatcctggccccagaggacagtcaggtgctgcagcaggccaccaggcaggagccccagggccaggagcaccagggcggtgagaaccacctggcagagaacaccctctaccggctatgcccacagcccagcaagggagaggagctgcccacctatgaggaggccaaagcccactcgcagtactatgcggcccagcaggcagggacccggccacatgcgggggaccgagatccccgtggggccccgggaggcagtcggaggcaggacgaggccctgcgggagctgaggcatgggcacgtgcgctcgttgagtgaacggctccttcagttgtccctggagaggaacggcgcccgggcccccagccacatgagctcctcccacagcttcccacagctggcccgcaaccagcagggccccccactgaggggcccccctgctgagggcccagagtcccgaggacccccacctcagtaccctcatgttgtactagctcatgagaccaccactgctgtcactgacccacggtaccgtgcccgcggcagcccgcacttccagcatgctgaagtcaggatcctgcaggcccaggtgcctcctgtgttcctccaacagcagcagcagtaccagtacctgcagcaatctcaggagcacccccctcccccacatccagctgctctcggccatggccccctgagctccctcagtccacctgctgtggaggggccagtgagtgcccaggcctcctcagccacctcgggcagtgcccacctggcccagatggaggccgtgctgagggagaatgccaggctgcagagagacaatgagcggctgcagagggagctggagagctctgcggagaaggctggccgcattgagaagctggaaagcgaaatccagcggctctctgaggcccatgagagcctgaccagagcctcctccaagcgtgaggccctggagaagaccatgcggaacaagatggacagtgaaatgaggaggctgcaagacttcaaccgggatcttagagagagattggaatctgcaaatcgccgcctggcaagcaagacacaggaggcccaggccggcagtcaggacatggtggccaagctgcttgctcagagctacgaacagcagcaggagcaagagaagctggagcgagagatggcactgctgcgcggcgccatcgaggaccagcggcggcgtgccgagctgctggagcaggctctgggcaatgcgcagggccgggcagctcgagccgaagaggagctgcgcaagaagcaggcctatgtggagaaagtggagcggctgcagcaggcgctcgggcagctgcaggcagcctgtgagaagcgggagcagctggagctgcgtctgcggactcgcctggagcaggaactcaaggccctgcgtgcacagcagagacaggcaggtgccccaggtggtagcagtggcagtggtgggtctccagagctcagcgccctgcgactgtcagaacaactgcgagagaaggaggagcagatcctggcgctggaggccgacatgaccaagtgggagcagaagtatttggaggaacgtgccatgaggcagtttgccatggatgcggctgccacggctgctgctcagcgtgacaccactctcatccgacattccccccagccctcacccagcagcagcttcaatgagggtctgctcactggtggccacaggcatcaggagatggaaagcaggttaaaggtgctccatgcccagatcctggagaaggatgcagtgatcaaggtccttcagcagcgctccaggagagaccctggcaaggccatccagggctccctgcggcctgccaagtcggtgccatctgttttcgcggctgcggcagcaggaacccagggctggcaagggctctcttctagtgagcgacaaacagcagacgcccctgctcggctgactacagcagacagagcacccacagaggagccagtggtcacagctccccctgctgcccatgccaaacacgggagcagagatgggagcacccagactgagggccccccagacagcacctccacctgcctgccaccggagcctgacagccttctggggtgcagcagtagccagagagcagcctctctggactctgtagctacatccagagtccaggacttgtcagacatggtggagatactgatctgaaggaggtggtgcttcaggactctgagccattctctcccctcctctgccctgtgccactctcagccatttcagcagccccgtcaaccgctgctccgtccctttccccagccagacactcattcccattgaccatctggtcccaggagctcaggaggaggaccccaggggagaggagagctgtgagagcaccggcacccccagaagactctgcttcttagcccacattcctccgggccttatggagaatgaggattcagccttgacttcttgcccaaggcctgctactggggtagcaactgacagctcagaaaggagctgagctccctctgccctgccagttgtcagtcaggcagggagggagtggctgtgttggtttggggaactaatttccacggacggctgcccgtggacaccaggtggactggttcactaatcaagtcagccatattgttctctggctaagtttggttccagccaacgtcatctgctcttcagttcctcactgccttcttgggatactaagacttgaattttttggggactattaagggtgttagtcttggagaagacacagcctcaccttctcacttgctgtgggtgaggggccatttaagtggactgggagacagtgcgcagtttgtatataattccctttcttgtggaacagaagactgaggcctgcaggttccgatgtgtctccatgggctgtgctcccctcttcctactgtcagtttctgaaacttctgactggcctcccagttatgcctcctcctcaagttcctggcccgtggatgttaaagctgctcgattcccaggatctcggctgccttttcctctatcttgagccctataaatgcccacgggacccccaccaccagcctcttgaagtggctccacagctcctgtccctggaacatcctgtcagtttggtcataaaccctgagccagatgaaatgagccaccgtgaacagacatctgccatgcccccaggtgggcttcggtggccctacccggtaccagttctttctgagaaactggagatgtcttgttagcataagtgtcttcattcccacctggagggtttgggagaggagcaaagcagttgaaaactagttaatgagctacaagagtcaaatagtcctctgaatggagcccccatcacaaaacagtgcccaggaggctggctcctcaagctacccatgcccagcgccctaaagcagcaccagatgctttggaattggggtgaaacacccacatggcagcctgctagcagcagtgactttgacttctggtcttaaagagtccctcacttcagccccaggagctattggtgggttttagcagttttgtctttaccgtttttagttctccttgattctttgttttcttcctttatcgtttttaggtttggtatgtgttgttttatttccatggttcctcaagtttcctttttaaacatttgcatttgctggacaattgcaattttttttaaaaaattcccctacccctgtttaaagctgaaaaatacatttggttcatgtgcattgtttacaaagcaaaaagaaaaaagaggaaaaaaaggcaaaaaatattgtgaaagaaaaaaaacaacttaatatattttggattaatatttggtatttcttttaaagtattttttgtgctgtgaacattttctgccaaagaccatgatgtgtgtctgtatgtttaagttatcgtaaatatttaaaatgtaaacatggctgttttgttatgccaccctgtaccaggattgctgccgcattccactgggtataacagtattttaattaaaaaaaaataattaaaagtgatgtctttgcacaggtgagactttgcactgagggaagggaaagggtgaggattttggggggccacccaagtcatagtccaatctcttcaaggacccaagatagaatttaggaattttgtgaagctgcattaaggatagagttggaatgaggatgtggctggcatttttcccctttcatagataacatttcttgaaggctgggaggggaaggagggcctggcagatggcagcctcccgaggtagggctgtgttctaatcagctttgttcggccacacgctgtggttatccacagtgggagtgggtgtccaaagatggctttatccttcccccactccttttcccactcccacctagcacataaagttttgtccgaaaccatccagaaggccaggcaccatgcagaggacattcaagaatgtgcatgttcttagccaccgcctccctcctttgctgtgacatcaccactctttcctgatgctcaggaaagcatattgctccaattcaaaattaaagaaagccattctc

SEQ ID NO: 375 - protein, 780 aa, Homo sapiens
MRTLEDSSGTVLHRLIQEQLRYGNLTETRTLLAIQQQALRGGAGTGGTGSPQASLEILAPEDSQVLQQATRQEPQGQEHQGGENHLAENTLYRLCPQPSKGEELPTYEEAKAHSQYYAAQQAGTRPHAGDRDPRGAPGGSRRQDEALRELRHGHVRSLSERLLQLSLERNGARAPSHMSSSHSFPQLARNQQGPPLRGPPAEGPESRGPPPQYPHVVLAHETTTAVTDPRYRARGSPHFQHAEVRILQAQVPPVFLQQQQQYQYLQQSQEHPPPPHPAALGHGPLSSLSPPAVEGPVSAQASSATSGSAHLAQMEAVLRENARLQRDNERLQRELESSAEKAGRIEKLESEIQRLSEAHESLTRASSKREALEKTMRNKMDSEMRRLQDFNRDLRERLESANRRLASKTQEAQAGSQDMVAKLLAQSYEQQQEQEKLEREMALLRGAIEDQRRRAELLEQALGNAQGRAARAEEELRKKQAYVEKVERLQQALGQLQAACEKREQLELRLRTRLEQELKALRAQQRQAGAPGGSSGSGGSPELSALRLSEQLREKEEQILALEADMTKWEQKYLEERAMRQFAMDAAATAAAQRDTTLIRHSPQPSPSSSFNEGLLTGGHRHQEMESRLKVLHAQILEKDAVIKVLQQRSRRDPGKAIQGSLRPAKSVPSVFAAAAAGTQGWQGLSSSERQTADAPARLTTADRAPTEEPVVTAPPAAHAKHGSRDGSTQTEGPPDSTSTCLPPEPDSLLGCSSSQRAASLDSVATSRVQDLSDMVEILI

SEQ ID NO: 376 - DNA, 607 bp, Homo sapiens
atggctaaaggtgaccccaagaaaccaaagggcaagatgtctgcttatgccttctttgtgcagatgtgcagagaagaacataagaagaaaaccccagaggtccctgtcaattttgcagaattttccaggaagtgccctgagaagcggaagataatgtctgggaaagagaagtctaaatttgatgaaatggcaaaggtggataaagtatgctatgattgggaaatgaaggattacggaccagctaagggaggcattaggatccttattcttgcctcccttagttggtccctaatccttcgtttggatcccactgtctggattcttcctgctctgttccaaattctgccctaatatcaaatccacaaaccctggtatctctattggaaatgtcgcaaaaaggctgggtgagatgtagattaacatgtaacagtgaaaagccaccttacatcaccaaggcgacaaagctgaagaagtatgagaaagatgttgctgactaaaagaaagtttgatggtgcaaagggtcctgctaaggttgcctggaaaaaacgtggaagaggaagacaaagatgacgagtaggaaaaagaggatgagaaggatgaattttaa

SEQ ID NO: 377 - DNA, 1199 bp, Homo sapiens
gcaggagcaagcgtctgccgcggtggccgggtgccgatttgacaagatcaaagctgcaggaaaatggacagtgaggttcagagagatggaaggatcttggatttgattgatgatgcttggcgagaagacaagctgccttatgaggatgtcgcaataccactgaatgagcttcctgaacctgaacaagacaatggtggcaccacagaatctgtcaaagaacaagaaatgaagtggacagacttagccttacagtacctccatgagaatgttccccccattggaaactgacgcttggctcctttcttgtggatggattttctcaaagtacacagataaagcacggtttgtttcagtctccaaattcaaacctttgagtaataaatcagcactcaaaaatgtacacccatttagtttgtggtagcaaagtgcaatgcgaaattgaatgagaaactgagatttctcagtaatggtgaatatttcgctctttaaacctaaaactcttcattgagtagcttatatttgaacatgattggttaaacatttgcctctacctctgattttgctttgctgtcaaagtttaacaccttccaactacttatgtgtgtcctgtaacacaggtgattgaacgtatgagagggaaaggcaaagaaaaaggaagccagacactaggagaattattaacttctcatacttccccacattgagaagcattcggagtgtatttagcctgtagatgttgtgatatgcaaatatcccattccctggttactggcattcctaagattcttcatggtattttcaaactttggataaatttacagattagaaagatatctgacagttaatctctgttctccttacaaattccttttgtgctgctggaaaggatctttggctaggtggatgactagttttattcaaagccttttctcaaagccctttcagttacaaccaccccactatggaatcagtatttagttatacatttgtataagaacctgtattttgaaaaacacattcatgtatatttattcctggaattatttgcctgttaaacagtgtctttcatgttctctccccagattgtaaactctgtaagaagctgcttgtatctgtatcccttgttgaaactctgaaaacactgaataactaaaatctcttctcatccttacaaaaaaaaaaaaaaaaaaaaaaaaaaa

SEQ ID NO: 378 - protein, 74 aa, Homo sapiens
MDSEVQRDGRILDLIDDAWREDKLPYEDVAIPLNELPEPEQDNGGTTESVKEQEMKWTDLALQYLHENVPPIGN

SEQ ID NO: 379 - DNA, 6054 bp, Homo sapiens
aacggcgggaaggctcaggggcgtgcttgcggcaaccctgtaaccgccggtgcgcaagttggaggggcaaggggctgccgtgtcctggtctggaggcggcccaggctgccttggtgattctggcttcgcggcctcatggcttgcggccggtttgcgcaacggcctgcgaaccaccaggcgcgtccccgccggcttgggtccgccccgaagcccagtccctcggcctggcccgctatgccctgcacactggcggagtctggcgtggcgcagcccggcgtggggttcggccccgccaggtggtcagcccttcctcggagtccaggtggctgggggcgcttcggagagtggccaggggcccccaaacccggggccgcagagcagtaccagtccgtggcctgttaggaaccaggctacagagcaggagttgccaaaacaaaggggatttggtgatggaggctttgttagaaggaatacaaaatcgagggcatggtgggggatttttgacatcttgtgaagcagaactacaggagctcatgaaacagattgacataatggtggctcataaaaaatctgaatgggaaggacgtacacatgctctagaaacttgcttgaaaatccgtgaacaggaacttaagagtcttaggagtcagttggatgtgacacataaggaggttggaatgttgcatcagcaggtagaagaacatgaaaaaatcaagcaagagatgaccatggaatataagcaggagttgaagaaactacatgaagaattatgcatactgaagagaagctatgaaaagcttcagaaaaagcaaatgagggaattcagaggaaataccaaaaatcacagggaagatcggtctgaaattgagaggttaactgcaaaaatagaggaattccgtcagaaatcgctggactgggagaagcaacgcttgatttatcagcaacaggtatcttcactggaggcacaaaggaaggctctggctgaacaatcagagataattcaggctcagcttgtcaatcggaaacagaaattagagtctgtggaactttctagccaatcagaaattcaacacttaagcagtaaactggagcgggctaatgacactatctgtgccaatgagttggaaatagagcgcctcaccatgagggtcaatgacttggttggaaccagtatgactgtcctacaggagcagcagcaaaaagaagaaaaattgagggaatctgaaaaactattagaggctctgcaggaagaaaagagagaattgaaggcagctcttcagtctcaagaaaatctcatacatgaggccagaatacaaaaggagaagttacaagaaaaagtaaaggcaactaacactcaacatgctgtagaagctataaggccacgggaagaatctctggcagaaaagaagtacacctctcaagggcagggggacttagacagtgtgctctcccagttgaattttacccatactagtgaggaccttctgcaggcagaggtgacttgtcttgaaggcagtttggaatctgtgagtgcaacgtgtaaacagctgagccaagaactaatggaaaaatatgaagaactgaagaggatggaagcacataacaatgaatacaaagcagagattaagaagttgaaagaacagattttacagggtgaacaaagttacagttctgcactagaaggaatgaagatggaaatctcccatctaactcaggagttacatcagcgagatatcactattgcttccaccaaaggttcttcctcagacatggaaaagcgactcagagcagagatgcaaaaggcagaagacaaagcagtagagcataaggagattttggatcagctggagtcactcaaattagaaaatcgtcatctttctgaaatggtgatgaaattggaattgggtttacatgaggcaaaagagatttcactagcagacctccaggagaattatattgaggcattaaataaattagtgtctgaaaatcaacaactacagaaagatttgatgaataccaaatctcagctggagatttctactcagatgtgcaaaaaacaaaatgacaggatctttaaaccaacacacagcagaacaactgagttcaagaatacagagttcaagccaacccatggccagcacagacatgatggaataaagactgagcactacaaaacagatcttcattctccaagaggacaagcgtcggatagtataaaccccatgtctagggtgctaagccccctgagtcctcaaatcagcccttgcagctccaccaggtctttgacttcctactctctatgtaaaactcattctttgccttcagcgctagatacaaatgaagccaatttttctgacactatgtctgagagtatgaatgaccaagaagagtttatatcttcgtgttccttgcctgtatctccccttggttcaatagctaccagatttttggaagaggaggaactgaggtctcatcacattctagagcgcttggatgcccatattgaagaactaaaaagagagagtgaaaagacagtgagacaattcacagccttaaagtagcctcttaaaaaaatcacaatcttggaaataaaaataaacaccaaagagttactgtcatctgaagtagcagctctttaaaaacatgaagagataaaattataaaaatgatacatctaaagcagtggtgaagaaagctgaaaaactgatacttttgataggcattttctctgcactggtttgtttaaaggacttcttccagcaataagttgaaagaataaaccactttgctagacttttttctcatacgaatatttattatcataaagtgatacttaccttgctgacttaaatgtgaatagctatgtactaattgaaataaggattttatgatacatgttgaaaataaagtaactgcaggaactttctttaggggaaatgtgtagaagcatggatttaggggtcaaacatacctggatcgatagactggttttgccacttaccagccaacggggcttgttatttactgggctggtagcccctcctagccaaggggctggtagtgtgtaaagtcaggctggtagtgaataaggggggggtgtgctaaagaaccttatcaagcagtcctctcttgctcaacactcatgcagaggagagaggcagggagggcaagggactggctgtcatgcacggtgcccatggaatatccattggaaataaatgttcatcgtctgcactgctgaggacaagtttagatgggagacaaagatctggatgttgatgtgccgcaggcatttgaaacgatgggagttgataagatccaccagggaggctgtggagagagagaggagcaggaggctgggtttggggccctgaaagatgccagcatctgaggatcacaggaaatagatctagcaaaggaactagaatgtgcagttacagatgagaaaggtcagtgtagtgtacttgccagctcaagggtgtggcctctgtgaaccctctttctgtagtggatctttcccatcagcgtaaaacatcctgttatttcccctttttaaataaaacctcagttttttttaatgcctctcttttactgctctgtatgtttgcttcccttcacccaaacacttctggaaagagttgtctgcagtgactctttccagttcctcaccccgccccaccgtagttctcttcctaaccctctccaacaccacttccatccccagactgctttcttgctcttgagttcaccagtgacctaatcagtgtctgagcatcattcagcacagttggactctctcttggcttctgtgacctggaacttctggtttcctctctacctcatcctccactccatctcatggcttttcctcttctaacctctaagtcagagggccccctagagctctgtcatgggttttctccctcagcattctcttccctagaagtttccattccattctcaagctcttaataccacctataggccagtgacccttacatttattactaatcttgacctctccccagagctgctgtcttagatacctagctgcttatgcgatgtcttcacttggatatctgacaaacatcttgtttccaagagagaactctttattctccctcttgctaagattccatatcaggacatagcattatgtttgccagttcctaggagttacttataattccttccttacccacatccgcatatccagtcatttgggaggtcctgtcatttcttcccccagaatcttatctcagacccaaccgtttccctcctgcacttctaccacctgatccagactacttctctctcaccctgattctggcagtagcctcctaactgatagtactcacaccagtaattcagggagcttctggagttatcctttagaaatgtaaatgaaacagtgtcaccactgcttcccttcagactcttccaaggcttctctttttttttttattgagacagagtctcactctgtcgcccaagctgcagtacagtggcaggatctcggctctctgcaacctccacctcccgggctcaagtgattctcctgccttagcttcccgagtagctgggattacaggcgcatgccaccaggcccagctaatttttgtatttttagtaggaacagggtttcaccatgttggtcaggctgatctcgaactcctgacctcaagtgatccacccgcctgagcttcccaaagtgctgggttataagcgtgagccactgcacccagccccaaggcttcttactgcactcagaataaaatccaaatgaattagtatagcctacagagtgtcaataatctgggcctaatcacccattgcatcatcctttactgtgctccacccatgctggcgtcctttctgtttattgagtgcagcaagctttaacctgttcgggtctttcatttgcagtttaccctgaatattccctttctcttacctcacctttgattggcgttttcccccttgcagacctgcactctggcatcctctcctgagcaagccttctttgattgctgcctcccaaacctgtttctccccatttctctagctcattggcctgtgttacttgcttcatagtgctcactactatctgaaatcatttcattacttgatttatgtttgtactgtctatttctgtctttagaattaaaactccttgagggcaaggactttgcttctctggttcatggtgggatcctcatcacccagcacaagcccaacacttaggagaggctcagctagtttgaaccaatggaaaatgccattcctgaggtgcaccacatcgtttcttttgtgttggtgtgcatgctgtccttcagtttgtctcctcttcccacaccctgtcatgtgctcctaaaactccccctttacttggctactttatctggcttggcaaagctttcccatatcccctgacccatgtcagggaacgtttctcctcattgctgtcatggcaccctgtgtgtggctctgaccagactttgctatccgctttgatttctgtctttcaggggctaagtcctgcctacatcctcagtcagcatgctgcctaacacataacagatcctaagcaaatattgggtggatgaaaatcactaccattcaaggcttcattgtatttatcagtaaaactgaaataatatctaatggggtcgagaagatttactgaaaatatatatttgaaagggctttgcagttttaagtactgtacctatgtgcattgctgttacattcaggagatttctgagttttagacagtcccaagcttcagcttaaaatctgtagactgcagcccgtttctgaaacgtttgtactacgtgttgactaggaggaacaatgacagactctgtagtcaccggaaatacttaaggaatcatgaggtactatgtatttccttaaattatactgttttttaaagctgaagtatctaatagttaatgggttgtccaaatttgtcagaacatttgactgtaatttaatgtctcaccatttttcaaaaagatatattaataccaaatattaaaatgtgtcaagact

SEQ ID NO: 380 - protein, 703 aa, Homo sapiens
MEALLEGIQNRGHGGGFLTSCEAELQELMKQIDIMVAHKKSEWEGRTHALETCLKIREQELKSLRSQLDVTHKEVGMLHQQVEEHEKIKQEMTMEYKQELKKLHEELCILKRSYEKLQKKQMREFRGNTKNHREDRSEIERLTAKIEEFRQKSLDWEKQRLIYQQQVSSLEAQRKALAEQSEIIQAQLVNRKQKLESVELSSQSEIQHLSSKLERANDTICANELEIERLTMRVNDLVGTSMTVLQEQQQKEEKLRESEKLLEALQEEKRELKAALQSQENLIHEARIQKEKLQEKVKATNTQHAVEAIRPREESLAEKKYTSQGQGDLDSVLSQLNFTHTSEDLLQAEVTCLEGSLESVSATCKQLSQELMEKYEELKRMEAHNNEYKAEIKKLKEQILQGEQSYSSALEGMKMEISHLTQELHQRDITIASTKGSSSDMEKRLRAEMQKAEDKAVEHKEILDQLESLKLENRHLSEMVMKLELGLHEAKEISLADLQENYIEALNKLVSENQQLQKDLMNTKSQLEISTQMCKKQNDRIFKPTHSRTTEFKNTEFKPTHGQHRHDGIKTEHYKTDLHSPRGQASDSINPMSRVLSPLSPQISPCSSTRSLTSYSLCKTHSLPSALDTNEANFSDTMSESMNDQEEFISSCSLPVSPLGSIATRFLEEEELRSHHILERLDAHIEELKRESEKTVRQFTALK

SEQ ID NO: 381 - DNA, 878 bp, Homo sapiens
gcacatcctgggacctttggtttgaaagctgactggttgtcagtccatgggctagcttaatgggaagccagtgctccccactggtctgaatagcctctgatatggtttggctgtgtccccaaccaaatgtcatcttgaattgtagtttccataatctccacgtgtcatgggagggaccaagtgggaggtaatttaatcatgggggtggttactctcatgctgttctcgtgatagtgagtgagttctcacaagatctgatgattttataaggggtgtttcccccttttgctcagcacttttccttgctgccgccatgagaagaagtatgtgttttcttccccttctgacatgattgttaagtttcctgaggcctccccagccatgctgaactgtattgcctccagcacactgtttacattcctactgtgtctcagcatctgttctcctgggaatagaactggtccacctgaacatatgatctgtgctgctgttggtgcaggaggacaggagggaaataagctggaagccatggatgtggagagtctggcttcaagatggagcttgtttacctgcaggttgtcccccaggatgccctcacagcttgtgcgtgacaaagatgtcctccgtgtacacataaggtagcgctgagaagccacgagaaagcacctagtgattttaacataaacatttccacagcattttcaagttctgcgaaaaagcccggtgatagatcagcctcgcggtgtgcagcgccggcagctccgcacttcggacacctgggggcgcccgtgccattccgccggcgactgggactcgtcgcccgggaaacaaagatggggatttaaagaaaagccttcaaaatgcaactccgaatgtct

SEQ ID NO: 382 - protein, 97 aa, Homo sapiens
MIVKFPEASPAMLNCIASSTLFTFLLCLSICSPGNRTGPPEHMICAAVGAGGQEGNKLEAMDVESLASRWSLFTCRLSPRMPSQLVRDKDVLRVHIR

SEQ ID NO: 383 - DNA, 5718 bp, Homo sapiens
atttgcagcgcaagcagcctagcgtgcggccgcggcgcccaggtcggaaaggaggcggcatcatggagctgaagaaggacatcaacgctgtatctatcgacatgctgctgatcgtgcactcggagaagcggcgcgccgcacagggtacgctctcagaccagcaggcgaacccgagctcgctgctgcagcgcggaggaggattccaaggtgttggaaatggagtccgaagatggcagaaattagaaggaaatgactttcacgaaaacttggtggagaagcagcaccctcagcagccccaggtcatcacttcctacaacagccaagggacacaactgactgtggaagtccaccctcgagatgccatgccccagctgctcaagaagttctccttggctaaacgtttacaaggtgataaaaatggaaacacaagaccccggcaacctggagggaaagatgcccatgcctacccctgggatcgatctagcctgaaatccatgtccctggacctgcagcagtttgagaaattggatatctacgcctcacaggtgacagccaagagtggcctagacgaactggtgagtgacctgctccaggaggcccacactgacctggaaagggtccgcgccatctggatctggatctgccatcacatagagtatgacattgcagctgctcaggagaaggaccgccaagccttcaaacccactgacatcctgcggacccagaagaccaactgtgatggctatgctggcctcttcgagagaatgtgcaggctcgccggagtgcagtgtatgaccgtgcctggctactccaagggtttcggctaccagacagggcagagcttctcgggggagtttgaccatgcctggaatgctgtgtacctggagggaagatggcacctggtggacagcacctggggcagcggcctggtggacaccatcacctccaaattcaccttcctctacaatgagttctacttcctcacccaccctgcactgttcatcgaggaccacttcccagacaacaagaactggcagctgctaaaacctcctcaatctctgaggcagtttgagaacaacatgtatcacaagagtgaattctacaacaaagggatgctgagtgcccacccagagacttccatgatcagaacagtgaatgggaaggccacggtcaccattgagagctgcgccccgacgctgttcatgttcatgctcaatggcaagcaagagcatgggctgctgagcctaaggaagaatgggatgaagttggaggtgtaccctccaaccatgggcactcacaagctgcagatctttgccaagggcaactccgacatctacagctcagtgctggagtacacgctcaagtgcaattatgtggacatgggtgtccagctgcctgctgagcttcaccagcccgtgggccccagctggttctcggagcagatgggcatcatgaagccctcccaccctgaccctatcatccacaccagcgacgggcgctgctccatcagcttcagcgtggaggagggcattaatgtcctggcttccctccacggggatgatggccccatcactgaggagacacagcggcgctacatcttccagctgcaccgggagaagcagaccgagctgaaagtccagctgccccatgcaggcaagtttgccctcaagatctttgtcaagaagaggcaggaaccaggaaactacatcttcgtctttaattaccttgtatgctgtgccaacaccaaggtgaactggcccatgttccctgagagctttggcaactggggacaggacaatgagctgctggaacctctgtcaggtgtgcttcctgccaaccggaatgtcccattcaaattgaagctgcatggtattgccaaagtcctggtgaaggggcaggacacatggcccctgaccctgaaccacgagggctactgggagggaagctgcagcacagctggctgccaggaagtctatgtcatggtgctggagaatgccaaccacaatttctactcctacatcctgaaatacaaagtgaatgcccagtgagggctgtgccccggtcttaccctcccaaagggccaaggccagacctccccagggagggctcgaaggaagtgcagggagccctggacaccactgagtctgcatgaaatcccttctaggcctctgcctcagtgtcccacctctgccacaggagctgtgatctttgtgttctgaaggcttcactcaggtgtggctgtgactgagggggcagaggcagtggctctttagaaggaaaaggtgctatgtaaatctaaggtattgtaaactgtacacctgcatccagatgccccttctcgtattagtgctgctgctgttgttgttgctgtagggttgatgagggaaagcagggatattgcccaggttgacagcttttcacatgatgcttagagaattctcttccatgcccaaggggacatgatttgcaaggctgggttgtccttgaatcacagagcccctttcaagcaatatcaccgtgcctctcgacagctccgagcccccagggaatcttggactatcttctcctcccagacctgatcatcttctgcatcctgctgcctcttcattagctacttcttgttcttcaagagcccaagaaaaagggtgtggtgaggaagccagctgacccacaactggctggaagctgatcgtctccaacatccctaagtatagtcaggaatgtgacaaccagaaagttgtgaggagactgcaaagcaaagagcagcccatgcccgctgtggctgtgcaggtgggagggacactgtcggcagagctgcagccttggtctgagggtgtaagacctccagctctgctctgagaggagtacacagggcaggtagttcagtctaaggcctggagtgccctccaggccctcacagagcctgggcctcaggcccctgccccacctccacagagagcctccagaggctggccaggcccttggggagtcttgtggatagccctgaataaggacctgggcgcagatcaggtgagtagtgcagtgcggcaatgccgaggagactcacactttaacagggctctgcctgcccccagtgtctctaccagcaaagccagggctgggaagaattccagctgcacgagagcagcttttgtgcctgtctcggagaaaacatcctatcccgtctcctttcctcccttctctgagaagacagccccctccagtctcaccttgcatggggacagctcagggctccttgcttgctcaggcacagactgagaggcctcagctgcccagctggccctcagcagcgcctcaggctgccgttgccatggcaacggaggaaaggctgacttcagcgagggcagataagagggaaaggcgagagaggccccacatggccactgcagaaccatcctggcacacagacatgctccctgctgaactcccggcttctccagctccgtggcccctggctgtctcagtgccccccaacccctgagagccagcactgcctggcacctctccccacagcccctccacaggcctccaggctcaaccacagccagggccagctgggaccctcatagcttcctccgtggcactcaccctcacatccctgtatccaacaaatgctcacagaagtaccagatgcttgggctacagaggtgaaccaagggggcccggcccctgccatccagagtacagggtgaggaaactgccaggcagcagcagccttccctgcccaggcctgactgaagatccaggctccagacacttctgttcattatcccccgggatccctcccctaaaagtccccactgccacccagcacggtggcctagcccagaaccagctcacaagggtgcccatcatccaacaggccggcggcctcgagcaaaaggggtgtctcccctggggggctgaactgtcctgggcaggtcctgcgccctccgcagtctctgccaccgaggccacccagccagcctcgtgtcactcacacctgaaaaatgcacaaaggccccggaggcataacagctatgcaccaccacagggaaacaaagggagttttacaccctgaaaacagccgtcttgcacacttctgattttatgggcttaaagaaatgtgtttgtttcatcaaaacaataagtgccttcgatgacgcatgtcactcactggaccccgcgctggctgcctcgcttagtcctgctggagacccccataccttttcgatatgcaatataattaatcaatacatcctggagcattgcagagaatgccacccagcaaaataggagctgtccccagcaccagagagggaggccccgcccctcaaagcaccgcagggcatcagcaagcccctccctctcgtttaactaggcaccccctttgtaaagacagctgtaggcgcagtcagaaaatcacctgcatttctttccactgaagtaaaaatacatgaaatgaaatctaatcttcatgaatttttacacgcatgctgctcagggtagacattcggagttgcattttgaaggcttttctttaaatccccatctttgtttcccgggcgacgagtcccagtcgccggcggaatggcacgggcgcccccaggtgtccgaagtgcggagctgccggcgctgcacaccgcgaggctgatctatcaccgggctttttcgcagaacttgaaaatgctgtggaaatgtttatgttaaaatcactaggtgctttctcgtggcttctcagcgctaccttatgtgtacacggaggacatctttgtcacgcacaagctgtgagggcatcctgggggacaacctggtgtgttgaaaagacaagggatgtgatgggactgttttgcctggaaataacttcttgaaacagaagcacttgacataggactggatggaacagctgtgactacactcattactataccattgaaggattggaaccgatcaaactcagaaagtatctgcttgcaattctcaggatggcagcccccaggccacagggcagaagggaaccgagggtggaggagtggtgggcagaggcactacaaccacaacttcagtacacttctttccagcttgtttcagaagtgccatagctcagctggactccattttcaatctgattatgatcattgtgagttccccatatgttacattgtcctaccaggacagcctcctcactgcctgctaagattaaaagtaaataaatagactaactgaagcatgaaggatttcggctagacataaagaactatttcctgttgttaagcaggagggacaagttgccaagaaagtttgtgaaatcctcttctcaaaggacttgaaaaggagaaaagttttcccagtggtctgaggttttagatgccatgttcactagaaggagtgggttttctcctctccaaaccaattaattcctgagatatcctggtctgcctgcagcaaacagagggttaacagcatcactacatcatttgctattggcaaaattttcgaagatggtgtgcctctattgcccgcctcagtttatcttaggtctataatttcttttcatttggagtaagtagtcggcaattgaaagaggtgattacttctcataatgtgtgcattgagttgtgtgggccggtggctgttgagtatgctttctccatgttgttgctggtgttgtttttcaataaaatttatattcatttttatccaaaaaaaaaaaaaaaa

SEQ ID NO: 384 - protein, 661 aa, Homo sapiens
MELKKDINAVSIDMLLIVHSEKRRAAQGTLSDQQANPSSLLQRGGGFQGVGNGVRRWQKLEGNDFHENLVEKQHPQQPQVITSYNSQGTQLTVEVHPRDAMPQLLKKFSLAKRLQGDKNGNTRPRQPGGKDAHAYPWDRSSLKSMSLDLQQFEKLDIYASQVTAKSGLDELVSDLLQEAHTDLERVRAIWIWICHHIEYDIAAAQEKDRQAFKPTDILRTQKTNCDGYAGLFERMCRLAGVQCMTVPGYSKGFGYQTGQSFSGEFDHAWNAVYLEGRWHLVDSTWGSGLVDTITSKFTFLYNEFYFLTHPALFIEDHFPDNKNWQLLKPPQSLRQFENNMYHKSEFYNKGMLSAHPETSMIRTVNGKATVTIESCAPTLFMFMLNGKQEHGLLSLRKNGMKLEVYPPTMGTHKLQIFAKGNSDIYSSVLEYTLKCNYVDMGVQLPAELHQPVGPSWFSEQMGIMKPSHPDPIIHTSDGRCSISFSVEEGINVLASLHGDDGPITEETQRRYIFQLHREKQTELKVQLPHAGKFALKIFVKKRQEPGNYIFVFNYLVCCANTKVNWPMFPESFGNWGQDNELLEPLSGVLPANRNVPFKLKLHGIAKVLVKGQDTWPLTLNHEGYWEGSCSTAGCQEVYVMVLENANHNFYSYILKYKVNAQ

SEQ ID NO: 385 - DNA, 4912 bp, Homo sapiens
acagtagaaagtcagaaggtcacaaagcttgcagggtaagtgacacaacttgaaactgcttggccctctttaaaaagaaataataaaatgggagagaatgaagcaagtttacctaacacgtctttgcaaggtaaaaagatggcctatcagaaggtccatgcagatcaaagagctccaggacactcacagtacttagacaatgatgaccttcaagccactgcccttgacttagagtgggacatggagaaggaactagaggagtctggttttgaccaattccagctagacggtgctgagaatcagaacctagggcattcagagactatagacctcaatcttgattccattcaaccagcaacttcacccaaaggaaggttccagagacttcaagaagaatctgactacattacccattatacacgatctgcaccaaagagcaatcgctgcaacttttgccacgtcttaaaaatactttgcacagccaccattttatttatttttgggattttgataggttattatgtacatacaaattgcccttcagatgctccatcttcaggaacagttgatcctcagttatatcaagagattctcaagacaatccaggcagaagatattaagaagtctttcagaaatttggtacaactatataaaaatgaagatgacatggaaatttcaaagaagattaagactcagtggacctctttgggcctagaagatgtacagtttgtaaattactctgtgctgcttgatctgccaggcccttctcccagcactgtgactctgagcagcagtggtcaatgctttcatcctaatggccagccttgcagtgaagaagccagaaaagatagcagccaagacctgctctattcatatgcagcctattctgccaaaggaactctcaaggctgaagtcatcgatgtgagttatggaatggcagatgatttaaaaaggattaggaaaataaaaaacgtaacaaatcagatcgcactcctgaaattaggaaaattgccactgctttataagctttcctcattggaaaaggctggatttggaggtgttcttctgtatatcgatccttgtgatttgccaaagactgtgaatcctagccatgataccttcatggtgtcactgaatccaggaggagacccttctacgcctggttacccaagtgtcgatgaaagttttagacaaagccgatcaaacctcacctctctattagtgcagcccatctctgcacccctcgttgcaaaactgatctcttcgccaaaagctagaaccaaaaatgaagcgtgtagctctctagagcttccaaataatgaaataagagtcgtcagcatgcaagttcagacagtcacaaaattgaaaacagttactaatgttgttggatttgtaatgggcttgacatctccagaccggtatatcatagttggcagccatcatcacactgcacacagttataatggacaagaatgggccagtagtactgcaataatcacagcgtttatccgtgccttgatgtcaaaagttaagagagggtggagaccagaccgaactattgttttctgttcttggggaggaacagcttttggcaatattggctcatatgaatggggagaggatttcaagaaggttcttcagaaaaatgttgtggcttatattagcctccacagtcccataagggggaactctagtctgtatcctgtagcatcaccatctcttcagcaactggtagtagagaaaaataatttcaactgtaccagaagagcccagtgcccagaaaccaatatcagttctatacagatacaaggtgatgctgattatttcatcaaccatcttggagttcccatcgtgcagtttgcttacgaggacatcaaaacattagagggtccaagttttctctccgaggcccgtttttctacacgagcaacaaaaattgaagaaatggatccctctttcaaccttcatgaaaccattactaagctctcaggagaagtgattttgcaaattgccaacgaacctgttctgccctttaatgcacttgatatagctttagaagttcaaaacaaccttaaaggtgatcaacccaacactcatcaactgttagccatggcgttacgcctgcgggagagtgctgaactttttcagtctgatgagatgcgacctgctaatgatcccaaggagagagcacccatccgcatccggatgctgaatgacattctccaagacatggagaaaagctttctggtaaagcaggcaccaccaggtttttatagaaacatcctctaccaccttgatgaaaagacaagccggttttcaatacttatagaggcttgggaacactgcaaaccccttgcatcaaatgagacccttcaagaagccctgtcagaggtgttgaacagcattaattcagctcaggtttacttcaaagcaggacttgatgtgttcaagagtgtcttggatgggaagaattgagaaaactctgagcatttttaaaagtttgtttacaattccacaagcaaaagctctaatttaaccagattttctgacattgaaggcttattttccccaatggctttttgacaagtataaagctattattacattgtattttttaaatgtaaatatagaaagaacattttgcacatttaatatttttcttatatctacatttctgaatatgtaaagcaagttattgaaataggacttaagaattacctattaaaaagaaatctgatatataaaaatatgtactattttaaggaaaaatttccaagaagttctggactatctttgttcctatggggagggcatataggaacacagtttattctctctgatagagctattaatgacttagtttctgtaaaagaaatggagagttgatatggttcagattaacttcactattaagtgttcaatatgaagaattcaagtattctgactgagtgattggttgacctaaaccactttgaatgtttctattttatgaaatgaagtttctcttcttaacacaactagatgtagtaatacactggttatgaaattgtatttttttaagtattaatgaaaaaagagccataagcattccaggagaaaatctcaagggagctacatagagcaatttaaatgcaaatttttttcctaacaacttacaaggtgactagctttgaaacccctaatttgcctcagttgattttctaagaatttcaggagtgatgtatgtcttaagagggagaaaaaaatatttcttattactttttctcttgtttctgttggaaacactgaagcagggactctaaaatgaaagcatctcacattggttttctttcttgtatcttttctgaaactccttgctgtaaggcagctttctcagagtactatatattttcaacagtaaagtagcagagtttctctttgaaacccaaaatgtcttctaaagaatcaaatttctatttctgcctctgacaaaaagaacttactatgaaagaaatagttgttttatcaataaaagccccttaatattatgaagaaacttttcatattttttcttctttatccttaattgtgactaagatggaaatctagaaaatattcatgcttctaagtttctgcagtgttactgtaagagagtgtctcgtctacacttcagttcttctctcatgtggaaaactaagctttttatattgacattgccattgaatagctctagcaactattattattcccccaaaccctaaaattctacctattaggtgtcaggttaaagttctaatttatctttagaaatttatgtgaaaaatggttttcctatactggataaagcaattccccttaggaaacatagcctcagagtatttcatataaattttctctatctaattcaaacatatctccccatgatacaccgccagagtgacattgcagacagtctgtgtatgtttaaattttcactttttatggatgagcataaacctagtcttagtttaaaggcaaactaaagttgaggggaaataattaatcaatactgattaattgatttataaggttcaacactgtctaccctaaataatttttatatgctcaaggcaaagcagggaatagaggcaattagctagataattcaagcagaaatccattttcatcgaaattgcctgtgtgcacatatttttagatgaaaaatgaaactaccttacaatattatttttttaaccaatgtatttgtttgcaaacatttgccatgttgaagagtgtgtataggaaaggtctagaaataaataggcttgtgcatacctaggcattcatgctctttcttcctcttcagagatcatcagaaaagaggtgggaatacacaagcaggtgcatgtaagcccaaaagctagaaagccttatatttaaccaaaggttgatgtgttcattccagttattcacttacagatgaaactaaaacaaataaaggcaagctattatcagtttggtagttcattattttagaacaaatttctaaattaatttattcccataacctacaatagcactgagaacagaaaacatgtttcttcttcattttgtttaaagattgcgtacctaggtaagtcacactgtatagataaaaaccttcttctgtattcctcacctctaaattatatgttatttgctatttgaaaactgtagttaactatggttttttattagtctattaaaagatacgtggagatattaaattatacctaaagcagacgtccaacaaattctgtacatgctgctttacatctttgcaacaaacctcttaactagcagcattatttctatagtgtgattacctgagggtgcctccaaatgtatatcatttcactcccctcccctccccacccccaatagattcaaataaataaaatcctgagcaaattaa

SEQ ID NO: 386 - protein, 795 aa, Homo sapiens
MGENEASLPNTSLQGKKMAYQKVHADQRAPGHSQYLDNDDLQATALDLEWDMEKELEESGFDQFQLDGAENQNLGHSETIDLNLDSIQPATSPKGRFQRLQEESDYITHYTRSAPKSNRCNFCHVLKILCTATILFIFGILIGYYVHTNCPSDAPSSGTVDPQLYQEILKTIQAEDIKKSFRNLVQLYKNEDDMEISKKIKTQWTSLGLEDVQFVNYSVLLDLPGPSPSTVTLSSSGQCFHPNGQPCSEEARKDSSQDLLYSYAAYSAKGTLKAEVIDVSYGMADDLKRIRKIKNVTNQIALLKLGKLPLLYKLSSLEKAGFGGVLLYIDPCDLPKTVNPSHDTFMVSLNPGGDPSTPGYPSVDESFRQSRSNLTSLLVQPISAPLVAKLISSPKARTKNEACSSLELPNNEIRVVSMQVQTVTKLKTVTNVVGFVMGLTSPDRYIIVGSHHHTAHSYNGQEWASSTAIITAFIRALMSKVKRGWRPDRTIVFCSWGGTAFGNIGSYEWGEDFKKVLQKNVVAYISLHSPIRGNSSLYPVASPSLQQLVVEKNNFNCTRRAQCPETNISSIQIQGDADYFINHLGVPIVQFAYEDIKTLEGPSFLSEARFSTRATKIEEMDPSFNLHETITKLSGEVILQIANEPVLPFNALDIALEVQNNLKGDQPNTHQLLAMALRLRESAELFQSDEMRPANDPKERAPIRIRMLNDILQDMEKSFLVKQAPPGFYRNILYHLDEKTSRFSILIEAWEHCKPLASNETLQEALSEVLNSINSAQVYFKAGLDVFKSVLDGKN

SEQ ID NO: 387 - DNA, 3396 bp, Homo sapiens
cctttaagagcggctggccaggcacggcctccgcctctcagtacgcggagcgccggcggtcacctggggctcgcggagcggccagatcgcggcggagtcggcgcgcttccccgagggaaggtgggagaggggacccggacgcgaggtgccccgaagccctctcgagcgtaaccgtcccgcgcctctctgaggcggaggatgcgggagcgcatctgggcgccgccgctgctgctgctgctgccgctgctactgccgccgccactgtggggcggccccccggacagcccacgccgggagctggagctggagcccgggcctctgcagcccttcgacctgctctacgccagcggcgcggccgcctactacagcggagactacgagcgagcggtgcgcgacttggaagcggcgctgcgcagccaccggcgcctgcgggaaatccgcacgcgctgtgcccgccactgcgcggcgcgccacccgctcccgcccccgccccccggcgagggccccggcgctgagctgccccttttccgctccttgttggggcgggcgcgctgttatcgcagctgtgagacccagcgcctcgggggccccgcatcccgccaccgcgtcagcgaggatgtgcgcagcgacttccagcgcagagtgccctacaactacctgcagcgggcctacatcaagcttaaccagctcgaaaaagcagtggaagcagctcacacatttttcgtggctaaccctgagcacatggaaatgcagcagaacattgagaattacagggcgacagctggtgttgaagcattgcagttggtagacagagaagccaagccacacatggagagttacaatgcaggagttaaacattatgaggctgatgactttgagatggctatcaggcatttcgaacaagccttaagagaatatttcgttgaagatacagaatgccggaccctatgtgaggggcctcagagatttgaagaatatgagtatttagggtataaggctggtctgtatgaagctattgcagatcactacatgcaggtgcttgtttgtcagcatgaatgtgtgagggaacttgccacccgccctggccgcctctctcccatcgagaattttcttcctctgcactatgattacctacagtttgcctactatcgagttggtgagtatgtgaaagccctggagtgtgccaaagcctatcttctatgccatccagatgatgaggatgtcctagacaatgtggattactatgagagtctgctggatgatagcattgacccggcatccattgaggccagagaggatttaacaatgtttgtgaaacgtcataagctggagtctgagctgataaaatcagctgcagaaggtctggggttttcatacactgaaccgaattattggatcagatatggaggacgacaggatgagaatcgggtcccttcaggagtgaacgtagagggagcagaagttcatggattctcaatgggaaaaaagctatcacccaagatagatcgagacctaagagaaggtggtcctctactctatgagaacatcacattcgtctacaactcggagcagctgaacgggactcagcgggttctcctggataacgtcctgtcggaagaacagtgccgggagctccacagcgtggccagtggaatcatgcttgttggtgatggatacagaggaaaaacttcaccccatacacccaatgaaaagtttgaaggtgcaactgtcctgaaagcactcaaatctggttatgaaggtcgagtcccactgaagagcgctcgtctgttttatgacatcagcgaaaaggctcgaaggattgtagaatcttattttatgctgaactcaactctgtatttttcctatacacacatggtctgccgaacagccctgtctggtcagcaggatagaagaaatgacctcagtcatcccatccatgctgacaactgtttgttggatccagaggccaacgaatgctggaaggagcctcctgcttacacatttcgagactatagtgctctcctatatatgaatgatgactttgaaggaggagaattcatattcacagagatggatgctaagactgtgactgcctctataaaaccaaaatgtgggcgcatgatcagcttctcatctggaggagagaaccctcatggggtgaaggcagtcaccaagggaaagaggtgtgctgtggctctgtggttcaccttggacccactttatagagaattggagcgaatacaggctgatgaagtgattgcaattctggatcaagaacagcaagggaagcatgaactgaatatcaaccctaaagatgagctataaaaatgagaaagaatgttctatcaaatatttatttaaattgttaatcttatgagaacctttttatttttgtacagagccatggtataaattaacaggttaatgtcagtcatcagatcttccttctcttcctaaggatgcttgtgttgcctcaatctatcaatctatctttcttgttttgggttgttttctctctctctctctctctctcttcttagagacatggtctaaccatgttgtctaggatatagggcagtggctattcacagatgtgatgatagcacactggagcctcaaactcttaggctcaggcgatccttcaagcctcccggggagctgggaccacaggcacgtgccaccacacccagctctctttcttggtttttcatcatttcatgtatctatcaaagcccagttcacctcctcccccaaacacacacacacacacacacacacacacacacaattaagttgctgcagattcaaaagcttagagagaataagcttcttggtggtgaaactacaactctcacgtgtgctccagttctaaaattaacctgtgcctggtctctgaagccctttcttgctctgtgcctttcagccacatccttaggtgctaacggccatgagctccgactctccaaagtgagctccactttgggtctgaggagcccctggcagagtccacgctgcctcaggtatcatgggcgtaatgatcacccaggctccgggagatctcatggatgattactgtatgagacagaggggacttcagtctttccagggccttggtggaatttttggctctggtgttttcgccagacaataaacttacactggaagctttgatccaccctccacagtactccagaaaggactgtcctataagttgtacactttaaaaggtcatgtagaggttgtagtagaatggcttttcaccctggtgactttggaagaaactcttgaatactgcctgcatccgggcaccatggccaggttgcctaggagtggggtccactgatgaaaagaggtgttttgtacttacataagaaaaataaatttctgattgatttt

SEQ ID NO: 388 - protein, 708 aa, Homo sapiens
MRERIWAPPLLLLLPLLLPPPLWGGPPDSPRRELELEPGPLQPFDLLYASGAAAYYSGDYERAVRDLEAALRSHRRLREIRTRCARHCAARHPLPPPPPGEGPGAELPLFRSLLGRARCYRSCETQRLGGPASRHRVSEDVRSDFQRRVPYNYLQRAYIKLNQLEKAVEAAHTFFVANPEHMEMQQNIENYRATAGVEALQLVDREAKPHMESYNAGVKHYEADDFEMAIRHFEQALREYFVEDTECRTLCEGPQRFEEYEYLGYKAGLYEAIADHYMQVLVCQHECVRELATRPGRLSPIENFLPLHYDYLQFAYYRVGEYVKALECAKAYLLCHPDDEDVLDNVDYYESLLDDSIDPASIEAREDLTMFVKRHKLESELIKSAAEGLGFSYTEPNYWIRYGGRQDENRVPSGVNVEGAEVHGFSMGKKLSPKIDRDLREGGPLLYENITFVYNSEQLNGTQRVLLDNVLSEEQCRELHSVASGIMLVGDGYRGKTSPHTPNEKFEGATVLKALKSGYEGRVPLKSARLFYDISEKARRIVESYFMLNSTLYFSYTHMVCRTALSGQQDRRNDLSHPIHADNCLLDPEANECWKEPPAYTFRDYSALLYMNDDFEGGEFIFTEMDAKTVTASIKPKCGRMISFSSGGENPHGVKAVTKGKRCAVALWFTLDPLYRELERIQADEVIAILDQEQQGKHELNINPKDEL

SEQ ID NO: 389 - DNA, 872 bp, Homo sapiens
atggaaaattcagagaagacagaagtggctctctgtgcttgtggttcctttaattctatcaccaacaagcacctcaggttgtttgagctggccaaggattacatgaatggaacaggaagatatagagttgtcaaaggcataatctctcctgttggcgatgcatacaagaagaaaggactcattcctgcccatcaccaggtcatcacggcagaacttgccacccaaaattccaaatgggtagaagttgacacatgggaaagtcttcagaaggagtggatagagactgttaaggtgctaaggcaccatcaagagaaactgaaggccagtaactgtgatcaccagcagaactcacctacattaggaaggcctggacgaaagaggaagtggactgaacaaagacaagattctgatcaagaggaatcccctagagccaaaaatgaaaggtgcgccaaaggtccatctgctgtgtgggggtagatttactggagtctttggtgttctcagtttgtggatgagtgaagatatcatccaaatcgtggcagattatgagctcatatgtattacttgatatatattatcatggaaaattcagattaaattggaaatgatgctcagaaattcatctatgaatctgatgtgttgttgaaacatcagagcaacattcacatggtgaatgaatggatgactattgagatctcattgacaaaaatctggagagtcctcagaagggatcagagcatttgctagttggcaccagatcttgtccaataataccttgaaaagcagaatttgtacagctccgagagtgaaaacaggaatgttgggatcatcctgcccctttgcagagaaacactgcagaagctaaggcatag

SEQ ID NO: 390 - DNA, 4222 bp, Homo sapiens
ggagaggaggaacggagctgggacgggctgcaggagggaatggccgcaggccggcaggaggaggggcgcgaccacccggccgccggccgatggcggatgaggctatgggggctgagacgcagtagcggccctgcacttctggaggatgctcgaggcccggccccccaggacgcagggcagtgacgctgccggtgccgctgcggggcgggggctgcgggcgctgcttctctccctgaccgcagccgctgggatttggggctccatgggggagagatctgcttaccagcgcctggctgggggcgaggagggaccgcagaggctgggaggcggcagaatgcagccagaggagggcacaggctggctgctggagctgctgtccgaggtgcagctgcaacagtacttcctgcggctccgagatgacctcaacgtcacccgcctgtcccactttgagtacgtcaagaatgaggacctggagaagatcggcatgggtcggcctggccagcggcggctgtgggaggctgtgaagaggaggaaggccttgtgcaaacgcaagtcgtggatgagtaaggtgttcagtggaaagcgactggaggctgagttcccacctcatcactctcagagcaccttccggaagacctcgcccgcccctgggggcccagcaggggaggggcccctgcagagcctcacctgcctcattggggagaaggacctgcgcctcctggagaagctgggtgatggttcctttggcgtggtgcgcaggggcgagtgggacgcgccctcagggaagacggtgagtgtggctgtgaagtgcctgaagcccgatgtcctgagccagccagaagccatggacgacttcatccgggaggtcaatgccatgcactcgctcgaccaccgaaacctcatccgcctctacggggtggtgctcacgccgcccatgaagatggtgacagagctggcacctctgggatcgttgttggaccggctacgtaagcaccagggccacttcctcctggggactctgagccgctacgctgtgcaggtggctgagggcatgggctacctggagtccaagcgctttattcaccgtgacctggctgcccgcaatctgctgttggctacccgcgacctggtcaagatcggggactttgggctgatgcgagcactacctcagaatgacgaccattacgtcatgcaggaacatcgcaaggtgcccttcgcctggtgtgcccccgagagcctgaagacacgcaccttctcccatgccagcgacacctggatgttcggggtgacactgtgggaaatgttcacctacggccaggagccctggatcggcctcaacggcagtcagatcctgcataagatcgacaaggagggggagcggctgccccggcccgaggactgtccccaggacatctacaacgtcatggtccagtgctgggctcacaagccagaggacagacccacgtttgtggccctgcgggacttcctgctggaggcccagcccacagacatgcgggcccttcaggactttgaggaaccggacaagctgcacatccagatgaatgatgtcatcaccgtcatcgagggaagggccgagaactactggtggcgtggccagaacacacggacgctgtgtgtggggcccttccctcgcaacgtggtgacctccgtggccggcctgtcggcccaggacatcagccagcccctgcagaacagcttcatccacacagggcatggcgacagtgacccccgccactgctggggcttcccggacaggattgacgaactgtatctgggaaaccccatggacccccccgacctcctgagcgtggaactgagcacctcccggcccccccagcatctaggaggggtgaaaagggagcctccacctcgcccacctcagcctgccttcttcactcagaaaccaacctatgaccctgtgagcgaggaccaagaccccttgtccagcgacttcaagaggctgggcctgcggaagccaggcctgccccgagggctgtggctggcgaagccctcggcgcgggtgccgggcaccaaggccagccgaggcagcggggctgaggtcacgctcatcgacttcggtgaggagcccgtggtcccggccctacggccctgcgcgccctccctggcgcagctggccatggacgcctgctccctgctggacgagaccccgcctcagagccccacgcgggcactgccccggcccctgcaccccacgcctgtggtggactgggacgcacgcccgctgccccccccgcccgcctatgacgacgtggcccaggatgaggatgactttgagatctgctccatcaacagcaccctcgtgggcgcgggggtccctgccgggcccagccagggccagaccaactacgcctttgtgcctgagcaggcgcggccgccccctcccctggaggacaacctgttcctcccgccccagggtgggggcaagccgcccagctccgcacagaccgcagagatcttccaggcgctacagcaggagtgcatgaggcaactgcaggctccggccggctccccggccccctctcccagcccggggggtgacgacaagccccaggtgcctcctcgggtacccatcccccctcggcccacgcgcccacacgtccagctgtctccagcccccccgggcgaggaggagaccagccagtggcctggacctgcttcccctccccgggtgcctccgcgggagcccctgtcccctcaaggctcgaggacacccagccccctggtaccacctggcagctccccgctgccaccccggctctcaagctcacctgggaagaccatgcccaccacccagagctttgcctcagaccccaagtacgccaccccccaggtgatccaggcccctggcccgcgggctggtccctgcatcctgcccatcgtccgggatggcaagaaggtcagcagcacccactattacttgctgcccgagcgaccatcctacctggagcgctaccagcgcttcctgcgtgaggcccagagccccgaggagcctacccccctgcctgtgcctctgctgctgcccccacccagcaccccagcccccgccgcccccacggccaccgtgcggccgatgccccaggctgccttggaccccaaggccaacttctccaccaacaacagcaacccaggggcccggccaccacccccgagggccactgctcggctgccacagaggggctgccctggcgatgggccagaggcgggccggccagcagacaagatccagatggtggagcagctcttcgggctgggtctgcggcccagaggggagtgccacaaagtgctggagatgttcgactggaacctggagcaggccggctgccaccttctgggctcctggggccctgcccaccacaagcgctgagatgcgtctggagagccagagggcctgcctgaaggaatcacctgagcctgtccgtccaccaggagtggggagatgcccccatccagtcctggaggacccgctgctcctgctgctcccggggatggagcaaggccaaggctgcgggaggctgggagccctgccctgcccatccctcctgcaccagcgctgtccctgcacactttggttcagtcccggtgcccctgccaagatgtggaaggggccgggtgaagacaggcttgagggctgccccagcaggctctgggtatgacctgcctctggccctggtcctgggcggggcctgtgggtggagtagtacccccaggccctgccctgggtgacagactgggaggaaaccaggctggacctgggcaggcgggatgtgttggccacagggagaggcggaccggcacccggtgggacctcctaggactgggccttcttccagggggcccctggcagcagctggggtgtcgggcagaatgtgacttgtggccttaccatggacttgaatgggacttggctggcctcaggatcttgtgcctggaaatagcctgaggtggctcaggaagcggagaaagggtgccagaccattctctggcggggaccagggcccaaggccccagggctggaaggagaccaaggggcagccgccctggagggacatcagtgcttcctcttccacccaattcccccacgcggttccatgttttcccaccagcctgttggcgaagttgctgctccggcattcagtacctgcttcttccagagaaataaagttagtttctattttatgtt

SEQ ID NO: 391 - protein, 1086 aa, Homo sapiens
MLEARPPRTQGSDAAGAAAGRGLRALLLSLTAAAGIWGSMGERSAYQRLAGGEEGPQRLGGGRMQPEEGTGWLLELLSEVQLQQYFLRLRDDLNVTRLSHFEYVKNEDLEKIGMGRPGQRRLWEAVKRRKALCKRKSWMSKVFSGKRLEAEFPPHHSQSTFRKTSPAPGGPAGEGPLQSLTCLIGEKDLRLLEKLGDGSFGVVRRGEWDAPSGKTVSVAVKCLKPDVLSQPEAMDDFIREVNAMHSLDHRNLIRLYGVVLTPPMKMVTELAPLGSLLDRLRKHQGHFLLGTLSRYAVQVAEGMGYLESKRFIHRDLAARNLLLATRDLVKIGDFGLMRALPQNDDHYVMQEHRKVPFAWCAPESLKTRTFSHASDTWMFGVTLWEMFTYGQEPWIGLNGSQILHKIDKEGERLPRPEDCPQDIYNVMVQCWAHKPEDRPTFVALRDFLLEAQPTDMRALQDFEEPDKLHIQMNDVITVIEGRAENYWWRGQNTRTLCVGPFPRNVVTSVAGLSAQDISQPLQNSFIHTGHGDSDPRHCWGFPDRIDELYLGNPMDPPDLLSVELSTSRPPQHLGGVKREPPPRPPQPAFFTQKPTYDPVSEDQDPLSSDFKRLGLRKPGLPRGLWLAKPSARVPGTKASRGSGAEVTLIDFGEEPVVPALRPCAPSLAQLAMDACSLLDETPPQSPTRALPRPLHPTPVVDWDARPLPPPPAYDDVAQDEDDFEICSINSTLVGAGVPAGPSQGQTNYAFVPEQARPPPPLEDNLFLPPQGGGKPPSSAQTAEIFQALQQECMRQLQAPAGSPAPSPSPGGDDKPQVPPRVPIPPRPTRPHVQLSPAPPGEEETSQWPGPASPPRVPPREPLSPQGSRTPSPLVPPGSSPLPPRLSSSPGKTMPTTQSFASDPKYATPQVIQAPGPRAGPCILPIVRDGKKVSSTHYYLLPERPSYLERYQRFLREAQSPEEPTPLPVPLLLPPPSTPAPAAPTATVRPMPQAALDPKANFSTNNSNPGARPPPPRATARLPQRGCPGDGPEAGRPADKIQMVEQLFGLGLRPRGECHKVLEMFDWNLEQAGCHLLGSWGPAHHKR

SEQ ID NO: 392 - DNA, 4476 bp, Homo sapiens
gggccggaaagttccggcgaactgggggagcggcagtgggagagcgtcgggcgggaggcggtggtcctgggagcggccccggcgccccgaagccgccccgagctggtggggagggcccggccggtggggccccgggggcctgcgggggaggggcgcctgggggtgcaagaggcgaattggctgcccggggtgcaggagggacaggtggtgcgggctgtccaggaaacctacctgaacgggaaggagccccaggagggagagggacccggcgaggggctcaggacccggaggcgccggcggaggaggaggtggtgactggcaggcccgggccccacggtacctccggggctgaaggggacgcaggatgtaggggcatggggagtcgggcgcagaagagtgcggggaaccgctgagctctgggagccactgcctgagggcaggccgcggccggcgggaacctcttctgccgtctcagcctgggcgtcgctgaagctgtgtctgcggggaggcagcggaaggcggcagaggctgggaggcggcagaatgcagccagaggagggcacaggctggctgctggagctgctgtccgaggtgcagctgcaacagtacttcctgcggctccgagatgacctcaacgtcacccgcctgtcccactttgagtacgtcaagaatgaggacctggagaagatcggcatgggtcggcctggccagcggcggctgtgggaggctgtgaagaggaggaaggccttgtgcaaacgcaagtcgtggatgagtaaggtgttcagtggaaagcgactggaggctgagttcccacctcatcactctcagagcaccttccggaagacctcgcccgcccctgggggcccagcaggggaggggcccctgcagagcctcacctgcctcattggggagaaggacctgcgcctcctggagaagctgggtgatggttcctttggcgtggtgcgcaggggcgagtgggacgcgccctcagggaagacggtgagtgtggctgtgaagtgcctgaagcccgatgtcctgagccagccagaagccatggacgacttcatccgggaggtcaatgccatgcactcgctcgaccaccgaaacctcatccgcctctacggggtggtgctcacgccgcccatgaagatggtgacagagctggcacctctgggatcgttgttggaccggctacgtaagcaccagggccacttcctcctggggactctgagccgctacgctgtgcaggtggctgagggcatgggctacctggagtccaagcgctttattcaccgtgacctggctgcccgcaatctgctgttggctacccgcgacctggtcaagatcggggactttgggctgatgcgagcactacctcagaatgacgaccattacgtcatgcaggaacatcgcaaggtgcccttcgcctggtgtgcccccgagagcctgaagacacgcaccttctcccatgccagcgacacctggatgttcggggtgacactgtgggaaatgttcacctacggccaggagccctggatcggcctcaacggcagtcagatcctgcataagatcgacaaggagggggagcggctgccccggcccgaggactgtccccaggacatctacaacgtcatggtccagtgctgggctcacaagccagaggacagacccacgtttgtggccctgcgggacttcctgctggaggcccagcccacagacatgcgggcccttcaggactttgaggaaccggacaagctgcacatccagatgaatgatgtcatcaccgtcatcgagggaagggccgagaactactggtggcgtggccagaacacacggacgctgtgtgtggggcccttccctcgcaacgtggtgacctccgtggccggcctgtcggcccaggacatcagccagcccctgcagaacagcttcatccacacagggcatggcgacagtgacccccgccactgctggggcttcccggacaggattgacgaactgtatctgggaaaccccatggacccccccgacctcctgagcgtggaactgagcacctcccggcccccccagcatctaggaggggtgaaaaaaccaacctatgaccctgtgagcgaggaccaagaccccttgtccagcgacttcaagaggctgggcctgcggaagccaggcctgccccgagggctgtggctggcgaagccctcggcgcgggtgccgggcaccaaggccagccgaggcagcggggctgaggtcacgctcatcgacttcggtgaggagcccgtggtcccggccctacggccctgcgcgccctccctggcgcagctggccatggacgcctgctccctgctggacgagaccccgcctcagagccccacgcgggcactgccccggcccctgcaccccacgcctgtggtggactgggacgcacgcccgctgccccccccgcccgcctatgacgacgtggcccaggatgaggatgactttgagatctgctccatcaacagcaccctcgtgggcgcgggggtccctgccgggcccagccagggccagaccaactacgcctttgtgcctgagcaggcgcggccgccccctcccctggaggacaacctgttcctcccgccccagggtgggggcaagccgcccagctccgcacagaccgcagagatcttccaggcgctacagcaggagtgcatgaggcaactgcaggctccggccggctccccggccccctctcccagcccggggggtgacgacaagccccaggtgcctcctcgggtacccatcccccctcggcccacgcgcccacacgtccagctgtctccagcccccccgggcgaggaggagaccagccagtggcctggacctgcttcccctccccgggtgcctccgcgggagcccctgtcccctcaaggctcgaggacacccagccccctggtaccacctggcagctccccgctgccaccccggctctcaagctcacctgggaagaccatgcccaccacccagagctttgcctcagaccccaagtacgccaccccccaggtgatccaggcccctggcccgcgggctggtccctgcatcctgcccatcgtccgggatggcaagaaggtcagcagcacccactattacttgctgcccgagcgaccatcctacctggagcgctaccagcgcttcctgcgtgaggcccagagccccgaggagcctacccccctgcctgtgcctctgctgctgcccccacccagcaccccagcccccgccgcccccacggccaccgtgcggccgatgccccaggctgccttggaccccaaggccaacttctccaccaacaacagcaacccaggggcccggccaccacccccgagggccactgctcggctgccacagaggggctgccctggcgatgggccagaggcgggccggccagcagacaagatccagatggccatggtgcatggggtgaccacagaggagtgccaggcggccctgcagtgccacggctggagcgtgcagagggctgcccagtatctgaaggtggagcagctcttcgggctgggtctgcggcccagaggggagtgccacaaagtgctggagatgttcgactggaacctggagcaggccggctgccaccttctgggctcctggggccctgcccaccacaagcgctgagatgcgtctggagagccagagggcctgcctgaaggaatcacctgagcctgtccgtccaccaggagtggggagatgcccccatccagtcctggaggacccgctgctcctgctgctcccggggatggagcaaggccaaggctgcgggaggctgggagccctgccctgcccatccctcctgcaccagcgctgtccctgcacactttggttcagtcccggtgcccctgccaagatgtggaaggggccgggtgaagacaggcttgagggctgccccagcaggctctgggtatgacctgcctctggccctggtcctgggcggggcctgtgggtggagtagtacccccaggccctgccctgggtgacagactgggaggaaaccaggctggacctgggcaggcgggatgtgttggccacagggagaggcggaccggcacccggtgggacctcctaggactgggccttcttccagggggcccctggcagcagctggggtgtcgggcagaatgtgacttgtggccttaccatggacttgaatgggacttggctggcctcaggatcttgtgcctggaaatagcctgaggtggctcaggaagcggagaaagggtgccagaccattctctggcggggaccagggcccaaggccccagggctggaaggagaccaaggggcagccgccctggagggacatcagtgcttcctcttccacccaattcccccacgcggttccatgttttcccaccagcctgttggcgaagttgctgctccggcattcagtacctgcttcttccagagaaataaagttagtttctattttatgtt

SEQ ID NO: 393 - protein, 1038 aa, Homo sapiens
MQPEEGTGWLLELLSEVQLQQYFLRLRDDLNVTRLSHFEYVKNEDLEKIGMGRPGQRRLWEAVKRRKALCKRKSWMSKVFSGKRLEAEFPPHHSQSTFRKTSPAPGGPAGEGPLQSLTCLIGEKDLRLLEKLGDGSFGVVRRGEWDAPSGKTVSVAVKCLKPDVLSQPEAMDDFIREVNAMHSLDHRNLIRLYGVVLTPPMKMVTELAPLGSLLDRLRKHQGHFLLGTLSRYAVQVAEGMGYLESKRFIHRDLAARNLLLATRDLVKIGDFGLMRALPQNDDHYVMQEHRKVPFAWCAPESLKTRTFSHASDTWMFGVTLWEMFTYGQEPWIGLNGSQILHKIDKEGERLPRPEDCPQDIYNVMVQCWAHKPEDRPTFVALRDFLLEAQPTDMRALQDFEEPDKLHIQMNDVITVIEGRAENYWWRGQNTRTLCVGPFPRNVVTSVAGLSAQDISQPLQNSFIHTGHGDSDPRHCWGFPDRIDELYLGNPMDPPDLLSVELSTSRPPQHLGGVKKPTYDPVSEDQDPLSSDFKRLGLRKPGLPRGLWLAKPSARVPGTKASRGSGAEVTLIDFGEEPVVPALRPCAPSLAQLAMDACSLLDETPPQSPTRALPRPLHPTPVVDWDARPLPPPPAYDDVAQDEDDFEICSINSTLVGAGVPAGPSQGQTNYAFVPEQARPPPPLEDNLFLPPQGGGKPPSSAQTAEIFQALQQECMRQLQAPAGSPAPSPSPGGDDKPQVPPRVPIPPRPTRPHVQLSPAPPGEEETSQWPGPASPPRVPPREPLSPQGSRTPSPLVPPGSSPLPPRLSSSPGKTMPTTQSFASDPKYATPQVIQAPGPRAGPCILPIVRDGKKVSSTHYYLLPERPSYLERYQRFLREAQSPEEPTPLPVPLLLPPPSTPAPAAPTATVRPMPQAALDPKANFSTNNSNPGARPPPPRATARLPQRGCPGDGPEAGRPADKIQMAMVHGVTTEECQAALQCHGWSVQRAAQYLKVEQLFGLGLRPRGECHKVLEMFDWNLEQAGCHLLGSWGPAHHKR

SEQ ID NO: 394 - DNA, 1653 bp, Homo sapiens
atgggctcttctgaaacagagcctcatggagccctgcgctctggtgccccctggtggacacctagagttgtggttggtaaccaacaaatggaccattccacgcagcatcgctccccggttccactcagcattcctccccggttccacgcagcatcgctcagtgccccacagacacggtcacagatcagagggcacaccatcctagcagtggagcaggaccagctgggacagggtccttctgtgacacctgctgcatcaccaggctgggtgaacggacacaattgccagaactcacagaatagaagtatcagcaccgaaacctcacaggaaaaatggtgcacggccatcaaactggaacatcagctccccggccctcaaaccagaacatcagctccccgccggatctccacctgcacagccgtcaacatcagctcctccccgagtcctcagctgcacgaccctcaagttagaacatcagcttctccccaagtcttcagctgcgtgaccctcaatctagaacatcagttcctctccgggtctgcagctgcaagaccctcaatctagaacgtcagctcctccctgagtctccagctgaaagaccctcaaaacaaacaacatcagctcctccccgagtcttcagctgcacgacgctcaatctacaacatcagctcctgtctggttctccagctgcacgaccctcaaactacaacctcagctcttccccgagtcttctgctgtatgaccctcatctagaacataagctcctctctgggtgtccacctgtagggaactcaaattagaacgtcagctcctcccagagtcttcagctgcatgaccctcaatctttaacatcagctcctctccgggtctgcagctccatgaccctaaaaatacatcagcagctcctccctgaatcttcagctgtacgaccctcaaactacaacatcagctcctgtctgcatctctagctgcacggccctcaaactagaatatcagctcctccccgagtcttcacctgcacgaccctcaaactagaacatcagctcctgtacagatttccaactgtagggccctcaaactagaacatcagctcctccccaagtcagcagctgcaagaccctcaaattaccaccttagctcctcctggagtcttcagctgcacgaccctcaatctcgaagatcagatactctccgggtcttcagctgtagggccctcaaactataacatcagctcctctctgagtattcagctgcacgaccctcaatctcgaacatcaactcctcttcaggtgtgcagctgtagggccctcaatctagaacatcagctcctccctgagccttctgctgcatgaccctcaaactagaatctcagctcctcccgagtcttcagctgcatgaccctcaaactagaacctcagctcctccctgagtcttcagctgcatgacccttaatctagaacatcagctcctccccgagtcttcagctgcatgaccctcaatctagaacatcagctcctctccaggtttgcagctgcaagaccctcaaactagaacatcagctcctctccaggtctgcagctgcaagaccctcaaactagaacatcagttctcctacagttctgcagctgcaagaccctccatgtagaacatcag

SEQ ID NO: 395 - protein, 187 aa, Homo sapiens [sequence omitted]

SEQ ID NO: 396 - DNA, 2277 bp, Homo sapiens
gggaaatggcggccgcgggcttggtcgctgtggcagcggctgccgagtactctggcacggtagcgtcgggaggtaacctccctggtgttcactgcggcccaagctccggggcaggccctggttttggcccgggctcgtggagccgctctctcgatcgagccctggaggaggcggcggtcactggggtgctgagcctgagcggccggaaactgagggagtttccccggggagcggccaaccacgacctgacggacaccacccgggcggacctgtcgcgaaatcgcctttcagaaattcctatagaagcatgtcactttgtttctctggaaaatctcaacttgtaccaaaattgtattcgttatattccagaggcaattttaaacctacaagctctaacattcttaaatattagtcggaaccaactgtcaacattgccggtacacttgtgtaatttgccattgaaagtcttaattgctagtaataacaaattggtgtcacttccagaagaaattggacaccttagacatttgatggaacttgatgtgagctgcaatgaaattcaaactataccttcccaaattggtaacctggaggccttgagagaccttaatgtaagaagaaatcacctagtacatttgcctgaagagctggcggagttgcctttgatacggttagacttctcatgcaataaaattaccacaatccctgtttgttatcggaacctcaggcacctacagacgatcaccctagataacaatccactacaatcacctcctgcacagatatgtataaaaggcaaagtccacatatttaaatacctgaacatacaagcttgtaagattgctccagatctgccggattatgataggagaccgttgggttttggctcctgccatgaagaactgtactcaagtcgcccttatggagcccttgattcaggcttcaatagtgtggacagtggtgataagagatggtcagggaatgaacctacagatgaattttcagatctgcctcttcgagtagcagagattactaaagaacaaagactacgaagagaaagccagtaccaagagaaccgcggcagtttggtagtaacaaacggcggagtggaacatgatctggatcagattgactacatagacagctgcaccgcagaggaagaggaggccgaggtgagacagcccaagggaccagacccagacagccttagttcacagtttatggcgtatattgaacagcggcgaatctctcatgagggttcaccagtaaagccagtagccattagggagtttcaaaaaacagaagatatgagaagatacttacatcaaaacagggttccagctgagccatcttccctcctgtcactatcagcaagtcacaatcagctgtcacacacagacctggaacttcatcagagaagggagcagttagtagagcgcactcggagagaggctcagcttgctgccctgcagtatgaggaggagaaaataaggaccaagcagatccagagagatgctgtcctggactttgtcaaacaaaaagcatcacaaagtccacaaaaacagcacccgctcctagatggcgtagatggtgagtgccccttcccatccagaaggtctcagcacactgatgatagtgccttgtgcatgtcgctgtcagggttgaatcaagtgggctgtgctgctaccctgcctcattcttctgccttcacgcctcttaagagtgatgacagacctaatgctctattaagttcacctgcaacagaaacagttcatcattcccctgcatattcttttcctgctgctatccagagaaatcagcctcagcgccctgaaagcttccttttccgagcaggtgtcagggcagaaaccaacaaaggtcatgcttcaccccttcctccatctgctgcacctaccactgattctacagattccataacaggacagaattcaagacagagagaagaagagctggaattaatagaccaactgcgtaaacatattgagtaccggttgaaagtgtctctaccttgtgatctcggagcagctctaactgacggtgttgttctttgccatttggccaatcatgtgcgacctcgatctgtcccaagcattcatgttccctcaccagctgtagtaagttgataatcctaaaaagccttggctattcatcagacatttgttaagcacagtggacagacatttcttaagcattgtgctagatattaaggatacagatataaagagtccagtctctacaaaaaaaaaaaaaaaaaaa

SEQ ID NO: 397 - protein, 712 aa, Homo sapiens
MAAAGLVAVAAAAEYSGTVASGGNLPGVHCGPSSGAGPGFGPGSWSRSLDRALEEAAVTGVLSLSGRKLREFPRGAANHDLTDTTRADLSRNRLSEIPIEACHFVSLENLNLYQNCIRYIPEAILNLQALTFLNISRNQLSTLPVHLCNLPLKVLIASNNKLVSLPEEIGHLRHLMELDVSCNEIQTIPSQIGNLEALRDLNVRRNHLVHLPEELAELPLIRLDFSCNKITTIPVCYRNLRHLQTITLDNNPLQSPPAQICIKGKVHIFKYLNIQACKIAPDLPDYDRRPLGFGSCHEELYSSRPYGALDSGFNSVDSGDKRWSGNEPTDEFSDLPLRVAEITKEQRLRRESQYQENRGSLVVTNGGVEHDLDQIDYIDSCTAEEEEAEVRQPKGPDPDSLSSQFMAYIEQRRISHEGSPVKPVAIREFQKTEDMRRYLHQNRVPAEPSSLLSLSASHNQLSHTDLELHQRREQLVERTRREAQLAALQYEEEKIRTKQIQRDAVLDFVKQKASQSPQKQHPLLDGVDGECPFPSRRSQHTDDSALCMSLSGLNQVGCAATLPHSSAFTPLKSDDRPNALLSSPATETVHHSPAYSFPAAIQRNQPQRPESFLFRAGVRAETNKGHASPLPPSAAPTTDSTDSITGQNSRQREEELELIDQLRKHIEYRLKVSLPCDLGAALTDGVVLCHLANHVRPRSVPSIHVPSPAVVS

SEQ ID NO: 398 - DNA, 2291 bp, Homo sapiens
ggaagaaaggctagcgggcgttggccgtatgtgggtgtcttgaggcagtttttcagttctttcatttaccaaagtgacatgcacctactaggtgccaggtgtttagacgtacatacaaccctctgcaaaatctttcagtgtagtcctctgtatgaaaagtttccagccaagaattgccactgcacctgagataagggggatcctggccattaaggaaaccttgccttcgaaactgagccgtgaggaactatacaaaatgggaaattgggacaaatcccagtggctcatgacactaagaagtaaaattacgaactcactgagctggaagtcattcaacgggaattgaataggtaactgcacttttgtgagattataaatataccacggagggtaacgaagctacagaagaatggaagaagacagcctggaagactcaaaccttcctccaaaagtttggcattctgagatgacggtgtcagtgacaggcgaaccacctagtaccgtagaagaagaaggaatacctaaagaaacagacatagaaatcatcccagaaatcccggaaactctagagccactgtcccttccagatgtgctgaggatctcggcagttctggaggacaccacagaccagctctctattctgaactacatcatgcccgttcagtacgaagggagacagagcatctgcgtgaaaagcagagaaatgaatctagaaggaacgaatctagacaaacttccaatggcctcaacaatcacaaaaatacccagtccgttaataactgaggaaggacccaacttgccagaaatcagacacagaggccggttcgctgtggagtttaacaaaatgcaggatcttgtcttcaaaaaacctacaaggcagaccatcatgactacggagacactgaagaaaattcagattgataggcagtttttcagcgatgtgattgcagataccattaaggagttgcaagattcggccacttacaacagtctcctgcaagctttgagcaaagagagggaaaacaaaatgcatttctatgacatcattgccagggaggaaaaaggaagaaaacagataatatcacttcaaaaacagctaattaatgtcaaaaaggaatggcaatttgaagtccagagtcagaatgagtatattgctaacctcaaggaccaactgcaagagatgaaggcaaaatccaacttggagaatcgctacatgaaaaccaataccgagctgcagattgcccagacccagaaaaagtgtaacagaacagaggaactcttggtggaagagattgagaaactcaggatgaaaaccgaagaagaggcccggactcatacagagattgaaatgttccttagaaaggagcagcagaaacttgaggagaggctggagttctggatggagaaatacgataaggacacagaaatgaaacagaatgaactaaatgctctcaaagccacaaaggccagtgacttagcacaccttcaagacctggcaaagatgataagagagtatgaacaggtcatcattgaagatcgtatagaaaaggagaggagcaagaagaaggtaaaacaggatctcttggaattaaagagcgttataaagctccaggcctggtggcgaggcactatgatacggagagaaattggtggtttcaagatgcctaaagacaaagttgatagcaaggattcaaaaggcaaaggtaaaggcaaggataagaggagaggcaagaagaagtgaccaagttctcttttgtgttttctgctggtattctggaggtgggaaggacttggagagttaagaaacacctggtacctcaaagatgactcatctacaggttgtttcctattgagactttcccagggaagcctgatttcactttgcctgttaatttcactctgcctgttaggtgggttttcaaaccctgatttaggattacaccattgacttagggcttcctcataccttgctgggaagaagtttctagtagtcctgtgaagattcattcttcttgctctttctcagcagaacaaaggagttcactggcttagctacagtgacgcattgaaacttgagtaattcctgtaatgtcagattttgattttacccaatttgtctgtagtgaaaaaactcttatgagcaaaagtattcagtaggaattacaatatgatgttattagctgtccagcataatatatacacagcaaagttttaataaatgttggttcctgcctgccttttaaaaaaaaaaaaaaaaaaaaaaaaaaaaaaaaaaaaaaaaaaaaaaaaaa

SEQ ID NO: 399 - protein, 443 aa, Homo sapiens
MEEDSLEDSNLPPKVWHSEMTVSVTGEPPSTVEEEGIPKETDIEIIPEIPETLEPLSLPDVLRISAVLEDTTDQLSILNYIMPVQYEGRQSICVKSREMNLEGTNLDKLPMASTITKIPSPLITEEGPNLPEIRHRGRFAVEFNKMQDLVFKKPTRQTIMTTETLKKIQIDRQFFSDVIADTIKELQDSATYNSLLQALSKERENKMHFYDIIAREEKGRKQIISLQKQLINVKKEWQFEVQSQNEYIANLKDQLQEMKAKSNLENRYMKTNTELQIAQTQKKCNRTEELLVEEIEKLRMKTEEEARTHTEIEMFLRKEQQKLEERLEFWMEKYDKDTEMKQNELNALKATKASDLAHLQDLAKMIREYEQVIIEDRIEKERSKKKVKQDLLELKSVIKLQAWWRGTMIRREIGGFKMPKDKVDSKDSKGKGKGKDKRRGKKK

SEQ ID NO: 400 - DNA, 511 bp, Homo sapiens
ggcctcgtccttctcttaccgccatcttggctcctgtggaggcctgctgggaacgggacttctaaaaggaactatgtctggaaggctgtggtccaaggccatttttgctggctataagcggggtctccggaaccaaagggagcacacagctcttcttaaaattgaaggtgtttacgcccgagatgaaacagaattctatttgggcaagagatgcgcttatgtatataaagcaaagaacaacacagtcactcctggcggcaaaccaaacaaaaccagagtcatctggggaaaagtaactcgggcccatggaaacagtggcatggttcgtgccaaattccgaagcaatcttcctgctaaggccattggacacagaatccgagtgatgctgtacccctcaaggatttaaactaacgaaaaatcaataaataaatgtggatttgtgctcttgtatttttaagtggattaaaaaacttactaccttaaaaaaaaaaaaaaaaaaaaaaaaaaaaaa

SEQ ID NO: 401 - protein, 110 aa, Homo sapiens [sequence omitted]

SEQ ID NO: 402 - DNA, 2414 bp, Homo sapiens
gcgcagaggcgtcacgcactccatggtaacgacgctcggcccgaagatggcggccgaatggggcggaggagtgggttactcgggctcaggcccgggccggagccggtggcgctggagcgggtctgtgtgggtccgaagcgttttactcctgttgggcgggctccgggccagcgccacatctactcccgtctccttgggcagttcccctccctgccggcaccacgtcccctctgacactgaggtcataaataaagttcatcttaaggcaaatcatgtggtcaagagagatgttgatgagcatttaagaatcaagactgtctatgataaaagtgttgaagagttgctccctgagaaaaagaatcttgtaaagaacaagcttttcccacaagcgatttcttatttagagaagacttttcaggtccgtcgacctgcgggcactatcttacttagcagacaatgtgcaacaaaccaatacctccggaaggaaaacgatcctcacaggtactgcaccggggagtgtgccgcacacacaaagtgcggccccgttattgttcctgaggaacatctccagcaatgccgggtctaccgtgggggtaagtggcctcatggagcagtgggtgtgccagaccaagaaggcatctcagatgcagactttgttctttacgttggtgctctggccaccgagagatgcagccatgaaaacatcatctcttatgcagcctattgtcagcaggaagcaaacatggacaggccaatagcaggatatgctaacctgtgtccaaatatgatctctacccagcctcaggagtttgttgggatgctgtccacagtgaaacatgaggttattcatgccctgggtttctctgctgggctgtttgcattctaccatgataaagatggaaatcctctcacttcaagatttgcagatggcctcccaccttttaattatagtctgggattatatcaatggagtgataaagtagttcgaaaagtggagagattatgggatgttcgagataataagatagttcgtcacactgtgtatctcctggtaacgcctcgtgttgttgaggaagcacgaaaacattttgattgtccagttctagagggaatggaacttgaaaatcaaggtggtgtgggcactgagctcaaccattgggaaaaaaggttattagagaatgaagcgatgactggttctcacactcagaatcgagtactctctcgaatcactctggcattaatggaggacactgggagacagatgctgagcccttactgtgacacgctcagaagtaacccactgcagctaacttgcagacaggaccagagagcagttgccgtgtgtaatttgcagaagttccctaagcctttaccacaggaataccagtactttgatgaactcagtggaatacctgcagaagatttgccttattatggtggctccgtggaaattgctgactactgccctttcagtcaggaattcagttggcatttaagtggtgaatatcagcgcagctcagattgtagaatattggaaaatcaaccagaaatttttaagaactatggcgctgaaaagtatggacctcattccgtttgtctaattcagaaatcagcattcgttatggagaagtgtgagaggaagctgagttacccagactggggaagcggatgctatcaggtttcttgttctcctcaaggtctgaaagtttgggtccaagatacttcatatttgtgtagtcgggctgggcaggtcctccctgtcagtatccagatgaatggctggattcacgatggaaacctgctctgcccatcatgttgggacttctgtgagctctgtcctccagaaacagatcctccagccactaacctgacccgagctctgccacttgatctttgttcctgttcctcgagcctggtggtcaccctctggcttctgctaggcaatctgtttcctctgctggctggatttcttctgtgtatatggcactaggaatggaaaagtggatcttcaagatattcttttatgttatgttcttggacgctgactggacagagaggagcctgtctctcagggcacatgagtcgtcgtggcaggaggagacgggcctcagtcacagtgtcacagacccttgtcacagtggacactagtcattcctgccatgtccttgcagcccaggaggactaaaaagattttaatgaagtctgtgttactcattctgaagaaaagaacttacctgagaggagtaatatttttttaatatatattgggtcagggacagggatggagtggttgttttatgtttacatttttaataagtaaaatagaagatttaagaactaatatttatggtattgaactttaagtgtgatatattccttagaaaaacacaactttaataaaaatggaaactaaa

SEQ ID NO: 403 - protein, 655 aa, Homo sapiens
MVTTLGPKMAAEWGGGVGYSGSGPGRSRWRWSGSVWVRSVLLLLGGLRASATSTPVSLGSSPPCRHHVPSDTEVINKVHLKANHVVKRDVDEHLRIKTVYDKSVEELLPEKKNLVKNKLFPQAISYLEKTFQVRRPAGTILLSRQCATNQYLRKENDPHRYCTGECAAHTKCGPVIVPEEHLQQCRVYRGGKWPHGAVGVPDQEGISDADFVLYVGALATERCSHENIISYAAYCQQEANMDRPIAGYANLCPNMISTQPQEFVGMLSTVKHEVIHALGFSAGLFAFYHDKDGNPLTSRFADGLPPFNYSLGLYQWSDKVVRKVERLWDVRDNKIVRHTVYLLVTPRVVEEARKHFDCPVLEGMELENQGGVGTELNHWEKRLLENEAMTGSHTQNRVLSRITLALMEDTGRQMLSPYCDTLRSNPLQLTCRQDQRAVAVCNLQKFPKPLPQEYQYFDELSGIPAEDLPYYGGSVEIADYCPFSQEFSWHLSGEYQRSSDCRILENQPEIFKNYGAEKYGPHSVCLIQKSAFVMEKCERKLSYPDWGSGCYQVSCSPQGLKVWVQDTSYLCSRAGQVLPVSIQMNGWIHDGNLLCPSCWDFCELCPPETDPPATNLTRALPLDLCSCSSSLVVTLWLLLGNLFPLLAGFLLCIWH

SEQ ID NO: 404 - DNA, 477 bp, Homo sapiens
atgtcccagtattgtcaacagcttaatggcctcaaagctgagaatacaaggctgaattcaaaattggagaaggaagaacaccacacagatggactggaagctgaagttgaattcttccattctaggctggctgctgctataaatgagcacaatgaaagtttagaaacgaaagacctagaacttgttttacagagagcacataatttttccgtacataaaaaaataagttctactgtttctcaactaaaagataaaaatgagttgcttactgaacaattttctaaagctcagatgaagttcaataccttaaaaggtaagctccatgagataagagatgctctcagggaaaagacattggctttagaaagtgtacagatggaccaaaggcaagcacagcatcgaataaaggaaatggagcagattcatccaaatgaggaaactaaaggagtcgatccaccggaaagcacaactgtgtag

SEQ ID NO: 405 - protein, 158 aa, Homo sapiens [sequence omitted]

SEQ ID NO: 406 - DNA, 1940 bp, Homo sapiens
agggcccggagccggcgagtgctcccgggaactctgcctgcgcggcggcagcgaccggaggccaggcccagcacgccggagctggcctgctggggaggggcgggaggcgcgcgcgggagggtccgcccggccagggccccgggcgctcgcagaggccggccgcgctcccagcccgcccggagcccatgcccggcggctggccagtgctgcggcagaagggggggcccggctctgcatggccccggctgctgacatgacttctttgccactcggtgtcaaagtggaggactccgccttcggcaagccggcggggggaggcgcgggccaggcccccagcgccgccgcggccacggcagccgccatgggcgcggacgaggagggggccaagcccaaagtgtccccttcgctcctgcccttcagcgtggaggcgctcatggccgaccacaggaagccgggggccaaggagagcgccctggcgccctccgagggcgtgcaggcggcgggtggctcggcgcagccactgggcgtcccgccggggtcgctgggagccccggacgcgccctcttcgccgcggccgctcggccatttctcggtggggggactcctcaagctgccagaagatgcgctcgtcaaagccgagagccccgagaagcccgagaggaccccgtggatgcagagcccccgcttctccccgccgccggccaggcggctgagccccccagcctgcaccctccgcaaacacaagacgaaccgtaagccgcggacgcccttcaccaccgcgcagctgctggcgctggagcgcaagttccgccagaagcagtacctgtccatcgccgagcgcgcggagttctccagctcgctcagcctcactgagacgcaggtgaagatatggttccagaaccgccgcgccaaggcaaagagactacaagaggcagagctggagaagctgaagatggccgccaagcccatgctgccaccggctgccttcggcctctccttccctctcggcggccccgcagctgtagcggccgcggcgggtgcctcgctctacggtgcctctggccccttccagcgcgccgcgctgcctgtggcgcccgtgggactctacacggcccatgtgggctacagcatgtaccacctgacatagagggtcccaggtcgcccacctgtgggccagccgattcctccagccctggtgctgtacccccgacgtgctcccctgctcggcaccgccagccgccttccctttaaccctcacactgctccagtttcacctctttgctccctgagttcactctccgaagtctgatccctgccaaaaagtggctggaagagtcccttagtactcttctagcatttagatctacactctcgagttaaagatggggaaactgagggcagagaggttaacagatttatctaaggtccccagcagaattgacagttgaacagagctagaggccatgtctcctgcatagcttttccctgtcctgacaccaggcaagaaaagcgcagagaaatcggtgtctgacgattttggaaatgagaacaatctcaaaaaaaaaaaaaaaaaaaaaaaaaaaaaaaaaaaagaaaagagaaaaaaaagactagccagccaggaagatgaatcctagcttcttccattggaaaatttaagacaagttcaacaacaaaacatttgctctggggggcagggaaaacacagatgtgttgcaaaggtaggttgaagggacctctctcttaccagtaccagaaacacaattgtaaaattaaaaaaaaaaaaaaactctttctatttaacagtacatttgtgtggctctcaaacatccctttggaagggattgtgtgtactatgtaatatactgtatatttgaaattttattatcatttatattatagctatatttgttaaataaattaattttaagctacaaaaa

SEQ ID NO: 407 - protein, 303 aa, Homo sapiens
MAPAADMTSLPLGVKVEDSAFGKPAGGGAGQAPSAAAATAAAMGADEEGAKPKVSPSLLPFSVEALMADHRKPGAKESALAPSEGVQAAGGSAQPLGVPPGSLGAPDAPSSPRPLGHFSVGGLLKLPEDALVKAESPEKPERTPWMQSPRFSPPPARRLSPPACTLRKHKTNRKPRTPFTTAQLLALERKFRQKQYLSIAERAEFSSSLSLTETQVKIWFQNRRAKAKRLQEAELEKLKMAAKPMLPPAAFGLSFPLGGPAAVAAAAGASLYGASGPFQRAALPVAPVGLYTAHVGYSMYHLT

SEQ ID NO: 408 - DNA, 3224 bp, Homo sapiens
gtcccacatcccgcatccggcatcccagcggccgggcatgtagcagcggcagcaacggcggaatatgggcgggaaccactcccacaagccccccgtgtttgacgagaatgaggaagtcaactttgaccattttcagattctgcgggccattggtaaagggagttttggaaaggtatgcatcgtgcagaagcgagacactaagaaaatgtatgcaatgaagtacatgaacaagcagaagtgcatcgagagggatgaggttcggaatgttttccgggagctgcagatcatgcaagggctggagcaccccttcctggtcaatctgtggtactccttccaggatgaggaggacatgttcatggtggtggacctgctcctgggaggcgacctgcgctaccatctgcagcagaatgtgcatttcacagaggggactgtgaaactctacatctgtgagctggcactggccctggagtatcttcagaggtaccacatcatccacagagacatcaagccagacaatatcctgctggatgaacacggacatgttcacattacagacttcaacatagcgacggtagtgaaaggagcagaaagggcttcctccatggctggcaccaagccctacatggctccagaagtattccaggtgtacatggacagaggccccggatactcgtaccctgtcgactggtggtccctgggcatcacagcctatgagctgctgcggggctggaggccgtacgaaatccactcggtcacgcccatcgatgaaatcctcaacatgttcaaggtggagcgtgtccactactcctccacgtggtgcaaggggatggtggccctgctgaggaagctcctgaccaaggatcctgagagccgcgtgtccagccttcatgacatacagagcgtgccctacttggccgacatgaactgggacgcggtgttcaagaaggcactgatgcccggctttgtgcccaataaagggaggttgaactgcgatcccacatttgagcttgaagagatgattctagaatccaagccacttcacaaaaagaagaagcgattggcaaagaacagatccagggatggcacaaaggacagctgcccgctgaatggacacctgcagcactgtttggagactgtccgggaggaattcatcatattcaacagagagaagctcaggaggcagcagggacagggcagccagctcttggacaccgacagccgagggggaggccaggcccaaagcaagctccaggacgggtgcaacaacaacctcctcacccacacctgcacccgtggctgcagcagctgagcccacacttgttgctgctcaacaggactgcactcgtctctgccctgcccacccagagcccctctttgtgccctgatggtccctgtctcacccctgaaaacatcagatgcagaaaaagccctggacttggagctgggaagcctgggttctggtcccatctccatgactgattcacgtgtgacctcagacaagtcacgccctctctgtgcctccgttttctgcatctgccaaaggggttaaacacttctgccccacttcaaattacaagattatggggagaacccaattaggtaggaaacatgaaaaacctttgatatttataaaatcatttttacgtgcaaaatataaccttaatatttgaagtgacccccattccccaaagcaatcaaaccgtcatgactttgcaatttggcacatcctagcttgttagagggcacttccgaaaaacacagccctgacagcaaaataaaggtctgatatgttggccccttctatggaaacaacgctgccaaatcctggagcaaaacctgaagtgtcttcatgtgcattctctggcaggccacagtcctgagcttgtaagatggtgcagcatgcagaccagacttgtccccaaggtctcagcgctgcggtctcactcctcccctcatttaagaagactatccttaccttttagtttcagcagtcctcaccaccaccatatccccagtgctgggatggcacacaggtgtccattcagatgagagttgggtcgctgagcattggttactcctgcagagtgtaatcagcaccccatccaactggcccgaaagcccagacctgcagcagaactctccaactctctatcagctttcagggttttctctcctgggaagggtgtaaaatcagcttgtcagattcttcttacagagagtatccaatcggtattggtggagcggctccctatttatacaataggaagcatgggtgcttagaaagtttatttcaggaggaaaatgggttcacacaaaaagcaaactacattctgatctgctcagggagaagcttgcctttgaactggaagatgttgggatgagcagggaaagcttagactttggagtcaggtttgtgttcagaatccagccctgctggctactaactaactgggagaccttaggcaaagcatgcaatcgctctgaatggcagtttcctcatttttaaacagggataataaaactaatattgcaggggagttacagggttaaataagatcctgtgtgtaaccccaagcattggatgactcatagaatggccttttttgtcagcataatcgtcatcattatttagatactttcttccttcactcacccagcaggtcagttttctgtgcaaacaaacctgtttaggattcttccaaatgttcttcctggggtctttgatatttgtttgttacatcctgctgaagttcgactgtgtttttattttttcatccaacttccatttttcactttttacatgattactcaatccttggggctgtccatgtcatctcttagatttcttaaaagacattttaatgtatggttaggttttatatttttattttttaaaaaagaaatagtcagtgttttcctcctttcaaccgagactatttctggattgtgtgctcctcgtcagttgacttgttttgcacacttttctttacttcatgtccccatcaacaaccgtcctgctccccacctcccccaggaaataaggggcctgctcctctccctactgtgaccctggaggctcttaagatgatgatggttttttttattgggctgagttcacgaattaggggcaggagctggaagtcgccctaggaacaccagatttcctggttctgttcaagttggcatttcttgtttggaataaactatttcttggacattccttc

SEQ ID NO: 409 - protein, 414 aa, Homo sapiens
MGGNHSHKPPVFDENEEVNFDHFQILRAIGKGSFGKVCIVQKRDTKKMYAMKYMNKQKCIERDEVRNVFRELQIMQGLEHPFLVNLWYSFQDEEDMFMVVDLLLGGDLRYHLQQNVHFTEGTVKLYICELALALEYLQRYHIIHRDIKPDNILLDEHGHVHITDFNIATVVKGAERASSMAGTKPYMAPEVFQVYMDRGPGYSYPVDWWSLGITAYELLRGWRPYEIHSVTPIDEILNMFKVERVHYSSTWCKGMVALLRKLLTKDPESRVSSLHDIQSVPYLADMNWDAVFKKALMPGFVPNKGRLNCDPTFELEEMILESKPLHKKKKRLAKNRSRDGTKDSCPLNGHLQHCLETVREEFIIFNREKLRRQQGQGSQLLDTDSRGGGQAQSKLQDGCNNNLLTHTCTRGCSS

SEQ ID NO: 410 - DNA, 4564 bp, Homo sapiens
agtggcggcggcggcgggtccggaggtggcggcaggtggccccgcgcgcggcggccggcccggccgggggcgggcgggaaggtggcgcctcgggcgggggccggtccctgcaccaggtgacctgttccggcccggatccgggcggcctcgccatgcagcggcgcggcgcggggctcgggtggccgcggcagcagcagcagcaacccccgccgctcgcggtcggcccccgggccgcagccatggtcccgagtggcggcgtcccccagggcctcggcggccgctctgcctgcgcgctgctcctgctctgctacctgaatgttgtaccatctttgggtaggcagacttccctgacgacatcagtgatacccaaagctgagcagagcgtggcttacaaagactttatttattttactgtctttgaaggaaacgttcgcaacgtttctgaagtctcggttgagtatttatgctctcagccttgtgttgtcaatttggaagcagttgtttcatctgagttcagaagtagcattcccgtgtacaaaaaaaggtggaagaatgagaaacatcttcacaccagcaggacacaaatagtacatgtgaaatttccaagcattatggtttacagagatgattatttcatcagacattccatctctgtatctgcagtgatagtacgcgcctggattactcacaaatacagtggcagagactggaatgttaaatgggaggaaaacttgctccatgctgtagcaaagaattataccctcctgcagaccatcccgccttttgaacgccctttcaaagatcatcaagtgtgccttgagtggaacatgggttatatttggaaccttcgggcaaacaggattccacagtgtcctctggaaaatgatgtggttgccctgcttggctttccttatgcctccagtggagaaaacacaggcattgtcaagaagttcccgaggtttcggaaccgagagctggaggccactcgacgccagaggatggattacccagtgtttactgtttcattgtggctttatttactccattattgcaaggccaacctctgtgggattctgtactttgttgactctaatgagatgtacggcacaccttctgtatttcttacggaagagggctatttgcatattcagatgcatcttgtcaaaggggaagaccttgctgtaaaaactaaattcatcatacctttgaaggagtggtttcgactggatatctcttttaacggaggccagatagtagtaaccactagcattggacaggatttgaaaagctaccacaatcagaccattagcttccgggaggatttccattataatgacacagctgggtacttcattattggagggagcaggtatgtggctggcattgaagggttttttggacccctgaagtactatcgccttcgcagtctgcaccccgcccagatttttaatcccctccttgagaagcaacttgctgaacaaatcaagttatattatgaaaggtgtgctgaggttcaagaaatagtatctgtgtatgcatctgcagcaaagcacgggggcgagagacaagaagcatgccacctccacaactcctacctggacctccagcgcaggtatgggagaccctcgatgtgcagagccttcccctgggagaaggagctgaaagacaaacaccccagcttgttccaggcattgctggagatggatctgctgaccgtgccaaggaaccaaaatgaatctgtatcagaaatcggtgggaagatatttgagaaggctgtaaagagactctctagcattgatggtcttcaccaaattagctctatcgtcccctttctgacggattccagctgctgtggataccataaagcatcctactaccttgcagtcttttatgagactggattaaatgttcctcgggatcagctgcagggcatgttgtatagtttggttggaggccaggggagtgagaggctgtcttcaatgaatcttgggtataaacactaccagggtattgacaactaccccctggactgggaactgtcgtatgcctactacagcaacattgccaccaagacaccccttgaccagcacacactgcaaggagatcaggcatatgttgaaacaattagactaaaagatgatgaaatactcaaggtacaaaccaaagaagatggagatgtctttatgtggttgaagcatgaagctacccgaggcaatgcagcagctcagcaacgattggcccagatgctgttctgggggcagcaaggtgtggccaagaatcccgaagcagcaattgagtggtacgccaagggcgccctggagacggaggatcctgcgttaatctatgactatgccattgtgctattcaagggtcaaggagtaaaaaagaacagacggcttgccttagagctgatgaagaaagcagcttccaagggattgcatcaggcagtcaatggcctgggatggtattaccacaaattcaagaaaaattacgccaaagcagcaaagtactggttaaaagcagaagaaatggggaacccagatgcgtcatacaatcttggagtcctgcatttggatggcatcttccctggagttcctggaaggaatcaaactttagctggtgaatatttccataaggctgcgcaaggtggacacatggaagggaccttgtggtgttctctctactatatcacaggcaacctggagacattccctagagatcctgagaaagctgttgtatgggcaaaacatgtagctgagaaaaatggctacttgggccatgtcatccgcaaaggcctcaatgcctacctggaaggttcatggcatgaagctttgctgtattatgttttagcagcagaaactggaattgaagtgtcacagacaaatttagcacacatctgtgaggagaggccagacctggccaggagatacttgggtgttaactgtgtttggagatactataatttctctgtttttcaaatcgatgctccttcctttgcatatttgaagatgggagacctttactactatggccaccaaaaccagtcacaagacctggagttgtctgtgcagatgtacgcccaagccgccctggatggagactcccagggattttttaacctggccctgctaatcgaggaaggtacgataatcccacaccatatcttggatttcttggaaattgactcaactctccattctaataacatctccattctccaggaactgtacgaaaggtgctggagccacagtaacgaggagtccttcagcccctgctccttggcctggctttacctgcacttgcggcttctctggggtgctatcctgcactcagccctgatctactttctgggaacctttctgctatccatattgatcgcctggactgtgcagtatttccagtctgtctcagcaagcgatccccctccaagaccatcccaggcctccccagacactgccacgtccactgcaagtccagctgtgactccagctgcagatgcctctgaccaagaccagcccacagtaactaataacccggagccacgtgggtgaactgtgcactccagttctctccagatgagagagaatcttttcaacagctggtattgggaagctggggccagggcatgatcctgataaacaccttaaatgtcttgtcaactggatgcaaattttgcaattggtgtcattttttttaaagtcaaattacaaggaagtacccagatcaggcagtggtaataccaaaggtcatcaaacacatacaaggaacatcttgatcatagggcatgtggggaagtttactgggccatcacagacttttgttctagtgattgtatgtattaggagtcatagcatgccctacggcagatctggattcttatacactaagatgtgtcttaagaatcacagtgcgtgcttcatccctttattgaagaacagaaaattatgactactctacaaggtggataatattttggtacctgtgcttgccacagccctgttcctcaaagctgaattgatagatttctctttgacttccaagacctagcagttataaggcaccttgaaataaattgtttgtgcctggaaatgcagggagggcaatagctttgtaaattggtttacatttttctccttgaatttttctagggtcctagtgcttccgaatcatttaatggcattgtcggatatcttttacatttcaattgcaatccatgaaattacatttagaagattcttagtacttaactgtagtcttctccatgaattacacgttagaatagactggcagcaacggaatatgcagcaagtaagcctctagcttatagtttcatccctacccctcatgcctgcgtgagtctgtacagggatatgtgtgtgtgtgtgtgtgtgtgtgtgttagagaggaagaggaagagcagaatgtctgtatactacatgctgctaaggtagtgaataaatcagtaatgcaatattgtgggtccaaactactctttgcactactttatttacagtagtaaataaaattatttttatacaattgactaccaaaaaaaaaaaaaaaa

SEQ ID NO: 411 - protein, 1132 aa, Homo sapiens
MQRRGAGLGWPRQQQQQPPPLAVGPRAAAMVPSGGVPQGLGGRSACALLLLCYLNVVPSLGRQTSLTTSVIPKAEQSVAYKDFIYFTVFEGNVRNVSEVSVEYLCSQPCVVNLEAVVSSEFRSSIPVYKKRWKNEKHLHTSRTQIVHVKFPSIMVYRDDYFIRHSISVSAVIVRAWITHKYSGRDWNVKWEENLLHAVAKNYTLLQTIPPFERPFKDHQVCLEWNMGYIWNLRANRIPQCPLENDVVALLGFPYASSGENTGIVKKFPRFRNRELEATRRQRMDYPVFTVSLWLYLLHYCKANLCGILYFVDSNEMYGTPSVFLTEEGYLHIQMHLVKGEDLAVKTKFIIPLKEWFRLDISFNGGQIVVTTSIGQDLKSYHNQTISFREDFHYNDTAGYFIIGGSRYVAGIEGFFGPLKYYRLRSLHPAQIFNPLLEKQLAEQIKLYYERCAEVQEIVSVYASAAKHGGERQEACHLHNSYLDLQRRYGRPSMCRAFPWEKELKDKHPSLFQALLEMDLLTVPRNQNESVSEIGGKIFEKAVKRLSSIDGLHQISSIVPFLTDSSCCGYHKASYYLAVFYETGLNVPRDQLQGMLYSLVGGQGSERLSSMNLGYKHYQGIDNYPLDWELSYAYYSNIATKTPLDQHTLQGDQAYVETIRLKDDEILKVQTKEDGDVFMWLKHEATRGNAAAQQRLAQMLFWGQQGVAKNPEAAIEWYAKGALETEDPALIYDYAIVLFKGQGVKKNRRLALELMKKAASKGLHQAVNGLGWYYHKFKKNYAKAAKYWLKAEEMGNPDASYNLGVLHLDGIFPGVPGRNQTLAGEYFHKAAQGGHMEGTLWCSLYYITGNLETFPRDPEKAVVWAKHVAEKNGYLGHVIRKGLNAYLEGSWHEALLYYVLAAETGIEVSQTNLAHICEERPDLARRYLGVNCVWRYYNFSVFQIDAPSFAYLKMGDLYYYGHQNQSQDLELSVQMYAQAALDGDSQGFFNLALLIEEGTIIPHHILDFLEIDSTLHSNNISILQELYERCWSHSNEESFSPCSLAWLYLHLRLLWGAILHSALIYFLGTFLLSILIAWTVQYFQSVSASDPPPRPSQASPDTATSTASPAVTPAADASDQDQPTVTNNPEPRG

SEQ ID NO: 412 - DNA, 3643 bp, Homo sapiens
acacaaccttggacattagagcctgtccgtctgatctagagaaggaatgttgctggggaaggaaaactcagggcgaggtgagagaggacagaacctctaaccaggaagaggctgtccccgccaagctccggagaggcgcggaagcatgaccctcaggtggtaacagaaaacaatccagatggggtgcaggtgctgtaaaataatacaaagctatctctttgatccagttcaagtgccctctcctggctatgtcaatgaagtcaacagctgcaagctagatgaagacgacactgataaattaaaaggcaaatggagcagtgaagtcttggtgcagaaaaatgaccctcagaggcagggctcaaagaagactgagagcagcagcaggacagctgatccatgggagccctgctggcctcaccaagggccgctcccacagggggacgctggaggggaacaccatgcctgcggtgtcaacggcatcggccctgctgccactccacagcccactgggaattccagccccacccaggatgacaggggctcctgggccagtactgcaaatactgttcccccaactcaacccttcctggaaggagggggcaccaggaaacaggactgtgtgctgctggcctcagaagggacccaagtcatgagaaatggagactccagagctccttctgaggcagaaagttttgccttggaagtacaagaccatgtcttccagataccagccccagattaccttcagcattggggcccagctggagacaacgttgatcataatgaaaaggactgtgttttcaagaaccatactgaggatgaatccctagagggaattcagcccccagtgggggagcatggtttgaatacgcccttctctgtgaggagaagctgggattcattgaatgaggatgtggaaacagaagttctaagcatctgctttaatgagaagggtcctgttcatgccatgcctgtggttgactcaggaaacaggcaggaggatacccatggctccgatggagatggggatggggagattgtggacgaggatgcagcggtggcggaggcccttgcagctttagaagctgctactgcaggagaagatttggatgagactgattaggggaggggatttgcacagggaggtaagctggtgtcatgctgagcatgcagatgcatttgctccctggatgcatagcaggtgattctgccagcatgcaccagtgcagccttaccagttgtttacatccagcatctgttctgattgtcagcatctgtcccatgctgcttgtcacatatctggagtttcactctgtgtagatgagctgtcattcaggacactaggagaaaaatctgagtgggtcattgtgcccatatccacagaaaatgcagaagttgaacagcttgcttgacaaccctcaaacatctttgagcacctggtacagatgtttatgagaatactctaagatctcaacccttgatcccaaaggcacacaatcacagagcattccttttgactgtaaactgtttaccttgcttttgagagccaaacattgtacccaacctggaaaaagtaactaccccaattaaagtgcctcatgtgtccccagagcatggcttaacttcagggacaatcacccagggaactaataactaaccagttgttcaacagcgggttaagctcagcagttttcacagtagagcagaagtccccaggaaacaaagggttagtcattagctgagatgttgattttaaaacaccttgaccttaacttttttacattattacttttaaatctcctttgggattggggaggctggccaaaataagtcttaaaactgcttatgtcatatttggattttaagttcatgacattcggaacagcaaagccatatatgcaatgtttttatgccattaaatgtctgattccaattaaaatataacaacgtatgtgtctttctagaagtcttaactcaaaggtggttctaattttctcagaatatcagtgaccctggatgttactttcaatgtaaagaactaatctagatggccgggcgtggtggctcatgcctgtaatcccagcactttgggaggccgaggcgggtggatcacaaggtcaggagttcaagatcagcctggccaacatagtgaaaccctgtctctactaaaaatacaaaaaattatccgggcacggtggcgggcgcctgtaatcccagctacttgggaggctgaggcaaggagaatcacttgaacctgggaggtggaggttgcagtgagctgagatcgtgccactgcactccagcctgggtgacagtgcaagactccatctcaaaaaaaaaaaaaaaaaaaagagctaagctaggcacagtggctcatgtctgtaatctgagcactttggaaggctgaggtgagaggattgccagggccaggaattcgagaccaacctgggcaatttagcgagaccccatctctatgaaaaaaaaaaaaaaaaaaagagctagactacaaaattatactcaaggaagggaccgagctggtttgcagagccatagctttggctttctctctgtcaaacttgatgccataactaaatgtcctgatcttacctcaaagatgaacaagccctctctggatttcagccttctaattcactgaaacaaggacaaccattctaacgtaactcaatggagaatttaaaggcattaaggatgctcaaaactatctagaaaaaaataaacatggaagatgctttagtttggtgttttgtaacacagaattgaaatctgactgaacttcatttgatttccagctttgccatgtgaccttggacaagttatgtatccctttacccatctgtaaagtgagaagaataattgtatgtgcttgtaaaggttaaatgagatgatgtaagtgtttagcacagtgcttggcacactaggcactcaaaaatgatgttttactagttgaaaacaattcctttaacaaacatttttacatccccacaactgaaaactctaaaactgggaagtatgtataatgtcattatttgactttggcaattatttagtataaaacatgatttctgagccttccagcacctttaaggacggcacccttacaaatgcttaatgagcctatgggtttgtttggtactgtaatgacaagccatcgcaagtgacctctatatacagggtcactcagagcccttaaaaagataaagtcttggcattgttaattgcattagaggtatgtctccttttgtatttagtacaccaaatacttaatatttcagaatgcttattccttcaatgatttcctaagtgtatcagttgagattatgttcagttgtatgggacgagtgttttatacaaatagaggcttatttacctcttatgtaaaagaagtctggagttagtgatccagggtggtagagaatgtatcactggcccgtgtatcaatgacccacatatcaatgacccacgtatcaatgacccgcatatgaatgacccatgctgcttcaatcattttggtttccttctcaagatcactttgtagtccataatggctgctgtggcttcagtcattacatttgcattccatgttggaaaaagaataaaggaataaaaaccccaaaaaaaaaaa

SEQ ID NO: 413 - protein, 314 aa, Homo sapiens
MGCRCCKIIQSYLFDPVQVPSPGYVNEVNSCKLDEDDTDKLKGKWSSEVLVQKNDPQRQGSKKTESSSRTADPWEPCWPHQGPLPQGDAGGEHHACGVNGIGPAATPQPTGNSSPTQDDRGSWASTANTVPPTQPFLEGGGTRKQDCVLLASEGTQVMRNGDSRAPSEAESFALEVQDHVFQIPAPDYLQHWGPAGDNVDHNEKDCVFKNHTEDESLEGIQPPVGEHGLNTPFSVRRSWDSLNEDVETEVLSICFNEKGPVHAMPVVDSGNRQEDTHGSDGDGDGEIVDEDAAVAEALAALEAATAGEDLDETD

SEQ ID NO: 414 - DNA, 559 bp, Homo sapiens
gcctttctgccagaaccgccatcttccagtaattcaccaaaatgacgaacacaaagggaaagaggagaggcacccgatatatgttctccaggccttttagaaaacatggagttgttcctttggccacgtatatgcaaatctataagaaaggtgatattgtagacatcaagggaatgggtactgttcgaaaaggaatgccccgcaagtgttaccatggcaaaactggaggagtctacagtgttacccagcatgctgttggcattgttgtaaacaaacaaggacaagattcttgccaagagaattaacgtgcgtattgagcacattaagcactctaagagccgagatagcttcctgaaacgcatgaaggaaaatgatcagaaaaagaaggaagccaaagagaaaggtacctgggttcaactaaagcaccagcctgctccacccagagaagcacactttgtgagaaccaatgggaaggagcctgagctgctggaacctactccctatgaattcatgccataataggtgtttaaaaaaaataataataaaggacctctgggct

SEQ ID NO: 415 - DNA, 3425 bp, Homo sapiens
ctcccgcctggccgccccggcccgccgtgacccacggccgcctccggagcccgacgcgcagggcatatacttctcttgtcttggttggatgcacaaatctgtgtgcagtgctttttgcccgttgcctagacgatcacttggtttctctgaggatgtctggttctcgtaaagagtttgatgtgaaacagattttgaaaatcagatggaggtggtttggtcatcaagcatcatctcctaattctacagttgacagccagcagggagaattttggaaccgaggacagactggagcaaacggtgggagaaagtttttagatccatgtagcctacaattgcctttggcttcaattggttaccgaaggtccagccaactggattttcagaattcaccttcttggccaatggcatccacctctgaagtccctgcatttgagtttacagcagaagattgtggcggtgcacattggctggatagaccagaagtggatgatggcactagtgaagaagaaaatgaatctgattccagttcatgcaggacttccaatagtagtcagacattatcatcctgtcatactatggagccatgtacatcagatgaatttttccaagcccttaatcatgccgagcaaacatttaaaaaaatggaaaactatttgagacataaacagttgtgtgatgtaattttagtcgctggtgatcgcagaattccagctcacagattggtgctctcctctgtctcagactattttgctgccatgtttactaatgatgtcagagaggcaagacaagaagaaataaaaatggaaggtgtagaaccaaattcgttgtggtccttgatccagtatgcttatacaggccgccttgaattaaaagaagataatattgagtgcctgttatctacagcttgccttcttcagctttcacaggttgtagaagcatgctgtaagtttttaatgaaacagcttcatccatccaactgtcttggaattcgttcttttgctgatgcccaaggttgtacagatttgcataaagtggctcacaattatactatggagcatttcatggaagtaatcagaaaccaggaatttgtattattaccagccagcgaaattgcaaagctcttggctagtgatgacatgaacattcctaatgaggagacaatattgaatgcacttcttacttgggtccgtcatgatttggaacagagacggaaagatctaagtaaacttttggcttatattaggctacctcttcttgcaccacagttcctggcagacatggaaaataatgtactttttcgggatgatatagaatgtcagaaactcattatggaagcaatgaagtaccatttattaccagagagacgacccatgttacaaagtcctcggacaaaacctaggaagtcaactgttggtacattatttgcagttgggggaatggattcaacaaaaggagcaacaagcattgaaaagtatgatctccgtacaaatatgtggactccagtagcaaatatgaatgggaggaggctacagttcggtgttgcagtgctagatgacaaactgtatgtggttggaggaagagatggactgaagactttgaatactgtagagtgctacaaccccaaaacaaaaacttggagtgtgatgccacctatgtccacacatagacatggccttggtgtggctgtactggaaggtcccatgtatgccgtaggaggacatgatggctggagctatctgaacacagtggaaagatgggaccctcaggctcgccagtggaattttgttgccactatgtctacccctaggagtacagtaggtgtggcagtactaagtggaaaactttatgcagttggtggtcgtgatggaagttcttgtctcaaatcagtagaatgttttgatcctcatactaataagtggacactgtgtgcacagatgtcaaaaaggagaggtggcgtaggagtgacgacctggaatggactgctgtatgctataggggggcacgatgctcccgcatccaacttgacttccagactctcagactgtgtggaaagatatgatcccaaaacagacatgtggactgcagtagcatccatgagcatcagcagagatgcagtgggggtctgtttacttggtgataagttatatgctgttggggggtatgatggacaggcataccttaatactgtggaggcttatgatccccagacaaatgagtggacccaggttgctccactgtgcctaggaagagctggagcttgtgttgtgactgtaaaattataatttagtgccccgttttctacatgaagacaccgtcttcctttattaatttagtataattattctatcaatggatacatttttagtaaatgtgcattgtcacaatcctgggcacaaagtgcctgatgtcaaaatgaagatagtaaaacaagggaggaagcagtggatggaccaggattaattcctttcatttcttagtaaattaaaacctgcagctggtggattgtgatcacacattcccgaagtaataagtgaggacgaatgcactgctctggaacataacccagtgctaactgggggtttcatttattcagtcaagcacatcttactcacatccagatttattttcctacagtgcaaacacaccagatgaaactttaaaatgttactttttgtaagcttatcataaatgagttgcagtaatttgtttgcttgtttgtttaaccacaaccactattttaatgatatactaaagataacactatttagttttttcagaaacatctgcattatatgtgtgttggttgtggattttgtttctaaaattggcttagtccaataaataaagaaaagcattaaggacttaaagcaacaataaccaaataaaaacttgataggatctttgaagtctatttaaatattcattccattacatctagactcaccaagaactacatgttatgatgttaagttgaagttgaaacatgatgttttgcattaaatttaagatatgcaaatttatgtagagaaaataaatgttatataccctataatctttcacctaattagtatttaattatatggatttgttttatattataaaagatgttttgattttgtcttttgatattgacaaaattgtttggatatccttatgttctcaagtctgtatctgcctcccctgccttatttcttatgttttgccacagttaacccattgtgcttctttgtaatcaaacagtttgtgggagaatgggcttattgaatgtctaaaaaataagtttaaagtgtttgttaccctaagttttttacatttttaaactctaattacatatgtgaatgttattactctcagtgaattgttattgtttgcaaaaatgcactgggcagtaacattttgtgataaatcctataagatataagtca

SEQ ID NO: 416 - protein, 709 aa, Homo sapiens
MSGSRKEFDVKQILKIRWRWFGHQASSPNSTVDSQQGEFWNRGQTGANGGRKFLDPCSLQLPLASIGYRRSSQLDFQNSPSWPMASTSEVPAFEFTAEDCGGAHWLDRPEVDDGTSEEENESDSSSCRTSNSSQTLSSCHTMEPCTSDEFFQALNHAEQTFKKMENYLRHKQLCDVILVAGDRRIPAHRLVLSSVSDYFAAMFTNDVREARQEEIKMEGVEPNSLWSLIQYAYTGRLELKEDNIECLLSTACLLQLSQVVEACCKFLMKQLHPSNCLGIRSFADAQGCTDLHKVAHNYTMEHFMEVIRNQEFVLLPASEIAKLLASDDMNIPNEETILNALLTWVRHDLEQRRKDLSKLLAYIRLPLLAPQFLADMENNVLFRDDIECQKLIMEAMKYHLLPERRPMLQSPRTKPRKSTVGTLFAVGGMDSTKGATSIEKYDLRTNMWTPVANMNGRRLQFGVAVLDDKLYVVGGRDGLKTLNTVECYNPKTKTWSVMPPMSTHRHGLGVAVLEGPMYAVGGHDGWSYLNTVERWDPQARQWNFVATMSTPRSTVGVAVLSGKLYAVGGRDGSSCLKSVECFDPHTNKWTLCAQMSKRRGGVGVTTWNGLLYAIGGHDAPASNLTSRLSDCVERYDPKTDMWTAVASMSISRDAVGVCLLGDKLYAVGGYDGQAYLNTVEAYDPQTNEWTQVAPLCLGRAGACVVTVKL

SEQ ID NO: 417 - DNA, 3486 bp, Homo sapiens
tgtttcatctttattcattatcctttgttctttaaaatctgatatattggcataaaagtaattgtagatatatatatgaatgtgatttattttcctttacatatttttgttgtgtacagcagggcatatacttctcttgtcttggttggatgcacaaatctgtgtgcagtgctttttgcccgttgcctagacgatcacttggtttctctgaggatgtctggttctcgtaaagagtttgatgtgaaacagattttgaaaatcagatggaggtggtttggtcatcaagcatcatctcctaattctacagttgacagccagcagggagaattttggaaccgaggacagactggagcaaacggtgggagaaagtttttagatccatgtagcctacaattgcctttggcttcaattggttaccgaaggtccagccaactggattttcagaattcaccttcttggccaatggcatccacctctgaagtccctgcatttgagtttacagcagaagattgtggcggtgcacattggctggatagaccagaagtggatgatggcactagtgaagaagaaaatgaatctgattccagttcatgcaggacttccaatagtagtcagacattatcatcctgtcatactatggagccatgtacatcagatgaatttttccaagcccttaatcatgccgagcaaacatttaaaaaaatggaaaactatttgagacataaacagttgtgtgatgtaattttagtcgctggtgatcgcagaattccagctcacagattggtgctctcctctgtctcagactattttgctgccatgtttactaatgatgtcagagaggcaagacaagaagaaataaaaatggaaggtgtagaaccaaattcgttgtggtccttgatccagtatgcttatacaggccgccttgaattaaaagaagataatattgagtgcctgttatctacagcttgccttcttcagctttcacaggttgtagaagcatgctgtaagtttttaatgaaacagcttcatccatccaactgtcttggaattcgttcttttgctgatgcccaaggttgtacagatttgcataaagtggctcacaattatactatggagcatttcatggaagtaatcagaaaccaggaatttgtattattaccagccagcgaaattgcaaagctcttggctagtgatgacatgaacattcctaatgaggagacaatattgaatgcacttcttacttgggtccgtcatgatttggaacagagacggaaagatctaagtaaacttttggcttatattaggctacctcttcttgcaccacagttcctggcagacatggaaaataatgtactttttcgggatgatatagaatgtcagaaactcattatggaagcaatgaagtaccatttattaccagagagacgacccatgttacaaagtcctcggacaaaacctaggaagtcaactgttggtacattatttgcagttgggggaatggattcaacaaaaggagcaacaagcattgaaaagtatgatctccgtacaaatatgtggactccagtagcaaatatgaatgggaggaggctacagttcggtgttgcagtgctagatgacaaactgtatgtggttggaggaagagatggactgaagactttgaatactgtagagtgctacaaccccaaaacaaaaacttggagtgtgatgccacctatgtccacacatagacatggccttggtgtggctgtactggaaggtcccatgtatgccgtaggaggacatgatggctggagctatctgaacacagtggaaagatgggaccctcaggctcgccagtggaattttgttgccactatgtctacccctaggagtacagtaggtgtggcagtactaagtggaaaactttatgcagttggtggtcgtgatggaagttcttgtctcaaatcagtagaatgttttgatcctcatactaataagtggacactgtgtgcacagatgtcaaaaaggagaggtggcgtaggagtgacgacctggaatggactgctgtatgctataggggggcacgatgctcccgcatccaacttgacttccagactctcagactgtgtggaaagatatgatcccaaaacagacatgtggactgcagtagcatccatgagcatcagcagagatgcagtgggggtctgtttacttggtgataagttatatgctgttggggggtatgatggacaggcataccttaatactgtggaggcttatgatccccagacaaatgagtggacccaggttgctccactgtgcctaggaagagctggagcttgtgttgtgactgtaaaattataatttagtgccccgttttctacatgaagacaccgtcttcctttattaatttagtataattattctatcaatggatacatttttagtaaatgtgcattgtcacaatcctgggcacaaagtgcctgatgtcaaaatgaagatagtaaaacaagggaggaagcagtggatggaccaggattaattcctttcatttcttagtaaattaaaacctgcagctggtggattgtgatcacacattcccgaagtaataagtgaggacgaatgcactgctctggaacataacccagtgctaactgggggtttcatttattcagtcaagcacatcttactcacatccagatttattttcctacagtgcaaacacaccagatgaaactttaaaatgttactttttgtaagcttatcataaatgagttgcagtaatttgtttgcttgtttgtttaaccacaaccactattttaatgatatactaaagataacactatttagttttttcagaaacatctgcattatatgtgtgttggttgtggattttgtttctaaaattggcttagtccaataaataaagaaaagcattaaggacttaaagcaacaataaccaaataaaaacttgataggatctttgaagtctatttaaatattcattccattacatctagactcaccaagaactacatgttatgatgttaagttgaagttgaaacatgatgttttgcattaaatttaagatatgcaaatttatgtagagaaaataaatgttatataccctataatctttcacctaattagtatttaattatatggatttgttttatattataaaagatgttttgattttgtcttttgatattgacaaaattgtttggatatccttatgttctcaagtctgtatctgcctcccctgccttatttcttatgttttgccacagttaacccattgtgcttctttgtaatcaaacagtttgtgggagaatgggcttattgaatgtctaaaaaataagtttaaagtgtttgttaccctaagttttttacatttttaaactctaattacatatgtgaatgttattactctcagtgaattgttattgtttgcaaaaatgcactgggcagtaacattttgtgataaatcctataagatataagtca

SEQ ID NO: 418 - protein, 755 aa, Homo sapiens
MNVIYFPLHIFVVYSRAYTSLVLVGCTNLCAVLFARCLDDHLVSLRMSGSRKEFDVKQILKIRWRWFGHQASSPNSTVDSQQGEFWNRGQTGANGGRKFLDPCSLQLPLASIGYRRSSQLDFQNSPSWPMASTSEVPAFEFTAEDCGGAHWLDRPEVDDGTSEEENESDSSSCRTSNSSQTLSSCHTMEPCTSDEFFQALNHAEQTFKKMENYLRHKQLCDVILVAGDRRIPAHRLVLSSVSDYFAAMFTNDVREARQEEIKMEGVEPNSLWSLIQYAYTGRLELKEDNIECLLSTACLLQLSQVVEACCKFLMKQLHPSNCLGIRSFADAQGCTDLHKVAHNYTMEHFMEVIRNQEFVLLPASEIAKLLASDDMNIPNEETILNALLTWVRHDLEQRRKDLSKLLAYIRLPLLAPQFLADMENNVLFRDDIECQKLIMEAMKYHLLPERRPMLQSPRTKPRKSTVGTLFAVGGMDSTKGATSIEKYDLRTNMWTPVANMNGRRLQFGVAVLDDKLYVVGGRDGLKTLNTVECYNPKTKTWSVMPPMSTHRHGLGVAVLEGPMYAVGGHDGWSYLNTVERWDPQARQWNFVATMSTPRSTVGVAVLSGKLYAVGGRDGSSCLKSVECFDPHTNKWTLCAQMSKRRGGVGVTTWNGLLYAIGGHDAPASNLTSRLSDCVERYDPKTDMWTAVASMSISRDAVGVCLLGDKLYAVGGYDGQAYLNTVEAYDPQTNEWTQVAPLCLGRAGACVVTVKL

SEQ ID NO: 419 - DNA, 3303 bp, Homo sapiens
tgtttcatctttattcattatcctttgttctttaaaatctgatatattggcataaaagtaattgtagatatatatatgaatgtgatttattttcctttacatatttttgttgtgtacagcagggcatatacttctcttgtcttggttggatgcacaaatctgtgtgcagtgctttttgcccgttgcctagacgatcacttggtttctctgaggatgtctggttctcgtaaagagtttgatgtgaaacagattttgaaaatcagatggaggtggtttggtcatcaagcatcatctcctaattctacagttgacagccagcagggagaattttggaaccgaggacagactggagcaaacggtgggagaaagtttttagatccatgtagcctacaattgcctttggcttcaattggttaccgaaggtccagccaactggattttcagaattcaccttcttggccaatggcatccacctctgaagtccctgcatttgagtttacagcagaagattgtggcggtgcacattggctggatagaccagaagtggatgatggcactagtgaagaagaaaatgaatctgattccagttcatgcagattggtgctctcctctgtctcagactattttgctgccatgtttactaatgatgtcagagaggcaagacaagaagaaataaaaatggaaggtgtagaaccaaattcgttgtggtccttgatccagtatgcttatacaggccgccttgaattaaaagaagataatattgagtgcctgttatctacagcttgccttcttcagctttcacaggttgtagaagcatgctgtaagtttttaatgaaacagcttcatccatccaactgtcttggaattcgttcttttgctgatgcccaaggttgtacagatttgcataaagtggctcacaattatactatggagcatttcatggaagtaatcagaaaccaggaatttgtattattaccagccagcgaaattgcaaagctcttggctagtgatgacatgaacattcctaatgaggagacaatattgaatgcacttcttacttgggtccgtcatgatttggaacagagacggaaagatctaagtaaacttttggcttatattaggctacctcttcttgcaccacagttcctggcagacatggaaaataatgtactttttcgggatgatatagaatgtcagaaactcattatggaagcaatgaagtaccatttattaccagagagacgacccatgttacaaagtcctcggacaaaacctaggaagtcaactgttggtacattatttgcagttgggggaatggattcaacaaaaggagcaacaagcattgaaaagtatgatctccgtacaaatatgtggactccagtagcaaatatgaatgggaggaggctacagttcggtgttgcagtgctagatgacaaactgtatgtggttggaggaagagatggactgaagactttgaatactgtagagtgctacaaccccaaaacaaaaacttggagtgtgatgccacctatgtccacacatagacatggccttggtgtggctgtactggaaggtcccatgtatgccgtaggaggacatgatggctggagctatctgaacacagtggaaagatgggaccctcaggctcgccagtggaattttgttgccactatgtctacccctaggagtacagtaggtgtggcagtactaagtggaaaactttatgcagttggtggtcgtgatggaagttcttgtctcaaatcagtagaatgttttgatcctcatactaataagtggacactgtgtgcacagatgtcaaaaaggagaggtggcgtaggagtgacgacctggaatggactgctgtatgctataggggggcacgatgctcccgcatccaacttgacttccagactctcagactgtgtggaaagatatgatcccaaaacagacatgtggactgcagtagcatccatgagcatcagcagagatgcagtgggggtctgtttacttggtgataagttatatgctgttggggggtatgatggacaggcataccttaatactgtggaggcttatgatccccagacaaatgagtggacccaggttgctccactgtgcctaggaagagctggagcttgtgttgtgactgtaaaattataatttagtgccccgttttctacatgaagacaccgtcttcctttattaatttagtataattattctatcaatggatacatttttagtaaatgtgcattgtcacaatcctgggcacaaagtgcctgatgtcaaaatgaagatagtaaaacaagggaggaagcagtggatggaccaggattaattcctttcatttcttagtaaattaaaacctgcagctggtggattgtgatcacacattcccgaagtaataagtgaggacgaatgcactgctctggaacataacccagtgctaactgggggtttcatttattcagtcaagcacatcttactcacatccagatttattttcctacagtgcaaacacaccagatgaaactttaaaatgttactttttgtaagcttatcataaatgagttgcagtaatttgtttgcttgtttgtttaaccacaaccactattttaatgatatactaaagataacactatttagttttttcagaaacatctgcattatatgtgtgttggttgtggattttgtttctaaaattggcttagtccaataaataaagaaaagcattaaggacttaaagcaacaataaccaaataaaaacttgataggatctttgaagtctatttaaatattcattccattacatctagactcaccaagaactacatgttatgatgttaagttgaagttgaaacatgatgttttgcattaaatttaagatatgcaaatttatgtagagaaaataaatgttatataccctataatctttcacctaattagtatttaattatatggatttgttttatattataaaagatgttttgattttgtcttttgatattgacaaaattgtttggatatccttatgttctcaagtctgtatctgcctcccctgccttatttcttatgttttgccacagttaacccattgtgcttctttgtaatcaaacagtttgtgggagaatgggcttattgaatgtctaaaaaataagtttaaagtgtttgttaccctaagttttttacatttttaaactctaattacatatgtgaatgttattactctcagtgaattgttattgtttgcaaaaatgcactgggcagtaacattttgtgataaatcctataagatataagtca

SEQ ID NO: 420 - protein, 694 aa, Homo sapiens
MNVIYFPLHIFVVYSRAYTSLVLVGCTNLCAVLFARCLDDHLVSLRMSGSRKEFDVKQILKIRWRWFGHQASSPNSTVDSQQGEFWNRGQTGANGGRKFLDPCSLQLPLASIGYRRSSQLDFQNSPSWPMASTSEVPAFEFTAEDCGGAHWLDRPEVDDGTSEEENESDSSSCRLVLSSVSDYFAAMFTNDVREARQEEIKMEGVEPNSLWSLIQYAYTGRLELKEDNIECLLSTACLLQLSQVVEACCKFLMKQLHPSNCLGIRSFADAQGCTDLHKVAHNYTMEHFMEVIRNQEFVLLPASEIAKLLASDDMNIPNEETILNALLTWVRHDLEQRRKDLSKLLAYIRLPLLAPQFLADMENNVLFRDDIECQKLIMEAMKYHLLPERRPMLQSPRTKPRKSTVGTLFAVGGMDSTKGATSIEKYDLRTNMWTPVANMNGRRLQFGVAVLDDKLYVVGGRDGLKTLNTVECYNPKTKTWSVMPPMSTHRHGLGVAVLEGPMYAVGGHDGWSYLNTVERWDPQARQWNFVATMSTPRSTVGVAVLSGKLYAVGGRDGSSCLKSVECFDPHTNKWTLCAQMSKRRGGVGVTTWNGLLYAIGGHDAPASNLTSRLSDCVERYDPKTDMWTAVASMSISRDAVGVCLLGDKLYAVGGYDGQAYLNTVEAYDPQTNEWTQVAPLCLGRAGACVVTVKL

SEQ ID NO: 421 - DNA, 4534 bp, Homo sapiens
ggcccggcccctcgaggcaccgcctttcaattagcactcgctgattggtcgctgctcgcgcggtctcctgggtgacgggaacgcggtagcctgcttggtggagaccgggtgcgcctgcgtacttcatagttcgcgtagcggctcgagcgtggagatgaagcgtattttctcactgctagaaaagacttggcttggcgcaccaatacagtttgcctggcaaaaaacatcaggaaactaccttgcagtaacaggagctgattatattgtgaaaatctttgatcgccatggtcaaaaaagaagtgaaattaacttacctggtaactgtgttgccatggattgggataaagatggagatgtcctagcagtgattgctgagaaatctagctgcatttatctttgggatgccaacacaaataagaccagccagttagacaatggcatgagggatcaaatgtctttccttctttggtcaaaagttggaagtttcctggctgttggaactgttaaaggaaatttgcttatttataatcatcagacatctcgaaagattcctgtccttggaaaacatactaagagaatcacttgtggatgttggaatgcagaaaatctgcttgctttaggtggtgaagataaaatgattacagttagtaatcaggaaggtgacacgataagacagacacaagtgagatcagagcctagcaacatgcagtttttcttgatgaagatggatgaccgaacctctgctgctgaaagcatgataagtgtggtgcttggcaagaaaactttgttttttttaaatctgaatgaaccagataacccagctgatcttgaatttcagcaggactttggcaacattgtctgctataattggtatggtgatggccgcatcatgattggtttttcatgtggacattttgtggtcatttctactcatactggagagcttggtcaagagatatttcaggctcgtaaccataaagataatctaaccagcattgcagtatcacagactcttaacaaagttgctacatgtggagataactgcattaaaatccaagacttggttgacttaaaagacatgtatgttatactcaacctggatgaggaaaataaaggattgggtaccttgtcctggactgatgatggccagttgctagcactctctacccaaaggggctcacttcatgttttcctgaccaagcttcccatacttggggatgcctgcagcacaaggattgcctatctcacctccctccttgaagtcaccgtagccaaccctgttgaaggagagctaccaatcacagtttctgttgatgtggaacccaactttgtggcagtaggtctttatcatctggctgtaggaatgaataatcgagcttggttttatgtccttggagaaaatgctgtgaaaaaattgaaagatatggagtatctgggaacagtagccagtatttgccttcattctgactatgctgctgcactttttgaaggcaaagtccagttacatttgatagaaagcgaaatcttggatgctcaagaagaacgtgagactcggcttttcccagcagtggatgataagtgccgtatcttatgccatgccttaactagtgatttcctcatctatggtacagatactggtgtcgttcagtatttctacattgaagactggcaattcgttaatgattatcgacatcctgtcagtgtgaaaaagatttttcccgacccaaatgggaccagattagttttcattgatgaaaaaagtgatggatttgtttactgtccagtcaatgacgctacctatgagattccagatttttcaccaaccattaaaggtgttctttgggaaaactggccaatggataaaggtgtatttattgcttatgatgatgataaggtgtacacttatgtctttcacaaggacactatacaaggagccaaggttattttggctggtagcaccaaagttccttttgctcataaacctttgctgctatataatggagagctgacctgccaaacacagagtggaaaagtaaacaacatctaccttagcacccatggctttctcagcaacttaaaagatacggggcctgacgaactgagaccaatgctggcacagaatttaatgctaaagaggttttctgatgcttgggaaatgtgcaggattctgaatgatgaggctgcctggaatgagttggccagagcttgtctacatcacatggaagtggagtttgcaatccgtgtttatcggagaattggaaatgttggcatagtgatgtccttggaacaaataaagggaatagaggactacaatcttttggcaggacaccttgccatgtttaccaacgattataacctggctcaggacttgtaccttgcatccagctgtcctattgctgccctggagatgagaagggatttacagcattgggacagtgctctacaactggcaaagcatttggccccagaccagataccttttatatcaaaagaatatgctattcagcttgaattcgcgggtgattatgtaaatgctttggctcattatgagaaaggaataacaggtgataataaggaacatgatgaagcttgtctggctggagtggcccagatgtccataagaatgggagacatacgtcgaggggttaaccaagccctcaagcatcccagcagggtccttaaaagagactgtggagccatattggagaatatgaagcaattttcagaagcggcccaactgtatgaaaaaggtctctactacgataaagcagcatctgtttacatccgctctaagaattgggcaaaagttggtgatcttctgccccacgtttcttctcctaagatccatttgcagtatgccaaagccaaggaagcagatggaagatacaaagaagctgttgtagcttatgaaaatgcaaaacagtggcaaagtgtaatccgcatctatctggatcacctcaataatcctgaaaaagctgtcaatattgttagagagacccagtctctggatggagccaaaatggtagccaggttttttctacagcttggtgactatgggtctgccatccagtttcttgtcatgtccaaatgcaacaatgaagctttcacactggctcagcaacacaacaaaatggaaatctatgcagatattattggttctgaagacactactaatgaagactatcaaagcattgccttatactttgaaggagaaaagagatatcttcaggctggaaaattcttcttgctgtgtggccaatattcacgagcacttaaacacttcctgaaatgcccaagctcggaagataatgtggcaatagaaatggcaattgaaactgttggtcaggccaaagatgaactgctgaccaatcagctgatagaccatctcctgggggagaacgatggcatgcctaaggatgccaagtacctgttccgcttgtacatggctctgaagcaataccgagaagctgcccagactgccatcatcattgccagagaagagcagtctgcaggcaactaccggaatgcacacgatgttctcttcagtatgtatgcagaactgaaatcccagaagatcaaaattccctccgagatggccaccaacctcatgattctgcacagctatatactagtaaagattcatgttaaaaatggagatcacatgaaaggggctcgcatgctcattcgggtggccaacaacatcagcaaatttccatcacacattgtacccatcctgacgtcaactgtgattgagtgtcacagggcaggcctgaagaactctgctttcagcttcgcagctatgttgatgaggcctgaataccgcagcaaaatagatgccaaatacaaaaagaagatcgagggaatggtcaggagacccgatatatctgagatagaagaggccacgactccatgtccattctgcaaatttcttctcccagagtgtgaactcctctgtcctggatgtaaaaacagtatcccatattgcattgcaacaggtcgacacatgttgaaagatgactggacggtgtgtccacattgtgacttccctgctctatactcagaattgaagatcatgctaaacactgaaagcacatgtcctatgtgttcagaaagattaaacgctgctcagctgaaaaagatttcagactgtacccagtacctgcgaacggaggaggaactgtgattggcacgtgcagatacaatgctcctgagaagacagcattttccacaggaggctgtttcctcccctggtggatttaagagacggtcctttctggatacagagaaatgaaacaacggtgacctctccaggtcggcactttccacttctgtacggtggcaaaacgatgacatgtaaccttgctgtttattgtactttgtatattatttcctcttcaaagtctttcttacacactctatcctctgcactgttaatagtaacctatgacataattgtaaatattcagctttttgctaacttttgtattttgaaaaactttaaaataaaattgttgactagaaaaaaaaaaaaaaa

SEQ ID NO: 422 - protein, 1342 aa, Homo sapiens
MKRIFSLLEKTWLGAPIQFAWQKTSGNYLAVTGADYIVKIFDRHGQKRSEINLPGNCVAMDWDKDGDVLAVIAEKSSCIYLWDANTNKTSQLDNGMRDQMSFLLWSKVGSFLAVGTVKGNLLIYNHQTSRKIPVLGKHTKRITCGCWNAENLLALGGEDKMITVSNQEGDTIRQTQVRSEPSNMQFFLMKMDDRTSAAESMISVVLGKKTLFFLNLNEPDNPADLEFQQDFGNIVCYNWYGDGRIMIGFSCGHFVVISTHTGELGQEIFQARNHKDNLTSIAVSQTLNKVATCGDNCIKIQDLVDLKDMYVILNLDEENKGLGTLSWTDDGQLLALSTQRGSLHVFLTKLPILGDACSTRIAYLTSLLEVTVANPVEGELPITVSVDVEPNFVAVGLYHLAVGMNNRAWFYVLGENAVKKLKDMEYLGTVASICLHSDYAAALFEGKVQLHLIESEILDAQEERETRLFPAVDDKCRILCHALTSDFLIYGTDTGVVQYFYIEDWQFVNDYRHPVSVKKIFPDPNGTRLVFIDEKSDGFVYCPVNDATYEIPDFSPTIKGVLWENWPMDKGVFIAYDDDKVYTYVFHKDTIQGAKVILAGSTKVPFAHKPLLLYNGELTCQTQSGKVNNIYLSTHGFLSNLKDTGPDELRPMLAQNLMLKRFSDAWEMCRILNDEAAWNELARACLHHMEVEFAIRVYRRIGNVGIVMSLEQIKGIEDYNLLAGHLAMFTNDYNLAQDLYLASSCPIAALEMRRDLQHWDSALQLAKHLAPDQIPFISKEYAIQLEFAGDYVNALAHYEKGITGDNKEHDEACLAGVAQMSIRMGDIRRGVNQALKHPSRVLKRDCGAILENMKQFSEAAQLYEKGLYYDKAASVYIRSKNWAKVGDLLPHVSSPKIHLQYAKAKEADGRYKEAVVAYENAKQWQSVIRIYLDHLNNPEKAVNIVRETQSLDGAKMVARFFLQLGDYGSAIQFLVMSKCNNEAFTLAQQHNKMEIYADIIGSEDTTNEDYQSIALYFEGEKRYLQAGKFFLLCGQYSRALKHFLKCPSSEDNVAIEMAIETVGQAKDELLTNQLIDHLLGENDGMPKDAKYLFRLYMALKQYREAAQTAIIIAREEQSAGNYRNAHDVLFSMYAELKSQKIKIPSEMATNLMILHSYILVKIHVKNGDHMKGARMLIRVANNISKFPSHIVPILTSTVIECHRAGLKNSAFSFAAMLMRPEYRSKIDAKYKKKIEGMVRRPDISEIEEATTPCPFCKFLLPECELLCPGCKNSIPYCIATGRHMLKDDWTVCPHCDFPALYSELKIMLNTESTCPMCSERLNAAQLKKISDCTQYLRTEEEL

SEQ ID NO: 423 - DNA, 4925 bp, Homo sapiens
accgcgcgccactgtcttcgccttcttgcacttcgcgggagaagttgttggcgcgaatggatcctgagcctcgataacagattcctcaaccggcccacccgccagccagccagcgccttcatcctggggctgcgatggacattcggaaattctttggagtaataccaagtggaaagaaacttgtaagtgaaacagtaaagaagaatgagaaaacaaagtctgatgaagaaactttaaaagcaaagaaaggaataaaggaaatcaaggtaaatagctcccgtaaagaggatgacttcaaacaaaagcaaccaagcaagaaaaagaggatcatctatgattcagattcagagtcagaggagacgttgcaggtaaaaaatgccaaaaagccaccagaaaaactgccagtatcttctaaacctggtaaaatttcacggcaggatcctgttacatacatttcagaaacagatgaagaagatgactttatgtgtaagaaggcggcctctaaatcaaaagagaatggaagatctacaaatagtcatcttggaacatcaaacatgaaaaagaatgaagaaaacactaagaccaagaataagcctttatcaccaataaaacttacacccacatcagtacttgattattttggaactggaagtgtccaaagatctaataagaagatggtggcaagcaaaagaaaagagctttcacaaaatacagatgagtctggattaaatgatgaagccatcgccaagcaattacagcttgatgaagatgcggagctggagaggcagttgcatgaagatgaagagtttgccagaacattagccatgttggatgaagaacccaagaccaaaaaggctcgaaaggacacagaagcgggagaaacgttttcatctgtccaagccaatttaagtaaagcagaaaaacataaatatcctcataaagtaaaaacagcacaagtttcagatgaaagaaagagctacagtcctaggaagcaaagtaaatatgaaagttcaaaagaatctcagcaacattccaagtcatcagctgacaaaataggagaagtctcttctcccaaggccagttctaagctggcaattatgaaaagaaaagaagagagctcttataaagaaatagagcctgtggcctcaaaaagaaaagaaaatgccattaaattgaaaggagagacaaaaactcctaagaaaaccaaaagttctccagctaaaaaagagtctgtaagtcctgaagattctgaaaagaaacgcactaattatcaagcttatcgaagctacttaaatcgagaaggtcccaaggctctgggctccaaagaaataccaaagggagctgaaaattgcttggaaggccttatatttgtaatcacaggcgtgctggagtctattgaacgagatgaggccaagtctctaattgaacgttatgggggaaaagtaacaggaaatgtcagcaagaaaacaaattatcttgtcatgggtcgtgatagtggacagtccaagagtgataaggccgcagccttggggacaaaaattattgatgaagatggcctgttgaatctgattcggactatgccaggcaagaaatccaagtatgaaatagcagttgaaactgagatgaagaaagagtccaaactggagagaacaccccaaaaaaatgtccaaggaaaaagaaaaattagtccatctaaaaaggaatcagaatctaaaaagagcaggccgacttccaaaagggacagtttggcaaagacaataaaaaaggaaacagatgtgttttggaaaagcctggatttcaaggagcaggtggctgaggagacaagtggtgacagcaaggctaggaatttggctgatgacagcagtgaaaacaaagtggaaaatttgctctgggtggataaatataagccaacctcgctcaagaccataattggacagcaaggtgaccagagctgtgccaacaaactcctacgctggctccgaaactggcaaaagagttcttccgaagataaaaaacacgcaaagtttggtaaattttccggcaaagatgatggctctagttttaaagcagcgttgctgtcaggccctcctggtgttggcaaaaccaccacagcttccctggtgtgtcaggagttgggatacagctacgtggaactgaatgcaagtgacacccggagtaagagcagtttgaaggcgattgttgctgagtcactgaacaataccagcatcaaaggcttttattcaaatggagcagcctcttcagtaagcacgaaacatgctctcatcatggatgaagtagatggcatggcaggcaatgaggataggggaggaattcaggaattaattggcctgataaaacatactaaaattcccattatttgtatgtgcaatgatagaaatcatcccaagattcgctctctggttcattattgttttgatcttcgttttcaaagacctcgggttgaacagattaagggtgctatgatgtctattgcatttaaagaaggtttaaagattccccctccagctatgaatgaaataattttgggagccaatcaagatatcagacaggttttacataatctgagtatgtggtgtgcacgaagtaaagcattaacctatgaccaggccaaagctgattctcacagagccaaaaaggatatcaaaatgggcccatttgatgttgcccggaaagtgtttgcagctggagaggagactgctcacatgtcacttgtggacaagtcagatctcttttttcatgattattcaatagcacccctcttcgtccaggaaaattacatacacgtgaagcctgtagcagcagggggtgacatgaaaaagcacctgatgcttttaagcagagcagcagacagcatatgcgatggtgacctagtggacagccagatccggagtaagcaaaactggagtcttctgcctgcgcaggccatttatgccagtgttcttcctggagagttgatgagggggtacatgacccagtttcccaccttcccaagctggctggggaagcactcgtctacaggcaaacatgatcgtattgttcaggacctggccttgcatatgagtctcagaacttactccagcaaaaggactgtaaacatggattatctgtcgcttctaagggatgcacttgtacagcccttgacctcacaaggagtagacggagtacaggatgttgttgcacttatggacacatattatttgatgaaagaagactttgagaatatcatggaaatcagcagctggggtggcaaacctagtcccttttcaaagctggatcccaaggtgaaagcagccttcacaagagcttacaataaggaagcccaccttactccatactcacttcaagctataaaggcatctagacacagcacaagcccatccctggattcggaatacaatgaagaattaaatgaagatgactctcaatctgatgagaaagaccaagatgctatagaaactgatgccatgatcaagaaaaagacaaaatcttcaaagccttcaaaaccagaaaaagataaggagcccagaaaaggaaaaggaaaaagttcgaagaaatgaaaccatttttcactagcgacagccactttttactctccctcctgaccagtccagctggtctagagaaagccttgttttttcccagagcaaccatgttttagcataatgggatgacctggtgtcccattataaataaagggtggtatggctagaagggtatgagcagtaggcttatgtacacctcttatagaggttgataggactgcttgggtcctccactgtcctctgtcaatctagttagacgtgcttctgaatgactgtagaattggaactagaaactacacctgggctttggagtcagattttagttaacaataatgagcctgggagcagtagtactaaggcgtcttttgtaggcttaagaatttatcctaatggcctttataggaccaatgctgattttttttaaaggcagttcctattatgtggtgaaattttgtaaataaatgattatacaaaacagtcaccacctagaactgggtattctttgtacattgtcagatatctttcaaagtataaattaggaataaaaatgttccacatgatatgtgtacaaattctttttaagattgtcatcttgtacagcaaaatattatgttggtatattacttccttattaatttgcaaatgattggattaaaaaagctcactgtattccttactaacctgttgtgtgaaacataacattggcagtcgaggagtcagaactcggattcccagcctcactccctctgtgtgtgttgaccacgtctctgctgtgaataggatttcatgcagtggtctgttatggggctttgcagcgtggggggctgcagaagattctcagacattcttatccttctggagtctcaacccatcaggttcagaccagtaggaaccaggctgggtcaggctcttaatttcactatggtgggggacaaaatgaacactggcttttgttcactttgcccctgagagatctagtcctgtcctgtgatggcttccacaaaccctgttggaagtttgggttattcctataactgtatgtgttgagtggccgtgaggctatggacctagcctggaatttagatgtctagctattttttaatcttgttggtaaatgctcagaggtctgtgctacctctgtgaggtatatactaaaatgaatgtaaaataaggatcgtattccctgctttaaggaactggtagtcttgtttgggtgatgagacaaagttcttgagacatttaaactgtatttaccagtgtgaaaaatgtcatttatggagattaattcattatggaaataaaacattgcctaagcccttgaaaaaaaaaaaaaaaaaaaaaaaaaaaaaaaaaaaaaaaaaa

SEQ ID NO: 424 - protein, 1147 aa, Homo sapiens
MDIRKFFGVIPSGKKLVSETVKKNEKTKSDEETLKAKKGIKEIKVNSSRKEDDFKQKQPSKKKRIIYDSDSESEETLQVKNAKKPPEKLPVSSKPGKISRQDPVTYISETDEEDDFMCKKAASKSKENGRSTNSHLGTSNMKKNEENTKTKNKPLSPIKLTPTSVLDYFGTGSVQRSNKKMVASKRKELSQNTDESGLNDEAIAKQLQLDEDAELERQLHEDEEFARTLAMLDEEPKTKKARKDTEAGETFSSVQANLSKAEKHKYPHKVKTAQVSDERKSYSPRKQSKYESSKESQQHSKSSADKIGEVSSPKASSKLAIMKRKEESSYKEIEPVASKRKENAIKLKGETKTPKKTKSSPAKKESVSPEDSEKKRTNYQAYRSYLNREGPKALGSKEIPKGAENCLEGLIFVITGVLESIERDEAKSLIERYGGKVTGNVSKKTNYLVMGRDSGQSKSDKAAALGTKIIDEDGLLNLIRTMPGKKSKYEIAVETEMKKESKLERTPQKNVQGKRKISPSKKESESKKSRPTSKRDSLAKTIKKETDVFWKSLDFKEQVAEETSGDSKARNLADDSSENKVENLLWVDKYKPTSLKTIIGQQGDQSCANKLLRWLRNWQKSSSEDKKHAKFGKFSGKDDGSSFKAALLSGPPGVGKTTTASLVCQELGYSYVELNASDTRSKSSLKAIVAESLNNTSIKGFYSNGAASSVSTKHALIMDEVDGMAGNEDRGGIQELIGLIKHTKIPIICMCNDRNHPKIRSLVHYCFDLRFQRPRVEQIKGAMMSIAFKEGLKIPPPAMNEIILGANQDIRQVLHNLSMWCARSKALTYDQAKADSHRAKKDIKMGPFDVARKVFAAGEETAHMSLVDKSDLFFHDYSIAPLFVQENYIHVKPVAAGGDMKKHLMLLSRAADSICDGDLVDSQIRSKQNWSLLPAQAIYASVLPGELMRGYMTQFPTFPSWLGKHSSTGKHDRIVQDLALHMSLRTYSSKRTVNMDYLSLLRDALVQPLTSQGVDGVQDVVALMDTYYLMKEDFENIMEISSWGGKPSPFSKLDPKVKAAFTRAYNKEAHLTPYSLQAIKASRHSTSPSLDSEYNEELNEDDSQSDEKDQDAIETDAMIKKKTKSSKPSKPEKDKEPRKGKGKSSKK

SEQ ID NO: 425 - DNA, 1926 bp, Homo sapiens
atgatacatggcttgatgtatgcttactcattatcaggcaaggaaggtggcctgaagttcccagaaggctccgcctggcaaacacctaaggcgcctggaggggcgcaaggtcaggtcccggcgggaacagatctgggaggaaacctcggggggtcgagaggggtgtgtctggggcctggaggcccgccaggcactcggaggccaaggaagcggccgcggcccccgccttcgcccggcctcgggctgagcgccagggcccgcctctcgccgacgcctcacttcccttccgtccgggcagccgggcccgcgggtcagatcggaggcggcccgcgccgggccccacattcagggcttgggggttcattcgccgcgccgcccgccgctgcttcaggccctccgcttcggctcggagccccgggacccctaacctccagggccctcaccttggacccgcctccctgcctcccacccgccgcctttacctgcttctggagcgggcagagggcgtcgaagccggtgccgcgtcgtcgaacgcacaacgcggcgccgcagaaagggtctcactcttttgcccaggctggggtgcactggcactatctcggctcactgcaacctctgcctctggaactcgaaggatcatcccacctcagcctcccaggcctgccagacacctgcgccctcctgcagccaccgccacagctgccagcatgtctggcccagacatcaagacgccgaacgccatccagatctgccggattatgcggacgctaatgtggcccgcaatgtctaggcgggaccatcctgaagatgatcaaagaggcgggcgccatcatcagcacccggcattgcaatccgcagaacggggatcgctgtgtggccgctctggctcgggtcgagtgcacccacttcctgtggcccatgtgcatcggtgaggtggcccacgtcagcgcggagatcacctacacctccaagcactctgtggaggtgcaggtcaacatgatgtccgaaaacatcctcacaggtgccaaaaagctgaccaataaggccaccctctggtatgcgcccctgtcgctgacgaacgtggacaaggtcctcgaagagcctcctgttgtgtatttccggcaggagcaggaggaggagggccagaagcggtacaaaacccagaagctggagcgcatggagaccaactggaggaacggggacatcgtccagccagtcctcaacccagagccgaacactgtcagctacagccagtccagcttgatccacctggtggggccttcagactgtaccctgcacagcttcgtgcatgaaggggtgaccatgaaggtcatggacgaggtcgccgggatcttggctgcacgccactgcaagaccaacctcgtcacagcctccatggaggccattaattttgacaacaagatcagaaaaggctgcatcaagaccatctccggacgcatgaccttcacgagcaataagtccgtagagatcgaggtcttggtggatgccgactgtgttgtggacagctctcagaagcgctacagggccgccagtgtcttcacctaagtgtcgctgagccaggaaggcaggtcgctgcccatgccccagctcgtgccggagacccaggacgagaagggctttgaggcctggctcggtggctcacgcctataatcccagcactttaggatgctgaggcaggcggatcacttgacgtcaggagttcaagaccagcctagccaacatggcaaaaccccatctctactaaaaatacaaaacttaactgggcgtggtggcaggcgcctataatcccagctactcaggaggctgaggcaggacaatctcttgaacctgggaggcagaggttgcagtgagccaagatcatgccactgctctccagcctgggcaacaagagcaaaactccgtctc

SEQ ID NO: 426 - DNA, 6822 bp, Homo sapiens
gctagccttgcgcggcgcgggagagcgcagtggcgccggcgggaaagggctgcggacctgcggcgccgcgttgtgcgttcgacgacgcggcaccggcttcgacgccctctgcccgctccagaagcagtaagaagacatgttggataacaagaagaggtgtagagtttgcatatatcaactgtggccttaatgagcatgttgacagcatcgatgctagacagacagtctttttactgctggattgtgcaagatatttaaccctattttgtttgaattatgacttaaatgtcaaacatcttaactaagaaaagggaaacattttagttttggaagtcagaatgccaaggagaaggaaaaatcttgggggaaatccttttcggaagactgcaaaccctaaggaagttgtcgtatccagtgttgctagtcgtgaggagccaaccactactctaccttccatgggtgagacaaaagttgatcaggaagaactcttcaccagtatctcagagatattttctgatctggatcctgatgtagtgtatttgatgctttctgaatgtgatttcaaagttgaaaatgctatggattgtctattagaattatctgccactgataccaagatagaagaatcatcttcacaaagtttcgttgcttctgagaaccaagtaggtgcagcagaaagtaaaataatggaaaaacgtcctgaagaagagagtgaagattcaaaaatggattcatttttggacatgcagctaactgaagacctggattccttaatacagaatgcttttgagaaattgaactcttctcctgatgaccaagtatactcatttttgccttcacaagatgttaatagttttaatgactcaagtgagtttataaatcctgattcaagtaatatgactcccattttttctacacaaaatatgaatttgaacggtgaaaatttagagaattctggttctactttaagtttaaacccattaccttcacattcagttttgaacgagtccaagtgttttataaaggataacacattggctttggaaagtaactacccggaagattctcttctcagtagttctttaaatgtagcaagtgactccatcgcaggttgtagcagtctcaatcaaaaacagaaagaacttttagaatctgagtgcgttgaggctcaattctctgaagctcctgtagatttggatgccagtgaacctcaggcttgtttaaaccttccagggcttgatttaccaggtacaggtggggatcagaaatctactcgggtctctgatgtgtttctaccttccgaagggttcaacttcaagccacacaaacatcctgaactgccaactaaggggaaggatgtgagttactgcccggtacttgctcctctcccattgctgttgcctcctccgccacctccaccgatgtggaatccaatgattcctgcttttgacctcttccaaggaaaccatggctttgtagctcctgttgtaaccacagctgcacactggagatctgtcaactacacatttccaccctcagttatttctcacacttccccaacaaaagtatggagaaataaagatggaacaagtgcttatcaagtacaagaaaccccagtttctcaggttgtaagaaagaagacatcttacgttggactagttcttgttcttctcagaggtcttccgggatctggaaaatcttttttggcaaggactttgcaagaggataatccaagtggagtcattcttagtactgatgattatttttatataaatggacagtaccagtttgatgtaaagtacttaggagaagcacatgaatggaaccagaatcgtgcaaaagaagcatttgagaagaagatatctcctataattatagataatacaaacctacaggcatgggaaatgaaaccatatgttgctttgtctcagaaacacaaatataaagtcctttttcgggaaccagacacatggtggaagtttaaaccaaaggaacttgcaaggcgtaacattcatggggtaagcaaagaaaaaataacaagaatgttggaacattatcaacgttttgtttcagtgccaataattatgagttcttcggttccagagaaaattgaacgtattgagttgtgtgcatattcttgtgaggatagaagcactagcccaagagacgatgaagatattatctctgaaaaagaagaaaatattttatctttatctttgaagcatctagagttcactgaagagaagaatcttgatgtaaccaaagaaacaatgttacctgagaatgttgcatatctctctaatgcagatttaaacaaaagaagaaaagaaataagtgatatgaatcctagcattcaaagtgctttaattctggaaactccacacatgtatttttctgactctgaaagcaaactacaggcaacagacaaaagtgaaaacgagcaaatagaaatggtggctgtaaaagggtatagtaaaactgacacagatagttctatggagagagtatcacctagtacttgctgtagtgaaaataatcaagaagactgtgatcttgcaaatagtggaccacttcaaaatgaaaaatcctcacctggtgaaatagtggaagaaagagcaacagtaacgaaaaaagcctttgggaaacaaaaaagcaaatcgactttggaaaagttcccaagacatgagctatcaaattttgttggtgactggccagttgataagactattggtcagaggacaaaaaggaacagaaaaactgaaaaaacttcatccgtacaaagcgacaaaaagtataattaccctcagtcacacaaattagttaacagtgtatctgtgaatacagattgtgtccagcaacgaggatctccacatgaaagtgtagaggatggcagaaagtcacagtgtgatgatgcttcagagccactcaatagctataaatatgatgcttataaaaatattgacaaaaactcattcaacattatgggtgactggccttcatctgattctttagctcagagggaacacagatcaagaatgccaaagactggtttaagtgagcccaacctagaaattggaacaaatgacaaaatgaatgaaatatccttatctacagcacatgaggcctgttggggcacaagctctcaaaaactaaagacattgggtagctccaatctaggaagttctgaaatgctgctcagtgaaatgacctgtgagagtcagacttgtctaagtaaaaagagtcatgggcaacacacatcgttgcctcttacttttaccaatagtgcaccaactgtttctggagtagtagaaccacaaacgttagctgaatgtcaagagcaaatgcctaagagagaccctggaaaagaagtaggcatgtgcacccagactgaaccacaggattttgctcttttatggaaaatagaaaagaataaaattagcatttcagattctatcaaagtattaacaggaagattagatggatttaagccgaaagttttcaatattaacacaaaatcagacgttcaagaagcaattccatatagagtaatgtatgataaaagcacgtttgttgaagaaagtgagcttaccagtgcagatgaatctgaaaatcttaacattctttgtaaactgtttggatccttttcattagaagccctgaaagacttatatgagaggtgcaataaagatattatttgggccacaagccttttgttggattctgaaactaagttatgtgaggatacagagtttgagaatttccaaaaatcgtgtgatggatcacaaattgggcctttttctctggggttgaatttgaaagaaattattagccaaagaggaactttagagaattctaattctcctgtgccagagtttagccatgggattggtattagtaacgctgactcacagtctacttgtgatgcagaaagaggaaactcagagcaggcggaaatgagagctgtcactcctgaaaaccatgaatcgatgacaagtatatttcccagtgctgctgtgggtctaaagaataataatgacatacttcctaacagccaggaagaacttttatatagcagtaagcagtcctttccaggtattctaaaagctactactcctaaagatatgagtgaaacagaaaaaaacctagtagtcacagagactggagacaacatacattctccttcacatttctctgatatttttaactttgtatctagtacttcaaatcttgaattaaatgaagaaatttattttactgattctcttgaaataaagagaaatgaaaattttccaaaggattatgtgaaattttcagatgaagaagaatttatgaatgaagatgagaaggaaatgaaggaaattctaatggcaggaagtagtttatcagctggagttagtggggaagataaaaccgagatattgaatcccactccagcgatggccaaatctctgaccatagactgtctggaattggcattaccccctgaactggcttttcaacttaatgaattatttggtcctgttggtattgattcagggtctctaacagttgaagattgtgtggttcatatagatctgaatctggcgaaagtgattcatgagaaatggaaagaatctgtaatggagcgacaaagacaagaagaggtgtcttgtggcaagtttatgcaagatccttccttggttggacatactgggcttgataatcctgaacaaaaatcatctcagagaacaggcaaaaaattactgaagactttaacagcatctgaaatgctacctttattggatcattggaatactcaaactaaaaaagtatcactcagagaaataatgtcagaagaaattgccttacaggaaaaacataatttgaaaagggagacccttatgtttgaaaaagattgtgccactaaactaaaggagaagcagctctttaagatatttccagccattaaccaaaattttctggtggacattttcaaggaccacaactattcattagaacacacagtgcaatttcttaactgtgttcttgaaggggaccctgtaaaaacagttgtagcccaagagtttgttcaccaaaatgagaatgtcacatctcatactggccagaagtctaaagagaaaaagccaaagaaattaaaagagactgaagaaacaccaagtgaactgtctttccaggactttgagtacccagactatgatgactacagagcagaggctttccttcaccaacagaagaggatggagtgctacagcaaggccaaagaagcttatcggatagggaaaaaaaatgtcgccaccttttatgcccagcagggtactcttcatgagcagaagatgaaagaagccaatcaccttgctgccatagagatctttgagaaagtcaatgcttcgctgctgccacagaatgttttagacctccatgggctgcatgtggatgaagctctagaacatttgatgagagttttagagaagaagactgaagaatttaagcagaacggtgggaagccctatttgtctgtgattacggggagaggaaaccacagccagggaggagttgctcgcatcaaaccagctgtcattaagtacctcataagccatagcttcaggttctctgaaattaaaccagggtgcttgaaagtcatgctaaagtaaaataaacatccttgaattagaagtatgaaggtttgtaggttaaaattacttttatttgcagtaattcagtcaattctaccctaaagatgtgttttattataaataatattcaattatgaaacaaaaaaattatgatgtttttcaaaatgcaagtgaggtttgattttttactgaatcaaatgcaaatgttacctgttaaagatattacagagaaattttattgattacaaaatatgtaagaaaattatcagctacagttttaaagtttaaaatgctctgattgtttctcagaaaaggttacctttgtattaattgttgtatgacatttagtaatgtcctaaaagtcttttgtgagaggtatttaaagtgctttgagacctgattcatgccccccaaagggtggtattaaaagaggaaaaaggacatagtagtggtagtaaagaaaaaaaggagatctaacaaaaacacttgaatattttttattttcaaaactaaacacataaaatgcttttattttgccatatcctacaggaaggaagacatgcttttgccctttcttctgctttgtatatgaccttgatcttttaccttttgttctgttcttctgtgtgcattttatggaaagaaagttgggtctgagattatattgtaattttatactttctatagacagaaaggttttcagagaaaaagaaatggttaaatatcttccagatgttgctgccttatcgaaatgcttctagaactgtctgtataagtcgtatttcagacagtactaaatacttatattttatttttgaggcatgtaattttaaaactgcagtaggttaaaattctattaaacaaatatagaaaatattttgtttataattggcctggtgtggtggcccacgcctgtaatcccagcactttgggaggccgaggtaggtggatcgcctgaggtcagaagttcaagaccagcctggccaacatggtgaatccccgtctctattaaaaatacaaaaattagctgggtgtggtggcgtgtgcctgtaatcccagctacttgggaggctgaggcaggagaaccgcttaaacctgggaggtggaggttgcagtgacccgagatcgagatcacaccactgcactcagcctgggtgacagagcaagactccgtctccaaaaaaaaaaa

SEQ ID NO: 427 - protein, 1770 aa, Homo sapiens
MPRRRKNLGGNPFRKTANPKEVVVSSVASREEPTTTLPSMGETKVDQEELFTSISEIFSDLDPDVVYLMLSECDFKVENAMDCLLELSATDTKIEESSSQSFVASENQVGAAESKIMEKRPEEESEDSKMDSFLDMQLTEDLDSLIQNAFEKLNSSPDDQVYSFLPSQDVNSFNDSSEFINPDSSNMTPIFSTQNMNLNGENLENSGSTLSLNPLPSHSVLNESKCFIKDNTLALESNYPEDSLLSSSLNVASDSIAGCSSLNQKQKELLESECVEAQFSEAPVDLDASEPQACLNLPGLDLPGTGGDQKSTRVSDVFLPSEGFNFKPHKHPELPTKGKDVSYCPVLAPLPLLLPPPPPPPMWNPMIPAFDLFQGNHGFVAPVVTTAAHWRSVNYTFPPSVISHTSPTKVWRNKDGTSAYQVQETPVSQVVRKKTSYVGLVLVLLRGLPGSGKSFLARTLQEDNPSGVILSTDDYFYINGQYQFDVKYLGEAHEWNQNRAKEAFEKKISPIIIDNTNLQAWEMKPYVALSQKHKYKVLFREPDTWWKFKPKELARRNIHGVSKEKITRMLEHYQRFVSVPIIMSSSVPEKIERIELCAYSCEDRSTSPRDDEDIISEKEENILSLSLKHLEFTEEKNLDVTKETMLPENVAYLSNADLNKRRKEISDMNPSIQSALILETPHMYFSDSESKLQATDKSENEQIEMVAVKGYSKTDTDSSMERVSPSTCCSENNQEDCDLANSGPLQNEKSSPGEIVEERATVTKKAFGKQKSKSTLEKFPRHELSNFVGDWPVDKTIGQRTKRNRKTEKTSSVQSDKKYNYPQSHKLVNSVSVNTDCVQQRGSPHESVEDGRKSQCDDASEPLNSYKYDAYKNIDKNSFNIMGDWPSSDSLAQREHRSRMPKTGLSEPNLEIGTNDKMNEISLSTAHEACWGTSSQKLKTLGSSNLGSSEMLLSEMTCESQTCLSKKSHGQHTSLPLTFTNSAPTVSGVVEPQTLAECQEQMPKRDPGKEVGMCTQTEPQDFALLWKIEKNKISISDSIKVLTGRLDGFKPKVFNINTKSDVQEAIPYRVMYDKSTFVEESELTSADESENLNILCKLFGSFSLEALKDLYERCNKDIIWATSLLLDSETKLCEDTEFENFQKSCDGSQIGPFSLGLNLKEIISQRGTLENSNSPVPEFSHGIGISNADSQSTCDAERGNSEQAEMRAVTPENHESMTSIFPSAAVGLKNNNDILPNSQEELLYSSKQSFPGILKATTPKDMSETEKNLVVTETGDNIHSPSHFSDIFNFVSSTSNLELNEEIYFTDSLEIKRNENFPKDYVKFSDEEEFMNEDEKEMKEILMAGSSLSAGVSGEDKTEILNPTPAMAKSLTIDCLELALPPELAFQLNELFGPVGIDSGSLTVEDCVVHIDLNLAKVIHEKWKESVMERQRQEEVSCGKFMQDPSLVGHTGLDNPEQKSSQRTGKKLLKTLTASEMLPLLDHWNTQTKKVSLREIMSEEIALQEKHNLKRETLMFEKDCATKLKEKQLFKIFPAINQNFLVDIFKDHNYSLEHTVQFLNCVLEGDPVKTVVAQEFVHQNENVTSHTGQKSKEKKPKKLKETEETPSELSFQDFEYPDYDDYRAEAFLHQQKRMECYSKAKEAYRIGKKNVATFYAQQGTLHEQKMKEANHLAAIEIFEKVNASLLPQNVLDLHGLHVDEALEHLMRVLEKKTEEFKQNGGKPYLSVITGRGNHSQGGVARIKPAVIKYLISHSFRFSEIKPGCLKVMLK

SEQ ID NO: 428 - DNA, 4504 bp, Homo sapiens
agtcagacccaggaggagtgaggtcaattgccctttagtcccaggactaaccggaagcttctgcaacaggaggacattgaaaataagatggaacccatccacataaggatttgcctcaaagggcactgcaaaaattgaacagaggaatcccaaggaagctgcctgaatttgcctgtatactctcgttctgcgacttataaaggaccagacaaatcaaattagtggttttggtttccgccagctgtggatgcctttgacattatgaccgcagaggattccaccgcagccatgagcagtgactcggccgccgggtcctccgccaaggtgcccgagggcgtggcgggcgcgcccaacgaggcagcactgctggcgctgatggagcgcacgggctacagcatggtgcaagagaacgggcagcgcaagtacggcggcccaccgcccggctgggagggcccgcacccgcagcgtggctgcgaggtcttcgtgggcaagatcccgcgcgacgtgtacgaggacgagctggtgcccgtgttcgaggccgtgggccgcatctacgagctgcgcctcatgatggactttgacggcaagaaccgcggctacgccttcgtcatgtactgccacaagcacgaggccaagcgcgcagtgcgtgagctcaacaactacgagatccgcccgggccgcctgctcggcgtgtgctgcagcgtggacaactgccgcctcttcatcggcgggatccccaagatgaagaagcgcgaggaaatcctggaggagattgccaaggtcaccgagggcgtgctggacgtgatcgtctacgccagcgcggccgacaagatgaagaaccgcggcttcgccttcgtggagtacgagagccaccgcgcggctgccatggctcgccgcaagctcatgcctggccgcatccagctgtggggccaccagatcgccgtggactgggccgaacctgagatcgacgtggacgaggacgtgatggagaccgtgaagatcctctacgtgcgcaacctcatgatcgagaccaccgaggacaccatcaagaagagcttcggccagttcaaccccggctgcgtggagcgcgtcaagaagatccgcgactacgccttcgtgcacttcaccagccgcgaggatgccgtgcatgccatgaacaacctcaacggcactgagctggagggctcgtgcctggaggtcacgctggccaagcccgtggacaaggagcagtactcgcgctaccagaaggcagccaggggcggcggcgcggctgaggcagcgcagcagcccagctacgtgtactcctgcgacccctacacactggcctactacggctacccctacaacgcgctcattgggcccaacagggactactttgtgaaagtagccatccctgccattggggctcagtattccatgtttccagcagctccagcccctaaaatgattgaagatggcaaaatccacacagtggagcacatgatcagccccattgctgtgcagccagacccagccagtgctgctgccgccgcagccgcggccgcagccgccgcagccgctgtcattcccactgtgtcgacgccaccacctttccagggccgcccaataactccagtatacacggtggctccaaacgttcagagaattcctactgccgggatctacggggccagttacgtgccatttgctgctccagctacagccacgatcgccacactacagaagaacgcggcagccgcggccgccatgtatggaggatacgcaggctacatacctcaggccttccctgctgctgccattcaggtccccatccccgacgtctaccagacatactgaggctggtgaccagcacgaagacagaccacacaaacaccactgaaggaacgcttgactatttatgaagaaggaacatgttggattcacacatgcaacctgaaagtgaagaatgttagcagatttatttctgaattattttatatacatgaagttttcactagttttttaagactattttcaacttagcatgcctacgttcatacatttccaaaagacttgcaatggttcgtgccttcattccatcttttaaaaatttgtatgctgtactacatttgtatagaggtttttgttgttgtttttttaaggatatattttcagtatgaaggttattttcttaacttctgcactccagagatttctattttgtagtaccttcaataatatatcaactatatattaaaaaagcacacttgaggagctagggaactattttgaaaaatatatacaatatttaaagatacaaacagtagtgcttaaaaatactacataaagcattattttaaaggttatactggaaagtgcaattttaaaatgagtaaaacctctgtatttctgctggcattaagggttgatggtgttaccatgtatcatcatggcggtactattttttaaaagaaattaaacactggatctctccttaagccaacattgaaaagacttgccgcacttctgagtccaaacactggaaagctctcctttgccaccgttagccggggctcattctccatgtgccttagccttaaacatgcccccactcccacatctctcaccctgtcccctcctccccagattcccaatcccaccgcaatgtttggcaagcctaggactgataagtagctctgatagaggagctggtggcttttatacttcttcctgggtttttgttggggtttgttgtttcgttgttttttgtttttttttttgtttggttggggaagtattgtcttctacgtgtgctattttcagtagcagagtaagcacaaggttttaatcgagttgcataagacacctttgcatagctatttaattgcccaatgtaaaactttaatgccatttctaatgcttttattcatttttgaagtatgagtttgtagggacaaagaatgtatgttatcgtagacaagacccccagagactcttttcagcagaaagttatgcttctagttgccttaccatgtttcttgcaaaactgtccatggtcctcaagggtgttggaaacattatgtttattaaatgggcctctcttcctttgctgtgcacttgatgggtgaactggattggggtgtgcacatccaggaggaggaggagagacctgtagaagtttaaagatagtttgtaaatatcttctaatgcttgtttttagtccttttatgttggagaagttcatggtatgtagtttaatgcaaaatgaaaccattttatttcaatgttattaaaaaggtttgttttattaggaagttaatgtattgttgcagtgttttgtgcctgtttaaaggcttttgtttagcagagtgaatgtaaaatacagtaaaatgttaagattgtcatctactttttaaaaaaaaatatcaacttggaattgttttttaaaggctcaatcaaggaagtgaggtgtgcaataaggtagcaagtaaaacgcagttgcgtttttatgtcatgttagagatccatacaattttccactcacgggatttttgttgatggctgaattcttgtggattcataagaggatcatgcccttagcaagtacttttgttttgttttaaattaagagattcccaaatgcctttttccccctcatcttgaaatgagatgagtttttatgtgtaagcaatatttatttaactattctataaaattattgagtgcctactgaggcctttaagcaccgctaacattcctttccatcattcttttaaatgacataaaataattgtgcaatgttcctgatgatgtaccccacaagctgcattcaaactcaaatctgtgggaatgagtgactcgacaaaatgtaattcggatcagatcctcatcccctgactgtgtgaaaaaagtactctccttctagtgaaggattgtcacagagtttcactggatgaaactatgacccagtattcttactgtattttacatatgcctgtaaattatttgcaaaaaagaagaagaagaggaagaaagaaaagaaagaaaagaaagaaagaaagaaagaaagaaagaaagaaagaaagaaagaaagaaagaaagaaagaaaaagaaagaaagaataaaaaaaaatgataacatggcaaccaccaaactcccttaaaaacaaacattggtgacatggccaattaagtatcagtgagcctcctatctgggacttatctgttcctattgtttcaaaaccatttcatgtacactactgaggtaagtttataacttgaaatgtgaactttttttttttttagtgttaagaacaaactatataaatgtaaaaaaaaagttttagagttctgttttcaaacattgctagtggtttagttaactttagctgctttatatttgaaaagcttttatttagatcttgctccatttacagtacattcttaggatgtatgtagtaaataaagctttctttaaagcaatcgcaagaccttattttaaattgtgaaaaaaaaaaaaaaaaaaa

SEQ ID NO: 429 - protein, 524 aa, Homo sapiens
MTAEDSTAAMSSDSAAGSSAKVPEGVAGAPNEAALLALMERTGYSMVQENGQRKYGGPPPGWEGPHPQRGCEVFVGKIPRDVYEDELVPVFEAVGRIYELRLMMDFDGKNRGYAFVMYCHKHEAKRAVRELNNYEIRPGRLLGVCCSVDNCRLFIGGIPKMKKREEILEEIAKVTEGVLDVIVYASAADKMKNRGFAFVEYESHRAAAMARRKLMPGRIQLWGHQIAVDWAEPEIDVDEDVMETVKILYVRNLMIETTEDTIKKSFGQFNPGCVERVKKIRDYAFVHFTSREDAVHAMNNLNGTELEGSCLEVTLAKPVDKEQYSRYQKAARGGGAAEAAQQPSYVYSCDPYTLAYYGYPYNALIGPNRDYFVKVAIPAIGAQYSMFPAAPAPKMIEDGKIHTVEHMISPIAVQPDPASAAAAAAAAAAAAAAVIPTVSTPPPFQGRPITPVYTVAPNVQRIPTAGIYGASYVPFAAPATATIATLQKNAAAAAAMYGGYAGYIPQAFPAAAIQVPIPDVYQTY

SEQ ID NO: 430 - DNA, 6182 bp, Homo sapiens
cgacggcggcggccgtcctcatcccggcgcttgagaggacgcggggctgcgcaaatggcttgtcccgctctcggtctggaagctcttcagcccctgcagcccgagccgccccccgagcccgccttctccgaggcgcagaagtggattgagcaagtaactggcagaagttttggtgataaagattttcggacaggtttagaaaatggaatcctcctctgcgagttgctgaatgctataaagccaggacttgttaaaaagatcaatagattgcctacccccattgcaggactggacaatattatcttattcttgagaggttgtaaagagctcggccttaaagaatctcaactttttgacccgagtgacctccaggatacatccaacagagtaacagtcaagagccttgattatagtaggaagctgaaaaatgtattagttaccatttactggctgggaaaagcagcaaacagctgcacatcctacagcggaacgacactaaacctgaaggagtttgaaggattgttggctcagatgcgaaaggacactgatgacattgaaagtcctaaacgcagtatccgagacagtggctacatcgactgctgggattccgagcgcagcgactccctctctcctcctcgccacggcagagatgattccttcgacagcctggattcctttggctctcgctctcggcagacgccttcaccagatgtagtcctcaggggaagcagcgatgggagaggaagcgactctgaatccgacttgcctcatcggaagctgccagatgtgaagaaggatgacatgtctgcacggcggacttcccatggtgagccgaaatcagcagtgccttttaaccagtacctcccgaacaaaagcaatcagacggcctacgtccccgcgcctctgagaaagaagaaagcagagagagaggaataccgcaagagctggagtaccgccacctccccgctgggtggggagaggcccttcagatacggtccgagaactcctgtgtctgatgacgcagagagcaccagcatgtttgacatgcggtgtgaggaggaggccgcggtgcagccgcacagcagggcccgccaggagcagctgcagctgataaataaccagctgagggaagaggacgacaaatggcaagatgacctggctcgttggaagagtcgtagaagaagtgtttctcaggacttaatcaagaaagaggaagaaaggaaaaaaatggagaagttactggctggagaagatgggacaagtgaacgaaggaaaagcatcaaaacctacagagaaattgttcaagaaaaagagcggagagagagagagctgcatgaagcatataagaacgctcggtcccaggaggaggcagaggggatccttcaacagtacattgagaggttcaccatcagtgaggctgttctcgaacgcttggagatgccaaaaattctggaaagaagccattcaacagagccaaatttatcctccttcctgaatgaccccaatcccatgaaatacctgcggcaacagtcactgcctccacccaaattcactgccactgttgaaaccaccattgctcgtgccagtgttctggataccagcatgtcagcaggcagtgggtctccaagcaaaactgtcactcccaaagcagtgcctatgctgacacccaagccttactcccagcccaaaaattctcaagatgttctgaagacctttaaggtagacgggaaagtcagtgtgaatggagagacggttcatagagaggaggagaaggaaagagagtgtcccacggtggcacctgcccactccttaaccaaatcccagatgtttgaaggtgtggccagagtgcacgggtctccactggagctgaaacaagacaacggtagcatcgagatcaacataaagaagccaaactctgttccccaagagctcgcagcaaccactgagaaaacggaaccgaatagtcaagaggacaagaatgatggtggaaaatcaagaaaagggaatatagaacttgcctcatcagaaccacagcattttacaacaactgtgactcgatgcagcccgaccgtggcctttgtggaatttccctccagcccccagctgaagaatgatgtgtcggaagaaaaagaccagaagaaaccagaaaatgaaatgagtggaaaggtggagttggtgctgtcacaaaaggtggtaaagccaaaatctccagaacccgaagcaacgctgacatttccatttctggacaaaatgcctgaagccaaccaactacatttgccaaatctcaattctcaagtggattctccaagcagtgagaagtcacctgttatgacacctcagtttaagttctgggcatgggacccagaagaggagcgcaggcgacaggaaaaatggcaacaggaacaggaacgtttgctccaggagagataccagaaggagcaggacaagctgaaagaagagtgggaaaaggcccaaaaggaggtggaagaggaagaacgcagatactatgaggaggagcgtaagataattgaagacactgtggttccatttactgtttcttcaagttccgctgaccagctgtctacctcttcctccatgactgaaggcagtgggacaatgaataagatagacctgggaaactgtcaagatgaaaaacaagacagaagatggaagaaatcattccagggagatgacagtgacttattgctgaagactagggaaagtgatcgactggaggagaagggcagcctaactgaaggggccttggctcattctgggaaccctgtatcaaaaggagtccatgaagaccatcagctggataccgaggctggggccccacactgtggaacaaacccacagcttgctcaggatccatcccagaatcagcagacatcaaatccaacgcacagttcagaagatgtgaagccaaaaaccctcccgctggataaaagcattaaccatcagatcgagtctcccagtgaaaggcggaagaaaagtccccgagagcacttccaggctgggcctttctctccctgttctcccacccctcccggtcagtcaccaaacaggtctataagtggaaagaagctgtgctcttcctgtgggcttcctttgggtaaaggagctgcaatgatcatcgagaccctcaatctctattttcacatccagtgtttcaggtgtggaatttgtaaaggccagcttggagatgcagtgagtgggacggatgttaggattcgaaatggtctcctgaactgtaatgattgctacatgcgatccagaagtgccgggcagcctacaacattgtgacacggctttcaagcttccggatcactcaccatttctttactgagagtgtcccctggcaactgcttaacaaaatcccaagctcaggggcttctcagcatttacctaatttctgaaaggctcttctgaaaggtggtatctgttctttcgtagcacagtgtttatgtttttcctgtttattgttttggttttttttttttttttgcatttgcacagtatacacaaaagaatatggggttgtaatgatcctgaatagctcaaaaaaggttttagcatggtcaaacaggcttatggtttaaaatgtgttattctcttctttgggaattagctaaatgatgcaataaacctgttttgttttagaatgtctaggaattaaacactttatgtttacagaattgagctgcagaaagtgcaagacatgccaatttgagacacacggtcttctaagactgaaggataaatttaatgcatttcagaaactaaacatcacagcaagctctatctctgagctataatttgtttttaatgcaaagacactagtttgataatatatactgtaatcctgaaacatttgtgttacttacctttggaggtagaaattataccaataaattattgcaccgttagtattagattctgtgtaccttggaagttatgtcattaatataggctggttcatcaaataaagcaaaaccttgcaatatcagctagatttacactccgggacgttgcccaaaggtaggaagaaagcagagggaaatatttcagtcatcatttccaaagtcattatcaaaatctgtgaggaagtttaatcttccaaagagtcaatgtcagacatcaggcctctgttgcctgcttctctcgaggcactagattaggagtcttcaataagagacttaacatgaggtatatggaagatgaggcaccgagataagttcatcattaggtgtgagcactgctcacccttgctggcaagttctccttaagggcctgaagcacaggtgtccaaagaaaagcgttaagtccatcttaatagaatctatgtggtatatgatgtggtcagcccctggtctgtgatcagcaagaacctacagcacagattatgccctgcccacttcaatgaatacctactctcctccattctccatcactttttttgctatcaagaactccggaccttgcccatggagaagtttagagaggaactcttgtggagagctggtttattttctgccctgtgcgacgagtttcagctggccaagaaaggagtcaagttattaaaaagcatcacaatgtagatctccaggctggttttttgttttttgttgttaagactggggaaagggggactatttattctgccttaaatcaatggcaaataagtcaagatgacattttgtgaatgtagactatggatacactcctaatagattgatgtagtcataaaagggggtcaagtagatgtttttctgttatgtaagcaataatttttccgtgtcttattgagtatggctagcgattatttattacatgctagatgggttctttgcatgtgggttccatataggtgcagaaatttcctcagccactggagggatttcgaccatatttgtcatttggatgagctgttattagattgaaatctacacatcatttcattaaaaattgtgccttagaaaacgcaaagctgttgcacatggcgataaattatggatgcagtacattgaagagagatgaagtcacttccaagtttccaagacttctcatggaggtgtttgctgttttacaggaaaaaataaaaataaaaaaagaaaaaaagaaaaaattaaaaagaaaaattgttttgaaaatgtacagatcaagtccaatattttgattatccacctgcatgttttattaaatattttgataatgtggatgtttacactttgcatgatattagcagagtaccactagtaatgcacaaacatgtacaatatggtcattcataaccgatttttatagaatactttttacatgtgcaactccatccgttatgtaaggattacatgaatattgcacattcccttctggtttcacaaacccatttatacatatttcttagtgaggctcattgtacatgtattgaagctagaatcgagtcaagaaaaataaagccccattctccaactgcaaaatgtgctttcccataatgaacactagtcaccagcacagaataatctccaacattttctaaattctaattgccaactgtttctatttatatttgatttatatttcatttggagtctgttacatggcagcttaggcagactagatcttgttttttccaatgcagcataatgagtatgatctatttcttttcaaataatctttgagatcccaggaaaaaaaaaatgctctgctccattgagctataatgtaaatgtgtttgtttaaaaaacaggtgaggcaagtgagtgatttattgttcctgaggaagtatatctgattttttttctcatactccaaaagctagtccctactctttaataaaaataatgggtaactttttgtttttcactagcgaacttccatgacatttcctttctatgtagtgtgattaatgcaatacatattatagttatctatacacagtgtaagatttaacaaactgaaatgatccacctcatatgtgagtccgtccaaaagatgttactgctctgggtgggccagtgttctatatcggttatactaactttcatttaaagtatttattctaaaatgcctctgagaaacagtaaaaaataaaaacaacaagttgtctaaaatgcaacagcttttatagtaaatgtacatttataaataaaatactcaaatcaaaaaaaaaaaaaaaaaaa

SEQ ID NO: 431 - protein, 1083 aa, Homo sapiens
MACPALGLEALQPLQPEPPPEPAFSEAQKWIEQVTGRSFGDKDFRTGLENGILLCELLNAIKPGLVKKINRLPTPIAGLDNIILFLRGCKELGLKESQLFDPSDLQDTSNRVTVKSLDYSRKLKNVLVTIYWLGKAANSCTSYSGTTLNLKEFEGLLAQMRKDTDDIESPKRSIRDSGYIDCWDSERSDSLSPPRHGRDDSFDSLDSFGSRSRQTPSPDVVLRGSSDGRGSDSESDLPHRKLPDVKKDDMSARRTSHGEPKSAVPFNQYLPNKSNQTAYVPAPLRKKKAEREEYRKSWSTATSPLGGERPFRYGPRTPVSDDAESTSMFDMRCEEEAAVQPHSRARQEQLQLINNQLREEDDKWQDDLARWKSRRRSVSQDLIKKEEERKKMEKLLAGEDGTSERRKSIKTYREIVQEKERRERELHEAYKNARSQEEAEGILQQYIERFTISEAVLERLEMPKILERSHSTEPNLSSFLNDPNPMKYLRQQSLPPPKFTATVETTIARASVLDTSMSAGSGSPSKTVTPKAVPMLTPKPYSQPKNSQDVLKTFKVDGKVSVNGETVHREEEKERECPTVAPAHSLTKSQMFEGVARVHGSPLELKQDNGSIEINIKKPNSVPQELAATTEKTEPNSQEDKNDGGKSRKGNIELASSEPQHFTTTVTRCSPTVAFVEFPSSPQLKNDVSEEKDQKKPENEMSGKVELVLSQKVVKPKSPEPEATLTFPFLDKMPEANQLHLPNLNSQVDSPSSEKSPVMTPQFKFWAWDPEEERRRQEKWQQEQERLLQERYQKEQDKLKEEWEKAQKEVEEEERRYYEEERKIIEDTVVPFTVSSSSADQLSTSSSMTEGSGTMNKIDLGNCQDEKQDRRWKKSFQGDDSDLLLKTRESDRLEEKGSLTEGALAHSGNPVSKGVHEDHQLDTEAGAPHCGTNPQLAQDPSQNQQTSNPTHSSEDVKPKTLPLDKSINHQIESPSERRKKSPREHFQAGPFSPCSPTPPGQSPNRSISGKKLCSSCGLPLGKGAAMIIETLNLYFHIQCFRCGICKGQLGDAVSGTDVRIRNGLLNCNDCYMRSRSAGQPTTL

SEQ ID NO: 432 - DNA, 8270 bp, Homo sapiens
aagagctcgcccagctctgcgggcgccgccaccttcgccgccaccgctgcctttctcctcctcctgtcggcgtgcgggggccgcgcccggcggcagctctgccctaggtgggcggcggcgcggcccaggctgcagctgagcgctctgcgcggcgcagccgggtctcccgcgtgtaccacgccgtgacaggtgcagagtccgggctgaggacccacctgcagccgccgccgcgatgcccaccatgcggaggaccgtgtcggagatccgctcgcgcgccgaaggttatgagaagacagatgatgtttcagagaagacctcactggctgaccaggaggaagtaaggactattttcatcaaccagccccagctgacaaaattctgcaataaccatgtcagcactgcaaaatacaacataatcacattccttccaagatttctctactctcagttcagaagagctgctaattcattttttctctttattgcactgctgcagcaaatacctgatgtgtcaccaacaggtcgttatacaacactggttcctctcttatttattttagctgtggcagctatcaaagagataatagaagatattaaacgacataaagctgataatgcagtgaacaagaaacaaacgcaagttttgagaaatggtgcttgggaaattgtccactgggaaaaggtggcagtaggggagatagtgaaagtgaccaatggggaacatctcccagcagatctcatcagtctgtcctcaagtgagccccaagccatgtgctacattgaaacatccaacttagatggtgaaacaaacttgaaaattagacagggcttaccagcaacatcagatatcaaagacgttgacagtttgatgaggatttctggcagaattgagtgtgaaagtccaaacagacatctctacgattttgttggaaacataaggcttgatggacatggcaccgttccactgggagcagatcagattcttcttcgaggagctcagttgagaaatacacagtgggttcatggaatagttgtctacactggacatgacaccaagctgatgcagaattcaacaagtccaccacttaagctctcaaatgtggaacggattacaaatgtacaaattttgattttattttgtatcttaattgccatgtctcttgtctgttctgtgggctcagccatttggaatcgaaggcattctggaaaagactggtatctcaatctaaactatggtggcgctagtaattttggactgaatttcttgaccttcatcatccttttcaacaatctcattcctatcagcttattggttacattagaagttgtgaaatttacccaggcatacttcataaattgggatcttgacatgcactatgaacccacagacactgctgctatggctcgaacatctaatctgaatgaggaacttggccaggttaaatacatattttctgacaaaactggtactctgacatgcaatgtaatgcagtttaagaagtgcaccatagcgggagttgcttatggccatgtccctgaacctgaggattatggctgctctcctgatgaatggcagaactcacagtttggagatgaaaaaacatttagtgattcatcattgctggaaaatctccaaaataatcatccaactgcacctataatatgtgaatttcttacaatgatggcagtctgtcacacagcagtgccagagcgagaaggtgacaagattatttatcaagcagcatctccagatgagggagcattggtcagagcagccaagcaattgaattttgttttcactggaagaacacccgactcggtgattatagattcactggggcaggaagaaagatatgaattgctcaatgtcttggagtttaccagtgctaggaaaagaatgtcagtgattgttcgcactccatctggaaagttacgactctactgcaaaggagctgacactgtaatttatgatcgactggcagagacgtcaaaatacaaagaaattaccctaaaacatttagagcagtttgctacagaagggttaagaactttatgttttgctgtggctgagatttcagagagcgactttcaggagtggcgagcagtctatcagcgagcatctacatctgtgcagaacaggctactcaaactcgaagagagttatgagttgattgaaaagaatcttcagctacttggagcaacagccattgaggataaattacaagatcaagtgcctgaaaccatagaaacgctaatgaaagcagacatcaaaatctggatccttacaggggacaagcaagaaactgccattaacatcggacactcctgcaaactgttgaagaagaacatgggaatgattgttataaatgaaggctctcttgatggaacaagggaaactctcagtcgtcactgtactacccttggtgatgctctccggaaagagaatgattttgctcttataattgatgggaaaaccctcaaatatgccttaacctttggagtacgacagtatttcctggacttagctttgtcatgcaaagctgtcatttgctgtcgggtttctcctcttcaaaaatctgaagttgttgagatggttaagaaacaagtcaaagtcgtaacgcttgcaatcggtgatggagcaaatgatgtcagcatgatacagacagcgcacgttggtgttggtatcagtggcaatgaaggcctgcaggcagctaattcctctgactactccatagctcagttcaaatatttgaagaatttactgatgattcatggtgcctggaactataacagagtctccaagtgcatcttatactgcttctacaagaatatagtgctctatattatcgagatctggtttgcctttgttaatggcttttctggacagatcctctttgaaagatggtgtataggtctctataacgtgatgtttacagcaatgcctcctttaactcttggaatatttgagagatcatgcagaaaagagaacatgttgaagtaccctgaattatacaaaacatctcagaatgccctggacttcaacaccaaggttttctgggttcattgtttaaatggcctcttccactcagttattctgttttggtttccactaaaagcccttcagtatggtactgcatttggaaatgggaaaacctcggattatctgctactgggaaactttgtgtacacttttgtggtgataactgtgtgtttgaaagctggattggagacatcatattggacatggttcagccacatagcgatatgggggagcatcgcactctgggtggtgttttttggaatctactcatctctgtggcctgccattccgatggcccctgatatgtcaggagaggcagccatgttgttcagttctggagtcttttggatgggcttgttattcatccctgtggcatctctgctccttgatgtggtgtacaaggttatcaagaggactgcttttaaaacattggtcgatgaagttcaggagctggaggcaaaatctcaagacccaggagcagttgtacttggaaaaagcctgaccgagagggcgcaactgctcaagaacgtctttaagaagaaccacgtgaacttgtaccgctctgaatccttgcaacaaaatctgctccatgggtatgcgttctctcaagatgaaaatggaatcgtttcacagtctgaagtgataagagcatatgataccacgaaacagaggcccgacgaatggtgatggggagagcctgaaaggcaggctctgttacctctctaaggagagctaccaggttgtcaccgcagtctgctaaccaattccagtctggtccatgaagaggaaaggtagatctgagctcatctcgctgatggacattcagattcatgtatattatagacataagcactgtgcaactgtactgtaacaccatctcttttggatttttttaaggtatttgctaagtctttgtaaacggaaattgaaaatgacctggtatcttgccagagggctttcttaaacggagaataagtcagtattcttatgccattactgtggggctgtaactgactgtcagtttattggctgtaccacaaggtaaccaaccattaaaaaactctaaatgatatttagttaaagggactcttggtatccagacttagatttcaggatatgctgaaacaaaccagcattcttaaggaactgactcaccttcctgagcaaaatttctaaacaagcatttgtgtccaaaattgtcttgataaatgtttgccaaagaggttcagtaagtgtttttctagttcagtagtcatatgcccagaaatgtaagagaaagtttacttccagttccgctgtaagatctgcatgcctgactttccaaatgtaagagtgatttacaaaaatgaatatttcaaggcatttgctactaaaatcggtgatgttgcacctttggccttacaaatgcttctttgttgtttgtcgtgtttatttgttagaggacacacgtgttaatgtgactctgttgttatgacactgatttttcaaactatgtatgtttcaggtatttctgatgaagtttcatcatcatttagatttttctaaaaatctggctaatgcagtagattgagtgatgtcattttgtcttaaagtttttcctcttaagaaacatatgctacgtatttacgtgggatttccaaagcttctgttgcaatatttggaataacatgtcagataaatgcatgggcttttgtcctgtgttccagttcccactagagatgcctgtgtcttgtgtagcacacccagtgttatggtgactgccccctatactgaagactgaaaattatttcacagttcactcatcaaatagttcccaaaattcgtcacatgctgcttattgggacaaataggtagtacattttccccatttaaaaaatgcggattttactcaggccggtaactttacagtcagaggacacgttcatcatgagtagcttttgttagtatgttttaaaatgtatcttcagttcaattattttcagcatttacaagacatctgaaaatggctattttgctaccaacagtaaatgaaggggctgtttaaaaaccacaaccagttttctacactattttttaaataatactttcatttgaaaaaaaggaattagttttcagatacacttcagagattgaagcaaactatttgccttttactcaaaagcctgcttgcctttacatggacttaccagcaaaataggtagaactttctcttttaaaaaaagtcaactagaattgagaagaggtgattttttttcagatcgcttctcgagtttaatattttcacattcttttcaccctttttctcaatctagatttaaaattaggatatatgtcatttccttgtctgtatttgtagctccttagttaccagtatgcctctccattttctacaaataagaggttataacacatatacataattctaaccttaagggaacacacgtttacatactttacttcccaagcccttcctgtttggggtacagattgagagagtcatgaatcaacacatctagcaagaccacaggtgtaagagtctaagatcgtcttcaaaattctgaagtcccagtctttacctgtccagtgaatgaatattcagagcagcttttcctgggcttcccagtggtgatagctgaggtcaaaccacaaaaaataagaaagcaagagtgaaatgcacccctccagagaaacactttgtagtgtttaattctgttaatagagaagagctgcttctgtttgcgctcacttcatcagtggcacccttctgcagaattttaatataaaaacattatggatataatagaactggattttctgacttaaaaatgtaagttttattttaatcttgaaacgtggattgtttctgtggagctcttaaacatgagaagaatacttacggttgataatgtgtaacatgatctgaaatgtgactaatttgagcctctttgtcccatcgtcctgtttttgaattattgacattgtcagtctctttgcttcctgggtgagacttggggtttgagggacagggaatgaccttcttggtgaaacttaaaatataacattgcaattgcagtgactttacagtgttaaattagagaaaatagtctgattttttaaaccttccttaactggaaaaaagtcacatggttttaccaggattgaaataaacagtcaatgtgacttttaacatgtgtttttttgaaataaagggcacgtactcttcaattaaaaagttccttatagggactctggcaaatgctaacacagttgctttacaatgtttacaattcagacaatacgacttataatagaaaatcctcattcatttagcattgaaaagctggaagttgcttctttaatgttgaatagtatacagtggtattgagcatggactttctaaatgttttatatatacatataaaaatatattggtgtctcacacccagaaagatgttatattgtagatattattaggaaaacagtgtttctcaggaacgttgtaaattttaaatgatatatgtacttcccgtcctcccacctccactctgtgctctaatgtgagactgcttcagcagtgttgctaagttaatggaaaactttttctaatcaagtcaggtgaatgtgtattctgctaaataatgttagccatttacatgaattgtatggtcattaaatggaatcagtgattcctctttaatttccagaggggaaatgaattatggaaatcagtcagcattctgatcattaaattttatactttaattttgccgttcagcattctaaatatccaatgtgaaagtcacatgataatttgttttgcattgcgtgcactgtacaacacttacaacttgtcatttaaaatgttttctcgggaaatgaatgctagtcagaaagtaatagattgtattattcatagttttaaaattatgacaatgtcataattactacaaagctaaataatcgtgtttatttttgtgcagttgccctttgatagttcctggttttaaaacctattaagtgtataatcttacaaatagtcatctacaaaatttatggagaaagtgcccagcccattcacatcacatggaccaggaattcttttgtaaatgacttaaggtaacatcatgcagttcagtgcctaataaatgctttttaatgatgaacatttctataatgactcgtaagataccatagtctgatttttctcacattaaaataactgaagtcacttgtgtaacgtagttatactttgctgcattttaattaaccttcaacagctattaaagtggaatgtaagttaaattttgaaggaaaggaaataaatgttttccatatttcgtcttgatttactttctgtatgagaacagctgtgtttttgataggtttatggtttgcatgagttcatatttaaagtgatccaggccaatgcatggctattgctgtaaatcttgatgtttatttctgccttgtaaagttctatcacggcctacctggaatttaaaattcagtagacaaattaattggtcctctgcacaacttttttaataagtagattattttacaaagaaatttgaacaaatttaattgaatcttttgtttagcttgcctctaagaacttttcttaataaagctcccaaaacttctcagcaaataaatctcccttaagtaggaaagctagatttcatatttgcttactttgaattaacagcaactttccacaggtaaatctgttcttgcaaagatgtgagcagaatagttaaaaataatatttttatgtttcatggttctaaatggaagccataaatgcagtaaatactatctgttgtttaactactttaatcgtcattttttacattttcaagtttattaggttaagaaaaacagggcagccttggaaggcagctactacagaaaactgcagttttgcgttaaagataaagtagtattttcagctccctgaaaaaccattcctgctgaaactgctgtagaaattgtgaagctgcatgagtggagagtattgaatctgtggttatagtagttttctcaggtttgtttatcttgatgtttgatgcactgtgttttatagttattaaaattgagtaatattatttctatgcagtgttatgtgtcattggccttttgtgaatgtgcatgttttaaactgcaaattttaaacattttgtcctctaattgttattaaaaatgaaataaactttaccattacttaaaa

SEQ ID NO: 433 - protein, 1164 aa, Homo sapiens
MPTMRRTVSEIRSRAEGYEKTDDVSEKTSLADQEEVRTIFINQPQLTKFCNNHVSTAKYNIITFLPRFLYSQFRRAANSFFLFIALLQQIPDVSPTGRYTTLVPLLFILAVAAIKEIIEDIKRHKADNAVNKKQTQVLRNGAWEIVHWEKVAVGEIVKVTNGEHLPADLISLSSSEPQAMCYIETSNLDGETNLKIRQGLPATSDIKDVDSLMRISGRIECESPNRHLYDFVGNIRLDGHGTVPLGADQILLRGAQLRNTQWVHGIVVYTGHDTKLMQNSTSPPLKLSNVERITNVQILILFCILIAMSLVCSVGSAIWNRRHSGKDWYLNLNYGGASNFGLNFLTFIILFNNLIPISLLVTLEVVKFTQAYFINWDLDMHYEPTDTAAMARTSNLNEELGQVKYIFSDKTGTLTCNVMQFKKCTIAGVAYGHVPEPEDYGCSPDEWQNSQFGDEKTFSDSSLLENLQNNHPTAPIICEFLTMMAVCHTAVPEREGDKIIYQAASPDEGALVRAAKQLNFVFTGRTPDSVIIDSLGQEERYELLNVLEFTSARKRMSVIVRTPSGKLRLYCKGADTVIYDRLAETSKYKEITLKHLEQFATEGLRTLCFAVAEISESDFQEWRAVYQRASTSVQNRLLKLEESYELIEKNLQLLGATAIEDKLQDQVPETIETLMKADIKIWILTGDKQETAINIGHSCKLLKKNMGMIVINEGSLDGTRETLSRHCTTLGDALRKENDFALIIDGKTLKYALTFGVRQYFLDLALSCKAVICCRVSPLQKSEVVEMVKKQVKVVTLAIGDGANDVSMIQTAHVGVGISGNEGLQAANSSDYSIAQFKYLKNLLMIHGAWNYNRVSKCILYCFYKNIVLYIIEIWFAFVNGFSGQILFERWCIGLYNVMFTAMPPLTLGIFERSCRKENMLKYPELYKTSQNALDFNTKVFWVHCLNGLFHSVILFWFPLKALQYGTAFGNGKTSDYLLLGNFVYTFVVITVCLKAGLETSYWTWFSHIAIWGSIALWVVFFGIYSSLWPAIPMAPDMSGEAAMLFSSGVFWMGLLFIPVASLLLDVVYKVIKRTAFKTLVDEVQELEAKSQDPGAVVLGKSLTERAQLLKNVFKKNHVNLYRSESLQQNLLHGYAFSQDENGIVSQSEVIRAYDTTKQRPDEW

SEQ ID NO: 434 - DNA, 6141 bp, Homo sapiens
gtttcagatttgggatattggtgtttctgttttggagaaattattctttttctttttaatttgaagaaaaatcatcagtcttggaatacagaagagaaactagaaatatacgtattttgtttcacatttgaacagtcattcttgaggaatactccatacctgagtagacagccatgtggccatcgcagctactaattttcatgatgctcttagctccaataattcatgctttcagccgtgccccaattccaatggctgtggtccgcagagagctatcctgtgagagctatcctatagagcttcgctgtccaggaacagacgtcatcatgatagaaagtgccaactatggcaggactgatgacaaaatttgtgactctgaccctgctcagatggagaatatccgatgttatctgccagatgcctataagattatgtctcaaagatgcaataacagaacccagtgtgcagtggtggcaggtcctgatgtttttccagacccgtgtccaggaacctataaataccttgaagtgcagtatgaatgtgtcccttacaaagtggaacaaaaagtttttctttgtcctggactactaaaaggagtataccagagtgaacatttgtttgagtccgaccaccaatctggggcgtggtgcaaagaccctctgcaggcatctgacaagatttattatatgccctggactccctacagaactgataccctgactgagtattcatccaaggatgacttcattgctggaagaccaactacaacctacaagctccctcacagggtggatggcacaggatttgtagtgtatgatggagctttgttcttcaacaaagagcgcaccaggaacatagtaaagtttgatttgcggactaggataaagagtggagaggctatcatagcaaatgccaattaccatgatacctccccttaccgatggggaggcaaatctgacatagacctggcagtagatgagaatgggctatgggtaatctatgcaacagaacaaaacaatggtaaaattgtcattagtcaattgaacccttacaccctacggatcgaaggaacatgggatactgcatatgataaaaggtcagcttccaatgcctttatgatttgtggaattctgtatgtggtcaaatctgtatatgaggatgatgacaatgaggctactggaaataagattgactacatttacaacactgaccaaagcaaggatagtttggtggatgtaccctttcctaattcataccagtacattgcagctgtggattacaaccccagggacaacctactttatgtatggaataactatcacgtcgtgaaatattctttggattttggacctctggatagtagatcagggcaggcacatcatggacaagtttcatacatttctccgccaattcaccttgactctgagctagaaagaccctctgttaaagatatctctaccacaggacctcttggcatgggaagcactaccaccagtaccacccttcggaccacaactttgagcccaggaaggagtaccaccccgtcagtgtcaggaagaagaaaccggagtactagtaccccatctccagctgtcgaggtacttgatgacatgaccacacaccttccatcagcatcgtcccaaatcccagctctcgaagagagctgtgaggctgtggaagcccgagaaatcatgtggtttaagactcgtcaaggacagatagcaaagcagccatgccctgcaggaactataggtgtatcaacttatctatgccttgctcctgatggaatttgggatccccaaggtccagatctcagcaactgttcttctccttgggtcaatcatataacacagaagttgaaatctggtgaaacagctgccaacattgctagagagctggctgaacagacaagaaatcacttgaatgctggggacatcacctactctgtccgggccatggaccagctggtaggcctcctagatgtacagcttcggaacttgaccccaggtggaaaagatagtgctgcccggagtttgaacaagcttcagaaaagagagcgctcttgcagagcctatgtccaggcaatggtcgagacagttaacaacctccttcagccacaagctttgaatgcatggagagacctgactacgagtgatcagctgcgtgcggccaccatgttgcttcatactgtggaggaaagtgcttttgtgctggctgataaccttttgaagactgacattgtcagggagaatacagacaatattaaattggaagttgcaagactgagcacagaaggaaacttagaagacctaaaatttccagaaaacatgggccatggaagcactatccagctgtctgcaaataccttaaagcaaaatggccgaaatggagagatcagagtggcctttgtcctgtataacaacttgggtccttatttatccacggagaatgccagtatgaagttgggaacggaagctttgtccacaaatcattctgttattgtcaattcccctgttattacggcagcaataaacaaagagttcagtaacaaggtttatttggctgatcctgtggtatttactgttaaacatatcaagcagtcagaggaaaatttcaaccctaactgttcattttggagctactccaagcgtacaatgacaggttattggtcaacacaaggctgtcggctcctgacaacaaataagacacatactacatgctcttgtaaccacctaacaaattttgcagtactgatggcacatgtggaagttaagcacagtgatgcggtccatgacctccttctggatgtgatcacgtgggttggaattttgctgtcccttgtttgtctcctgatttgcatcttcacattttgctttttccgggggctccagagtgaccgtaacaccatccacaagaacctctgcatcagtctctttgtagcagagctgctcttcctgattgggatcaaccgaactgaccaaccaattgcctgtgctgttttcgctgccctgttacatttcttcttcttggctgccttcacctggatgttcctggagggggtgcagctttatatcatgctggtggaggtttttgagagtgaacattcacgtaggaaatacttttatctggtcggctatgggatgcctgcactcattgtggctgtgtcagctgcagtagactacaggagttatggaacagataaagtatgttggctccgacttgacacctacttcatttggagttttataggaccagcaactttgataattatgcttaatgtaatcttccttgggattgctttatataaaatgtttcatcatactgctatactgaaacctgaatcaggctgtcttgataacatcaactatgaggataacagacccttcatcaagtcatgggttataggtgcaatagctcttctctgcctattaggattgacctgggcctttggactcatgtatattaatgaaagcacagtcatcatggcctatctcttcaccattttcaattctctacagggaatgtttatatttattttccattgtgtcctacagaagaaggtacgaaaagagtatgggaaatgcctgcgaacacattgctgtagtggcaaaagtacagagagttccattggttcagggaaaacatctggttctcgaactcctggacgctactccacaggctcacagagccgaatccgtagaatgtggaatgacacggttcgaaagcagtcagagtcttcctttattactggagacataaacagttcagcgtcactcaacagagaggggcttctgaacaatgccagggatacaagtgtcatggatactctaccactgaatggtaaccatggcaatagttacagcattgccagcggcgaatacctgagcaactgtgtgcaaatcatagaccgtggctataaccataacgagaccgccctagagaaaaagattctgaaggaactcacttccaactatatcccttcttacctgaacaaccatgagcgctccagtgaacagaacaggaatctgatgaacaagctggtgaataaccttggcagtggaagggaagatgatgccattgtcctggatgatgccacctcgtttaaccacgaggagagtttgggcctggaactcattcatgaggaatctgatgctcctttgctgcccccaagagtatactccaccgagaaccaccagccacaccattataccagaaggcggatcccccaagaccacagtgagagctttttccctttgctaaccaacgagcacacagaagatctccagtcaccccatagagactctctctataccagcatgccgacactggctggtgtggccgccacagagagtgttaccaccagcacccagaccgaacccccaccggccaaatgtggtgatgccgaagatgtttactacaaaagcatgccaaacctaggctccagaaaccacgtccatcagctgcatacttactaccagctaggtcgcggcagcagtgatggatttatagttcctccaaacaaagatgggacccctcccgagggaagttcaaaaggaccggctcatttggtcactagtctatagaagatgacacagaaattggaaccaacaaaactgctaacaccttgttgactgttctgagttgatataagcagtggtaataatgtgtgtactcctaaatctttatgctgtcctctaaagacaaacacaaactctcagacttttttttttttaatgggatttttaggtcagcccaggggagaaagataactgctaaaattcccctgtaccccatcctttcttgtcctttccccttcagatggagacttcattatgttaatgaacaagatatgaagaaaatggcactcattgtggccttgttgaattatgttgtgtatgttttaacatctctgatgctgtgttactaaaattacaaggacctgctttttaaaaggccagaacaattgtctgaaattagtaacaatgctgcatctagattggagtgctgcacaaacaaacataagagcaaagcaaaactgtatcacatagggtttttggtcactcacaacctgaattcaccacagctggaatagctgtggaaaacaaaataaaacaacaaaattaataatgaaatggaggggaattctagaattatatgctaaatgcatattttatgatttgctgtattaactgatgataaaactaatggcagaaaaagaagttgagcaatttctatgtaatgtacagatactagcattgcacatatagtctgctttctgttcctccagaatttgagtcctgttaatgtagtagaaaaaaaaaaaagaaattttctttttcttttgtgctggtcttgcaagtttgtctaccagtaagagagcaaagtttccttcctttcttctctttcttcattttctttttttcttttttgccttttattcctttaaaatttcgcctggcaaaaaataaataaatggaactatcactttataagaatcattttctagtaatgcaaacaaattattttttacaaaaaaacaaaataaataaaattagacttccttccctcactatatatctttatgcagtcagaatatttccaacagtgttttttgcaaattagagcaggacaaacttttatgtttacagggcacgtctgttgtaatgcaaagcatatttggcaagcagttcatcaccaggacactagctatgattctagaagtcaaaaggtgtctatagaactagtggggcttctgcatgtgaaaaacggttttccataggcattaaagtgctgaatgctcagtctgatcaacaagtgggcacctgcactaccactttttagaggaaattcactccctcgtaagcattggaaggtcaaattattttgaagtgatttttttaaaaaaaagtcttctgtttattaacaggaaaatttatttatttgacaggattttgagtaatgtaggaatacaaaaggtaaattagcagcacatataatttttttttaatttatgatccattttgtatggtctcaaagttggatgacctcattactaatatttgttgtaaaagtgaaacttgtttgccaaccaataaacaactgattgagatttagaagatattgtaaaaaaaaaaaaaaaaa

SEQ ID NO: 435 - protein, 1469 aa, Homo sapiens
MWPSQLLIFMMLLAPIIHAFSRAPIPMAVVRRELSCESYPIELRCPGTDVIMIESANYGRTDDKICDSDPAQMENIRCYLPDAYKIMSQRCNNRTQCAVVAGPDVFPDPCPGTYKYLEVQYECVPYKVEQKVFLCPGLLKGVYQSEHLFESDHQSGAWCKDPLQASDKIYYMPWTPYRTDTLTEYSSKDDFIAGRPTTTYKLPHRVDGTGFVVYDGALFFNKERTRNIVKFDLRTRIKSGEAIIANANYHDTSPYRWGGKSDIDLAVDENGLWVIYATEQNNGKIVISQLNPYTLRIEGTWDTAYDKRSASNAFMICGILYVVKSVYEDDDNEATGNKIDYIYNTDQSKDSLVDVPFPNSYQYIAAVDYNPRDNLLYVWNNYHVVKYSLDFGPLDSRSGQAHHGQVSYISPPIHLDSELERPSVKDISTTGPLGMGSTTTSTTLRTTTLSPGRSTTPSVSGRRNRSTSTPSPAVEVLDDMTTHLPSASSQIPALEESCEAVEAREIMWFKTRQGQIAKQPCPAGTIGVSTYLCLAPDGIWDPQGPDLSNCSSPWVNHITQKLKSGETAANIARELAEQTRNHLNAGDITYSVRAMDQLVGLLDVQLRNLTPGGKDSAARSLNKLQKRERSCRAYVQAMVETVNNLLQPQALNAWRDLTTSDQLRAATMLLHTVEESAFVLADNLLKTDIVRENTDNIKLEVARLSTEGNLEDLKFPENMGHGSTIQLSANTLKQNGRNGEIRVAFVLYNNLGPYLSTENASMKLGTEALSTNHSVIVNSPVITAAINKEFSNKVYLADPVVFTVKHIKQSEENFNPNCSFWSYSKRTMTGYWSTQGCRLLTTNKTHTTCSCNHLTNFAVLMAHVEVKHSDAVHDLLLDVITWVGILLSLVCLLICIFTFCFFRGLQSDRNTIHKNLCISLFVAELLFLIGINRTDQPIACAVFAALLHFFFLAAFTWMFLEGVQLYIMLVEVFESEHSRRKYFYLVGYGMPALIVAVSAAVDYRSYGTDKVCWLRLDTYFIWSFIGPATLIIMLNVIFLGIALYKMFHHTAILKPESGCLDNINYEDNRPFIKSWVIGAIALLCLLGLTWAFGLMYINESTVIMAYLFTIFNSLQGMFIFIFHCVLQKKVRKEYGKCLRTHCCSGKSTESSIGSGKTSGSRTPGRYSTGSQSRIRRMWNDTVRKQSESSFITGDINSSASLNREGLLNNARDTSVMDTLPLNGNHGNSYSIASGEYLSNCVQIIDRGYNHNETALEKKILKELTSNYIPSYLNNHERSSEQNRNLMNKLVNNLGSGREDDAIVLDDATSFNHEESLGLELIHEESDAPLLPPRVYSTENHQPHHYTRRRIPQDHSESFFPLLTNEHTEDLQSPHRDSLYTSMPTLAGVAATESVTTSTQTEPPPAKCGDAEDVYYKSMPNLGSRNHVHQLHTYYQLGRGSSDGFIVPPNKDGTPPEGSSKGPAHLVTSL

SEQ ID NO: 436 - DNA, 4748 bp, Homo sapiens
cctcgcggggttgcggcgagcccggcccgcgaacgtcacgtccctgcgcgctccctgcactctcccgagctgcgctaggcgggcgccacggctgcccggcgaaggaaaccgaaaccgagtccgggcccgtccctccgcggccccatccgcccggtgcacccggggccgcgctcgccaggccgcggagcccagagctgcgcgcacgaaccgtgcgccgggagggcgtgggcgtggcgccgaagggtcccgggtcttcgacgcctctgcggcggctcctccctccttgcagttggatccctggcgggtgcggcccggcccggcccgtgagcggcgcacagaatgggccgatgctgcttctacacggcggggacgttgtccctgctcctgctggtgaccagcgtcacgctgctggtggcccgggtcttccagaaggctgtagaccagagtatcgagaagaaaattgtgttaaggaatggtactgaggcatttgactcctgggagaagccccctctgcctgtgtatactcagttctatttcttcaatgtcaccaatccagaggagatcctcagaggggagacccctcgggtggaagaagtggggccatacacctacagggaactcagaaacaaagcaaatattcaatttggagataatggaacaacaatatctgctgttagcaacaaggcctatgtttttgaacgagaccaatctgttggagaccctaaaattgacttaattagaacattaaatattcctgtattgactgtcatagagtggtcccaggtgcacttcctcagggagatcatcgaggccatgttgaaagcctatcagcagaagctctttgtgactcacacagttgacgaattgctctggggctacaaagatgaaatcttgtcccttatccatgttttcaggcccgatatctctccctattttggcctattctatgagaaaaatgggactaatgatggagactatgtttttctaactggagaagacagttaccttaactttacaaaaattgtggaatggaatgggaaaacgtcacttgactggtggataacagacaagtgcaatatgattaatggaacagatggagattcttttcacccactaataaccaaagatgaggtcctttatgtcttcccatctgacttttgcaggtcagtgtatattactttcagtgactatgagagtgtacagggactgcctgcctttcggtataaagttcctgcagaaatattagccaatacgtcagacaatgccggcttctgtatacctgagggaaactgcctgggctcaggagttctgaatgtcagcatctgcaagaatggtgcacccatcattatgtctttcccacacttttaccaagcagatgagaggtttgtttctgccatagaaggcatgcacccaaatcaggaagaccatgagacatttgtggacattaatcctttgactggaataatcctaaaagcagccaagaggttccaaatcaacatttatgtcaaaaaattagatgactttgttgaaacgggagacattagaaccatggttttcccagtgatgtacctcaatgagagtgttcacattgataaagagacggcgagtcgactgaagtctatgattaacactactttgatcatcaccaacataccctacatcatcatggcgctgggtgtgttctttggtttggtttttacctggcttgcatgcaaaggacagggatccatggatgagggaacagcggatgaaagagcacccctcattcgaacctaaacattgcctttgcttggtgaagaaactgtgtgagctgtcctgacctggacgatgacgtggggaaaccctccacctccttgcaggcttgttgcctgttgaaagaaggaaaaagacacggcgctggcaagtgataggaacattctggccagaggttaaagagcaggctgacatggctggccattaagctttataaaatcatgtgggctctgaaattgttcttttatgtgtctagcaagtatttaataaacccttgtatagtaattttgttgttgttgggtgctggtagctccagaattttgtgaccactattgtgggtaaaatgtctctgcatcacttgttaatgctactggtctaacttcattcagtatgcttcattcaccgaactttgtgctcaaaatgcgtatataccattttatgttgtattcctccatttcacttgcaaaacagaagtaaataagagttcgggacccagggtaaaatggtagcttcatccaatatatcattcaaatgcatctgatttctaaaacatattacattttatgctgatcttcagttcataattcttccaggaaaactcagtcttccaactgcaataaaatactgggtagaatcaaatgggaaaggggttgggtggggcaatacccatgagttgatagtgataagctcctaaggatttttaacttgtacttttgtgaacgaagagaatgcataaataatgttggtgaggataaagtacagatatttcatgtagaattaattgctagttatgatgcttgtggatagttaactgttttttttttagtcaaaatgatcatgctacgaaaagatgcttctgagagaatgtaatgagtaactgatttttcttcctgagtcgcccttgccaaatatgttactgtattaattaatctaatattgagtgattatttgtaaaattatgaatatgggaaatccatctatctacagcctaagttacacataagtttcagaaagtctgattagactaaagagatatttcttctgggacagccgccttcttggtaattttgaagttctttttacaagttccttcctcagtttcagttctttccagtgttttgtagctcactgtcactcactgaatagagaaacgtgtgccctatacttcctgtgacaatcattttgctgacagaatgatggatgtttaaaatattgcacaaagtactttaaagaaaggtctgttaggaccagaagcagagacaccacttttcaaaggacttcttggtttcagcataacctaagacagggaattgggagccatcatatgtcacagtgttcagaattcaagcatatttaagggcattttctttgattctcaaagttcagcattcattttgaattgagaagcctatacatttagctgacaaagtgcttatagaatttcttaacaactgaaccattcaaaaggattttttttgtttaaaactggatttcaatgtaagcaaatgaagaaaaaaatatagatttcatttccatagcttcttatccctgtattgaggtaataaattgttttactgacaatttttcctttttctacactaaaacaatatgtgatatatttcccctcttgaagaggcaattcattaaactctcaaattttctatagaatcaagatagaacctttagatactccaactcaccaaaatgtaaaaaaactaacaaaaatatttggtcttcaataatgctaaatatctacatttttagaatttatcaacatttaactagataattgggcatgtcttaattatgcatgtacttatccatactaataaaattgacaatgctagtgcatacttattggtttagtcctattatcaggatataatcatctgtgaggaggatattttaaatactgtaaatgataacagttaatgatatacacatttagactgagttgcacactggcagggagaccaaaaacattacttccatacttgtgtcatgattcttttttttttgagagagtctcactctgtcgccaggctggagtacagtggcatgatctcggctcactgcaacctctgcctcccgggttcaagcaattctcctgcctcagccacccaagtagctgggactacaggtgcgtgccaccacgcccagctaaattttgtatttttagtggagacggggtttcaccatgttggccaggatggtctcaatctcctgaccctgcgatctgcccacctcagcctcccaaagtgctgggattacaggcgtaagccaccgggcctggcctgttttatgattcttaatagttacttggtttaaatcacatttgatactatccttctgaaaagtctgagacagatctacaaactacagtcaaaattatagattaagaggaatgaatgcacctatttggctttaagttgaagatgaattatttctcatgctcattttcttgcggcagttatcttagaaagacccccaaaggctttgtgattgtaagcactgtcatgatcacagaatgcaagcttctggtaccatgatcctcaacttagagaggaagaaaccaagacagagagcttaactcacttctctcagggaaaattaggagttgagcacaggacaggaaatgggctttgccacttttagctccaggcttttctaaccagacttgatttcctcatgttctagaaagatcactaatggtcaagtggaacaagcactacacgactaacccctattggggtttttaacttaagggaggctaatttttaatttaaactgctcgagatatgagttctgcaaaaggtggtccgcatccttggccctctggacattatcactaaattgcttgtgcctgttaacaagaatactgaccagaatgctcttcatgtagcttatacagttggttcacttcatgcggttcttgacatgtttatttctacccttaatgcaatgaaatgtttcattaataaaaaaccactttatat

SEQ ID NO: 437 - protein, 478 aa, Homo sapiens
MGRCCFYTAGTLSLLLLVTSVTLLVARVFQKAVDQSIEKKIVLRNGTEAFDSWEKPPLPVYTQFYFFNVTNPEEILRGETPRVEEVGPYTYRELRNKANIQFGDNGTTISAVSNKAYVFERDQSVGDPKIDLIRTLNIPVLTVIEWSQVHFLREIIEAMLKAYQQKLFVTHTVDELLWGYKDEILSLIHVFRPDISPYFGLFYEKNGTNDGDYVFLTGEDSYLNFTKIVEWNGKTSLDWWITDKCNMINGTDGDSFHPLITKDEVLYVFPSDFCRSVYITFSDYESVQGLPAFRYKVPAEILANTSDNAGFCIPEGNCLGSGVLNVSICKNGAPIIMSFPHFYQADERFVSAIEGMHPNQEDHETFVDINPLTGIILKAAKRFQINIYVKKLDDFVETGDIRTMVFPVMYLNESVHIDKETASRLKSMINTTLIITNIPYIIMALGVFFGLVFTWLACKGQGSMDEGTADERAPLIRT

SEQ ID NO: 438 - DNA, 4973 bp, Homo sapiens
cagctatcaaaaaggccataaggattttgtccccaaatttcacatgagctaccttgcttcaaactactgagatgaagggggcaagattatttgtccttctttctagtttatggagtgggggcattgggcttaacaacagtaagcattcttggactatacctgaggatgggaactctcagaagactatgccttctgcttcagttcctccaaataaaatacaaagtttgcaaatactgccaaccactcgggtcatgtcggcggagatagctacaactccagaggcaagaacttctgaagacagtcttcttaaatcaacactgcctccctcagaaacaagtgcacctgctgagggtgtgagaaatcaaactctcacatccacagagaaagcagaaggagtggtcaagttacagaatcttaccctcccaaccaacgctagcatcaagttcaatcctggagcagaatcagtggtcctttccaattctacactgaaatttcttcagagctttgccagaaagtcaaatgaacaagcaacttctctaaacacagttggaggcactggaggcattggaggcgttggaggcactggaggcgtgggaaatcgagccccacgggaaacatacctcagccggggtgacagcagttccagccaaagaactgactaccaaaaatcaaatttcgaaacaactagaggaaagaattggtgtgcttatgtacataccaggttatctcccacagtgatattggacaaccaggtcacttatgtcccaggtgggaaaggaccttgtggctggaccggtggatcctgtcctcagagatctcagaagatatccaatcctgtctataggatgcaacataaaattgtcacctcattggattggaggtgctgtcctggatacagtgggccgaaatgtcaactaagagcccaggaacagcaaagtttgatacacaccaaccaggctgaaagtcatacagctgttggcagaggagtagctgagcagcagcagcagcaaggctgtggtgacccagaagtgatgcaaaaaatgactgatcaggtgaactaccaggcaatgaaactgactcttctgcagaagaagattgacaatatttctttgactgtgaatgatgtaaggaacacttactcctccctagaaggaaaagtcagcgaagataaaagcagagaatttcaatctcttctaaaaggtctaaaatccaaaagcattaatgtactgataagagacatagtaagagaacaatttaaaatttttcaaaatgacatgcaagagactgtagcacagctcttcaagactgtatcaagtctatcagaggacctcgaaagcaccaggcaaataattcaaaaagttaatgaatctgtggtttcaatagcagcccagcaaaagtttgttttggtgcaagagaatcggcccactttgactgatatagtggaactaaggaatcacattgtgaatgtaaggcaagaaatgactcttacatgtgagaagcctattaaagaactagaagtaaagcagactcatttagaaggtgctctagaacaggaacactcaagaagcattctgtattatgaatccctcaataaaactctttctaaattgaaggaagtacatgagcagcttttatcaactgaacaggtatcagaccagaagaatgctccagctgctgagtcagttagcaataatgtcactgagtacatgtctactttacatgaaaatataaagaagcagagtttgatgatgctgcaaatgtttgaagatttgcacattcaagaaagcaagattaacaatctcaccgtctctttggagatggagaaagagtctctcagaggtgaatgtgaagacatgttatccaaatgcagaaatgattttaaatttcaacttaaggacacagaagagaatttacatgtgttaaatcaaacattggctgaagttctctttccaatggacaataagatggacaaaatgagtgagcaactaaatgatttgacttatgatatggagatccttcaacccttgcttgagcagggagcatcactcagacagacaatgacatatgaacaaccaaaggaagcaatagtgataaggaaaaagatagaaaatctgactagtgctgtcaatagtctaaattttattatcaaagaacttacaaaaagacacaacttacttagaaatgaagtacagggtcgtgatgatgccttagaaagacgtatcaatgaatatgccttagaaatggaagatggcctcaataagacaatgactattataaataatgctattgatttcattcaagataactatgccctaaaagagactttaagtactattaaggataatagtgagatccatcataaatgtacctccgatatggaaactattttgacatttattcctcagttccaccgtctgaatgattctattcagactttggtcaatgacaatcagagatataactttgttttgcaagtcgccaagacccttgcaggtattcccagagatgagaaactaaatcagtccaacttccaaaagatgtatcaaatgttcaatgaaaccacttcccaagtgagaaaataccagcaaaatatgagtcatttggaagaaaaactactcttaactaccaagatttccaaaaattttgagactcggttgcaagacattgagtctaaagttacccagacgctcataccttattatatttcagttaaaaaaggcagtgtagttacaaatgagagagatcaggctcttcaactgcaagtattaaattccagatttaaggcgttggaagcaaaatctatccatctttcaattaacttcttttcgcttaacaaaactctccacgaagttttaacaatgtgtcacaatgcttctacaagtgtgtcagaactgaatgctaccatccctaagtggataaaacattccctgccagatattcaacttcttcagaaaggtctaacagaatttgtggaaccaataattcaaataaaaactcaagctgccctatctaatttaacttgttgtatagatcgatcgttgcctggtagtctggcaaatgttgtcaagtctcagaagcaagtaaaatcattgccaaagaaaattaacgcacttaagaaaccaacggtaaatcttaccacagtcctgataggccggactcaaagaaacacggacaacataatatatcctgaggagtattcaagctgtagtcggcatccgtgccaaaatgggggcacgtgcataaatggaagaactagctttacctgtgcctgcagacatccttttactggtgacaactgcactatcaagcttgtggaagaaaatgctttagctccagatttttccaaaggatcttacagatatgcacccatggtggcattttttgcatctcatacgtatggaatgactatacctggtcctatcctgtttaataacttggatgtcaattatggagcttcatataccccaagaactggaaaatttagaattccgtatcttggagtatatgttttcaagtacaccatcgagtcatttagtgctcatatttctggatttttagtggttgatggaatagacaagcttgcatttgagtctgaaaatattaacagtgaaatacactgtgatagggttttaactggggatgccttattagaattaaattatgggcaggaagtctggttacgacttgcaaaaggaacaattccagccaagtttccccctgttactacatttagtggctatttattatatcgtacataagttagtatgaaaaacagactatcacctttattgagaaacagccagtgttttcatttatctttgcttgcacatctgctctgttttggtttttctacaggaaatgaaaatcaacttgtttttttaatatgagtaaacttgtatgtctattttataaaattatttgaatattgtttaatgtctgaatatgaaagagttcttgatcctaaagaaatttagtggcacagaaaacaaagtgaatttgttagcataattattcctattcttatttcttcattttaagtcattgcaatggaaagtaatattataaaatggtaattacaacatattatcagtcacagttttctttccaattaaacacttaacttttgttattccctgtatataaatatataacacacattttctagattcacaaatttaaataaattactcaaaaaatgaaaattgattttgtaaacttttatttttactctttacgttgagttgatcaattttccatactaagattttcattcagaatcaaaattaagaaagttggactgaaaatatgaaaaatgcttaactattgttctcttcctataattctctaattataacatagtaatttacatgtagttggacatgtacactcaagtctaagaatatatgagtggatcatttaccgccccccgccccacaacatctataaggggcaaaaagtctttttctaataagtattcttctatggtagtacctacagatctgcccttcttcttctaaagggtaagtcataatctgtgtaatactacaatttatgggatgctcactatgccctgtttctcttctaaacaatttacatgtaatgtctcattcctcacaataacccttgtaaagtgggcatgattaccatgatttttatagttgaagaacctaagacacagagaccaaggcccatgagctcatagggctgaggcaggatttggaatcaggccatgtcttctccagagcccacatccatcctttctctatattgcctcccacagatgtgctaaaatttatttaactaatcctttatcctctatttgtgttgtctcccattttttattattacaatattactgtggtgaacatgcttaaaaatacattccttggatatctgacaacgtgtttctgaaaaacagattttcataagtaataataaaaataataataaaaaagttttggtatggtaaaaaa

SEQ ID NO: 439 - protein, 1228 aa, Homo sapiens
MKGARLFVLLSSLWSGGIGLNNSKHSWTIPEDGNSQKTMPSASVPPNKIQSLQILPTTRVMSAEIATTPEARTSEDSLLKSTLPPSETSAPAEGVRNQTLTSTEKAEGVVKLQNLTLPTNASIKFNPGAESVVLSNSTLKFLQSFARKSNEQATSLNTVGGTGGIGGVGGTGGVGNRAPRETYLSRGDSSSSQRTDYQKSNFETTRGKNWCAYVHTRLSPTVILDNQVTYVPGGKGPCGWTGGSCPQRSQKISNPVYRMQHKIVTSLDWRCCPGYSGPKCQLRAQEQQSLIHTNQAESHTAVGRGVAEQQQQQGCGDPEVMQKMTDQVNYQAMKLTLLQKKIDNISLTVNDVRNTYSSLEGKVSEDKSREFQSLLKGLKSKSINVLIRDIVREQFKIFQNDMQETVAQLFKTVSSLSEDLESTRQIIQKVNESVVSIAAQQKFVLVQENRPTLTDIVELRNHIVNVRQEMTLTCEKPIKELEVKQTHLEGALEQEHSRSILYYESLNKTLSKLKEVHEQLLSTEQVSDQKNAPAAESVSNNVTEYMSTLHENIKKQSLMMLQMFEDLHIQESKINNLTVSLEMEKESLRGECEDMLSKCRNDFKFQLKDTEENLHVLNQTLAEVLFPMDNKMDKMSEQLNDLTYDMEILQPLLEQGASLRQTMTYEQPKEAIVIRKKIENLTSAVNSLNFIIKELTKRHNLLRNEVQGRDDALERRINEYALEMEDGLNKTMTIINNAIDFIQDNYALKETLSTIKDNSEIHHKCTSDMETILTFIPQFHRLNDSIQTLVNDNQRYNFVLQVAKTLAGIPRDEKLNQSNFQKMYQMFNETTSQVRKYQQNMSHLEEKLLLTTKISKNFETRLQDIESKVTQTLIPYYISVKKGSVVTNERDQALQLQVLNSRFKALEAKSIHLSINFFSLNKTLHEVLTMCHNASTSVSELNATIPKWIKHSLPDIQLLQKGLTEFVEPIIQIKTQAALSNLTCCIDRSLPGSLANVVKSQKQVKSLPKKINALKKPTVNLTTVLIGRTQRNTDNIIYPEEYSSCSRHPCQNGGTCINGRTSFTCACRHPFTGDNCTIKLVEENALAPDFSKGSYRYAPMVAFFASHTYGMTIPGPILFNNLDVNYGASYTPRTGKFRIPYLGVYVFKYTIESFSAHISGFLVVDGIDKLAFESENINSEIHCDRVLTGDALLELNYGQEVWLRLAKGTIPAKFPPVTTFSGYLLYRT

SEQ ID NO: 440 - DNA, 3971 bp, Homo sapiens
gttaccatcgagaccggggctgtgtatgctcgaggtgcagggagctaatgtataaggagttaaatgaactcttgctgctgccaaatatgttgttatcactaactgcaccgctgctgtcattagtgctgctgccaacactgcaagccctgctgctgccagtgccaattctgctgatgccttgggctctccatgtcccagggtgattccatagacaagcagctgcttttagatttcacttgctcattacctgtagatcctttgccttaggactcaagcttaagcccatgaagcctgggatagaagacaattggaggctgcaaagttggctttcacagtgcaagcctttgattcccaatgggggactcaggatcaagacgatctaccctggtctcccggttgccaatattcagaagaagtattaacagaagacatgattctcttccttcttcaccttcttccagtaatacagttggtgtccacagttcctctccttccagcactaactcaagctcaggtagcacaggtaaacggaggagcatattccgtactccttccattagcttccaccataagaaggggagtgagcctaagcaagagcctaccaaccagaaccttagtatttcaaatggtgctcaacctggtcacagcaatatgcagaaactgagtttggaagaacatattaagaccaggggaagacattctgttggttttagtagttcacgaaataagaagataacaagatctttgacagaggattttgaaagggaaaaagagcactcaactaacaagaatgtctttataaattgtctaagttctggcaaaagtgaaggggatgattctggtttcacagaagaccaaactcgtcgttctgttaagcagtcaacaaggaagctactccctaaatctttttcatctcactataaattttctaagccagttctacagagccaatccatttcattggtacaacagtctgaattctcattggaagttacacagtaccaagagagagaacctgtattagtaagagcttcgccatcctgttctgtggatgtaacagaacgggcaggaagctctttacaatctcctttgctttctgctgatcttaccacagctcagacaccttcagaatttttagccttgactgaagattctgtgtctgaaatggatgcattttctaaaagtggaagcatggcatcccactgtgacaactttggccacaatgattctacctctcagatgtccctcaattctgctgctgttacaaagacaacaacagaacttacgggaactgttccctgtgcaattatgtctcctgggaaatataggttagagggtcaatgtagcactgaatctaattcattaccggaaacctctgctgctaatcagaaggaagtgttattacaaattgctgaactacctgctacaagtgtgagccactcagagagtaacctaccagcagatagtgaaagagaagaaaatatagggttacaaaatggtgaaacaatgctggggacaaactccccaaggaaacttggattttatgagcaacataaagcaatagcggaacatgtaaaagggatccatcctatttcagattcaaagataatacctacttctggtgatcatcatatttttaacaaaacatcacatggatatgaagcaaatcctgccaaagttcttgccagtagtctcagtccatttcgtgaaggaagatttatagagaggagactgcgatcctcgtcagaaggcactgcagggagtagcagaatgattttgaaaccgaaagatggaaatatagaagaagttaatagtttaagaaagcaaagagcaggttcttcatcttcaaaaatgaacagtttggatgttttgaataatttgggatcttgtgaactggatgaagatgatctaatgcttgatcttgaatttttagaggaacagagtcttcacccttctgtttgccgggaggactcatatcactctgtcgtctcatgtgccgcagtagttcttactcctatggaaccaatgatagaaatgaagaaaagagaagaaccagaatttcctgagccttccaaacagaatctttccctgaaattaacaaaggacgttgatcaagaagccaggtgttcccacatcagccgaatgcccaacagtccatctgcggattggcctctacaaggtgtggaagaaaacggaggcatagattctctgccattcagactgatgttacaggactgcacggcagtcaagacgttattattaaagatgaagagagttcttcaagagagtgcagacatgagtccagcaagcagtaccacgtcacttcctgttagtcctcttactgaagagccagtgcctttcaagaccacataccctagggaattctgaaaacctgactaacatcaattgaagattggggttcaggaggcctagatgatccaccatgacttattcaaaagttgaagatgaaaggaaagaataaagactctttccatccagttctctagtctgaaaggaaaagaaataggcaaaggacagtaggcttttctatatcattatattcattcaaatgattctcttaaaataataatgaactaaggaggctctgtaagcaagacaaacggtcaggaggcctccttgctccaagaatactccctttttactttattaaaatggtttgtaaaggtaaactaaattgactaaagtatcaatatttccatatatgcgtgatcttttagagaccataaactgtcagtgtattaggctgttcttgcatggctataaagaaatacctgagactaggtgatttataagaaaaggggtataattggcccacagttctgcagactgtacaggaagcatagtagcatgtgcttctggggaggcctcaggaagcttccaatcgtggcggaaggcaaagggaagcaggcacattgcatggtgagaacagaaacaagaacaaggaagggtggctgggaggcgccacataattttaaattaccagatctcacaagaactcactatccggaagacagcacccagccatgagggatccaccctcatgattcaaacacctcccaccaagccccacctccagcactggggatcacaactcgacatgagatttgagcagagacaaatttccaaactatatcactcagaatctggaatagaaagagtatgcaccataacacttttattctctacagaaacagacactgtgctgagctcaaaaaatagtgattcatcaaatatgaatgtgcaaacctcttttgtactgtatctgtggaatcctggttactggggctttgagcccctgtcccataaaatctctgtaatactaacctaactcatggcatttctttaaaatcaaatttaatgaaatgatggacataaagcccatggaactgagtgtgtaatcttctcttatttgattagatgttaaacttgaaacacttttttttgataaaatatgaaatacataaatgagttaaattgttgtgactttccttataagattgaaaacaataaggtgtttttaatactttttttctgtgttctcttgaaagtagctttacatgtattaagcaatcctggctttagatattagggacaataaaaatttctgcaattttcccagttttatatagccattgtttgcaagtatgaaaacctgtcttttgttactgaaatattatcttttattttggcttttttgataacttttatgtttgccttgagcaagtcacttatcttttctatttgtgttttctatttcagtttatttatgaaagacagtaataatgattgtgatgtaccttacaaaaaaagataaaatcgtattgaagagactgttgaatatgaacgcagtgtattaaatgcccgatataggaacaaaaataaaatgaagaacatttctattaaaaaaaaaaaaaaaaaaaaaaaaaaaaaaaaagaaaaaaaaaaaaaaa

SEQ ID NO: 441 - protein, 677 aa, Homo sapiens
MGDSGSRRSTLVSRLPIFRRSINRRHDSLPSSPSSSNTVGVHSSSPSSTNSSSGSTGKRRSIFRTPSISFHHKKGSEPKQEPTNQNLSISNGAQPGHSNMQKLSLEEHIKTRGRHSVGFSSSRNKKITRSLTEDFEREKEHSTNKNVFINCLSSGKSEGDDSGFTEDQTRRSVKQSTRKLLPKSFSSHYKFSKPVLQSQSISLVQQSEFSLEVTQYQEREPVLVRASPSCSVDVTERAGSSLQSPLLSADLTTAQTPSEFLALTEDSVSEMDAFSKSGSMASHCDNFGHNDSTSQMSLNSAAVTKTTTELTGTVPCAIMSPGKYRLEGQCSTESNSLPETSAANQKEVLLQIAELPATSVSHSESNLPADSEREENIGLQNGETMLGTNSPRKLGFYEQHKAIAEHVKGIHPISDSKIIPTSGDHHIFNKTSHGYEANPAKVLASSLSPFREGRFIERRLRSSSEGTAGSSRMILKPKDGNIEEVNSLRKQRAGSSSSKMNSLDVLNNLGSCELDEDDLMLDLEFLEEQSLHPSVCREDSYHSVVSCAAVVLTPMEPMIEMKKREEPEFPEPSKQNLSLKLTKDVDQEARCSHISRMPNSPSADWPLQGVEENGGIDSLPFRLMLQDCTAVKTLLLKMKRVLQESADMSPASSTTSLPVSPLTEEPVPFKTTYPREF

SEQ ID NO: 442 - DNA, 1859 bp, Homo sapiens
ggaagtctatccgggctttcgcgtcaccaccctgcccacctgggtggcgcgtggcttacgcaacggtcactgggctcctgggccgctcccgggccagcgagggctgcgaaagaagttgtagcatgcataccacagaatcaaaaaatgaacatttggaggatgaaaacttccaaacatctacaactcctcagagtctcattgatcctaataatactgcacatgaagaaactaaaactgtcttatcagatacagaagaaataaaaccacagacaaaaaaggagacatacatttcttgtcctctaagaggagtattgaatgtaattattacaaatggagttatactgtttgtgatatggtgtatgacctggtcaatcttaggctctgaagctctccctggtggaaatttatttgggttgttcattattttttatagtgccattattgggggaaaaattttacaactcattagaatacctttagtgcctccacttccacctcttcttgggatgttactggctggttttacgattaggaatgttccattcatcaatgaacatgtccatgttcctaacacatggtcttcaattttaagaagcattgcccttaccattattctaataagagctgggcttggactcgatccacaggctttgaggcatttgaaggtcgtttgtttcagattggctgtaggtccatgccttatggaggcaagtgcagctgctgttttttcacacttcattatgaaatttccctggcaatgggcatttctattaggttttgttctaggtgctgtctctcctgctgttgttgtcccttacatgatggtgctgcaagaaaatggatatggtgttgaggaaggcattccaaccttattaatggctgctagcagtatggatgacattctggctatcactggattcaatacatgcttgagcatagtcttttcctcaggtggtatacttaataacgccatagcctctataaggaacgtatgtattagtctgctggcaggaattgttttgggattttttgttcgatattttccaagtgaagaccagaaaaaacttacattgaagagaggattccttgttttgactatgtgtgtttctgccgtcttaggcagccaacgtattggtttacatggatctggaggattatgcacactagtgttgagtttcattgcagggacaaaatggtcccaagaaaagatgaaagtccaaaagattattacgactgtatgggatatttttcaaccacttctttttggtttagttggagcagaagtatctgtttcatcgcttgaatcaaatattgttggcatatctgttgccactctaagtttggcattatgtgttcgaattttaaccacatatctattgatgtgctttgctggttttagttttaaggagaaaatatttattgctttagcatggatgcccaaagctacagtacaggctgtgttaggtcctctggctctagaaacagcaagagtctccgcaccccacttggaaccatatgcgaaggatgtgatgacagtagcatttttagccatcttgatcacagctccaaatggagctctacttatgggcattctggggcctaaaatgcttacacgccattatgatccaagcaaaataaaactgcagttgtcaacattagaacatcattaaaaagtttacctgtcatcatctgcctgcttcttttaatgaattatttcacatgacagaagaattttaaagtagaaatatgtggggactgtacagagaatccaggatttagtaaacatgtgatttcagtacagggcttttcttggactttttactccaaagttaatttaataaaaataatattaaatggaa

SEQ ID NO: 443 - protein, 515 aa, Homo sapiens
MHTTESKNEHLEDENFQTSTTPQSLIDPNNTAHEETKTVLSDTEEIKPQTKKETYISCPLRGVLNVIITNGVILFVIWCMTWSILGSEALPGGNLFGLFIIFYSAIIGGKILQLIRIPLVPPLPPLLGMLLAGFTIRNVPFINEHVHVPNTWSSILRSIALTIILIRAGLGLDPQALRHLKVVCFRLAVGPCLMEASAAAVFSHFIMKFPWQWAFLLGFVLGAVSPAVVVPYMMVLQENGYGVEEGIPTLLMAASSMDDILAITGFNTCLSIVFSSGGILNNAIASIRNVCISLLAGIVLGFFVRYFPSEDQKKLTLKRGFLVLTMCVSAVLGSQRIGLHGSGGLCTLVLSFIAGTKWSQEKMKVQKIITTVWDIFQPLLFGLVGAEVSVSSLESNIVGISVATLSLALCVRILTTYLLMCFAGFSFKEKIFIALAWMPKATVQAVLGPLALETARVSAPHLEPYAKDVMTVAFLAILITAPNGALLMGILGPKMLTRHYDPSKIKLQLSTLEHH

SEQ ID NO: 444 - DNA, 2447 bp, Homo sapiens
cggtgtctcgtcatctccgggaagactcggcgcctgggtccgcgctctctgggtaagctttccgggaagctttcccgggagctcgctggtcctggccccagaagcctgcggacccgcccagggaggataagcagctgaaagaccgcgcggtgccgctccgaggccccgggacgtgggcccatggtcggcctggcgccacctttccgggggaagccacgcgcaccaggcatcgcacgcggctctgcacccgcgccgccggacctgaaacccggcggagggcacacggggctgccgctgcgggccccggaccaacccatgcttactccggagcctgtaccggcgccgacgggtcggacctccctgcgcggtgtcgcccagcgggttcgtgcgaaaggcggggccgactacacgcggtgccgcgccctgagaccgtttatctgcagtcaacgcagcctcccggctcagcctgggaagatgcgcgaatcgggaaccccagagcgcggtggctagaccgggctccgccgcctcccccacagcccctttcctaatcgttcagacggagcctggtcgacttcgccggagactgccagatctcgttcctcttccctgtgtcatcttcttaattataaataatgggggatgaagataaaagaattacatatgaagattcagaaccatccacaggaatgaattacacgccctccatgcatcaagaagcacaggaggagacagttatgaagctcaaaggtatagatgcaaatgaaccaacagaaggaagtattcttttgaaaagcagtgaaaaaaagctacaagaaacaccaactgaagcaaatcacgtacaaagactgagacaaatgctggcttgccctccacatggtttactggacagggtcataacaaatgttaccatcattgttcttctgtgggctgtagtttggtcaattactggcagtgaatgtcttcctggaggaaacctatttggaattataatcctattctattgtgccatcattggtggtaaacttttggggcttattaagttacctacattgcctccactgccttctcttcttggcatgctgcttgcagggtttctcatcagaaatatcccagtcatcaacgataatgtgcagatcaagcacaagtggtcttcctctttgagaagcatagccctgtctatcattctggttcgtgctggccttggtctggattcaaaggccctgaagaagttaaagggcgtttgtgtaagactgtccatgggtccctgtattgtggaggcgtgcacatctgctcttcttgcccattacctgctgggtttaccatggcaatggggatttatactgggttttgttttaggtgctgtatctccagctgttgtggtgccttcaatgctccttttgcagggaggaggctatggtgttgagaagggtgtcccaaccttgctcatggcagctggcagcttcgatgacattctggccatcactggcttcaacacatgcttgggcatagccttttccacaggctctactgtctttaatgtcctcagaggagttttggaggtggtaattggtgtggcaactggatctgttcttggatttttcattcagtactttccaagccgtgaccaggacaaacttgtgtgtaagagaacattccttgtgttggggttgtctgtgctagctgtgttcagcagtgtgcattttggtttccctggatcaggaggactgtgcacgttggtcatggctttccttgcaggcatgggatggaccagcgaaaaggcagaggttgaaaagataattgcagttgcctgggacatttttcagccccttctttttggactaattggagcagaggtatctattgcatctctcagaccagaaactgtaggcctttgtgttgccaccgtaggcattgcagtattgatacgaattttgactacatttctgatggtgtgttttgctggttttaacttaaaagaaaagatatttatttcttttgcatggcttccaaaggccacagttcaggctgcaataggatctgtggctttggacacagcaaggtcacatggagagaaacaattagaggactatggaatggatgtgttgacagtggcatttttgtccatcctcatcacagccccaattggaagtctgcttattggtttactgggccccaggcttctgcagaaagttgaacatcaaaataaagatgaagaagttcaaggagagacttctgtgcaagtttagaggtgaaaagagagagtgctgaacataatgtttagaaagctgctacttttttcaagatgcatattgaaatatgtaatgtttaagcttaaaatgtaatagaaccaaaagtgtagctgtttctttaaacagcatttttagcccttgctctttccatgtgggtggtaatgattctatatccccaaaaaaaaaaaaaaaaaaaaa

SEQ ID NO: 445 - protein, 537 aa, Homo sapiens
MGDEDKRITYEDSEPSTGMNYTPSMHQEAQEETVMKLKGIDANEPTEGSILLKSSEKKLQETPTEANHVQRLRQMLACPPHGLLDRVITNVTIIVLLWAVVWSITGSECLPGGNLFGIIILFYCAIIGGKLLGLIKLPTLPPLPSLLGMLLAGFLIRNIPVINDNVQIKHKWSSSLRSIALSIILVRAGLGLDSKALKKLKGVCVRLSMGPCIVEACTSALLAHYLLGLPWQWGFILGFVLGAVSPAVVVPSMLLLQGGGYGVEKGVPTLLMAAGSFDDILAITGFNTCLGIAFSTGSTVFNVLRGVLEVVIGVATGSVLGFFIQYFPSRDQDKLVCKRTFLVLGLSVLAVFSSVHFGFPGSGGLCTLVMAFLAGMGWTSEKAEVEKIIAVAWDIFQPLLFGLIGAEVSIASLRPETVGLCVATVGIAVLIRILTTFLMVCFAGFNLKEKIFISFAWLPKATVQAAIGSVALDTARSHGEKQLEDYGMDVLTVAFLSILITAPIGSLLIGLLGPRLLQKVEHQNKDEEVQGETSVQV

SEQ ID NO: 446 - DNA, 2936 bp, Homo sapiens
cgcttgacttgcttccagacaaaggttgtctcaagtttgttgctcaaaccgagttctggagaacgccatcagctcgctgcttaaaattaaaccacaggttccattatgggtcgacttgatgggaaagtcatcatcctgacggccgctgctcaggggattggccaagcagctgccttagcttttgcaagagaaggtgccaaagtcatagccacagacattaatgagtccaaacttcaggaactggaaaagtacccgggtattcaaactcgtgtccttgatgtcacaaagaagaaacaaattgatcagtttgccaatgaagttgagagacttgatgttctctttaatgttgctggttttgtccatcatggaactgtcctggattgtgaggagaaagactgggacttctcgatgaatctcaatgtgcgcagcatgtacctgatgatcaaggcattccttcctaaaatgcttgctcagaaatctggcaatattatcaacatgtcttctgtggcttccagcgtcaaaggagttgtgaacagatgtgtgtacagcacaaccaaggcagccgtgattggcctcacaaaatctgtggctgcagatttcatccagcagggcatcaggtgcaactgtgtgtgcccaggaacagttgatacgccatctctacaagaaagaatacaagccagaggaaatcctgaagaggcacggaatgatttcctgaagagacaaaagacgggaagattcgcaactgcagaagaaatagccatgctctgcgtgtatttggcttctgatgaatctgcttatgtaactggtaaccctgtcatcattgatggaggctggagcttgtgattttaggatctccatggtgggaaggaaggcaggcccttcctatccacagtgaacctggttacgaagaaaactcaccaatcatctccttcctgttaatcacatgttaatgaaaataagctctttttaatgatgtcactgtttgcaagagtctgattctttaagtatattaatctctttgtaatctcttctgaaatcattgtaaagaaataaaaatattgaactcatagcaggagaatagtttttaaaataaatctcgatttgttagcatctgtcttagtcactttgggctgctataacaaattaccatagatggagtgtcatagacaacaaacatttatttttcagtctggaggctaggaagtgcaagataaaggtgccagcagatatagtttctggttagggcccacttcctggtttgcagatggtcctcttcttgctgtatcctcacatagcaagagcagagaaaaaaagcgagcgctcatgtgtctttttataaggacactaatcctgttcatgagggcactacccttatgacctgattacctcccaaaggccccacctcctaatgtatcatattgcaggttaggatgtcaacacatgactctggggtgatacaaataggccattgcagcatatacaattaaaatgtaaatatgaagaaaaaaggaagtttttgtttttttgtgggggagatgggggttaaggaagaagatagtaatttcaggactaggcatggtagctcatgcctataattcctgcactttgggaggccaaggcaggaggatcacttgcggccaggagttcaggaccagcatggttaacagaggctaaggcaggaggattacttgagcccaagagtttgaggctgcagtgagctgtaatcatgccactgcactccagggtgacagagcaagaccctgtacctaaataataataataatttccacttcatttttcaatattcaaatatttttatataattctgcattgttctgtatgtagatcctaattttaaaattttacaccatcataaatgaacaaaggtaggaaggagtttggcttcaatagcttacagtaaaaggagtaaaggagttcagcctcaaaacgatattgttgacctgttatgttatgaaaaataatccagtgtttatacttaacggatgccatcccttattatttactattttcttagtctaactaaacaatctttattaaaataagcaatgatatttgacatgggcctaagaaatatatagttagctaacaatattgtcagttagagggatttcttttctaaattaagtacagatttcttcaccaaactccaggataacagaaaagaggacataaaatttggacatagtttctggataaataaatgtaaatttaaatataaattatgtaacaggaaacaaacgaaattaaagaaaataaatttttcaagaaaagtaaatttatggatgttaattctgtaacattgtcagggcaaagttttttgtttttattttaatttaagggttttatgtttgttttttacttgttgcaacctcaaatgaccaaatggtatgatgcacactgagatactcaataaatgtgcagtgattcttagccttttttcctagaactttaatattaacatggaaaattctgaaatggacaacaaaaagataacactttgtgtatggggaagaatatcatgcagttgatgacggtacattaaaattcacacaaaaggacattttgactagcattcagaaagagtccattgattataagattatctatgaggttttggaccgggcactacactaccgaattatggctaactttggtttgtgatctagaccaagtcacccaatctatcttggattttagttttctggtttatgaaattaaggagttaagctaaatgacttgggtttcttttcgtgtatcataatcaaaatgctgtaacttctctagtgaattcatagaacactgactcttacaagtatgtcatgaaatactttatgctgtgagcaggtatacatgtataatatatgtatagctatgaacaaataaattttaaataaatgcaaaaaaaaaaaaaaaaa

SEQ ID NO: 447 - protein, 245 aa, Homo sapiens
MGRLDGKVIILTAAAQGIGQAAALAFAREGAKVIATDINESKLQELEKYPGIQTRVLDVTKKKQIDQFANEVERLDVLFNVAGFVHHGTVLDCEEKDWDFSMNLNVRSMYLMIKAFLPKMLAQKSGNIINMSSVASSVKGVVNRCVYSTTKAAVIGLTKSVAADFIQQGIRCNCVCPGTVDTPSLQERIQARGNPEEARNDFLKRQKTGRFATAEEIAMLCVYLASDESAYVTGNPVIIDGGWSL

SEQ ID NO: 448 - DNA, 8630 bp, Homo sapiens
taaatttaaaggcggggcggcctgtgagccctgaagtgccggccgcggagggtcctggccattttcctgggaccagttcagcctgataggatggcggaggaaggagccgtggccgtctgcgtgcgagtgcggccgctgaacagcagagaagaatcacttggagaaactgcccaagtttactggaaaactgacaataatgtcatttatcaagttgatggaagtaaatccttcaattttgatcgtgtctttcatggtaatgaaactaccaaaaatgtgtatgaagaaatagcagcaccaatcatcgattctgccatacaaggctacaatggtactatatttgcctatggacagactgcttcaggaaaaacatataccatgatgggttcagaagatcatttgggagttatacccagggcaattcatgacattttccaaaaaattaagaagtttcctgatagggaatttctcttacgtgtatcttacatggaaatatacaatgaaaccattacagatttactctgtggcactcaaaaaatgaaacctttaattattcgagaagatgtcaataggaatgtgtatgttgctgatctcacagaagaagttgtatatacatcagaaatggctttgaaatggattacaaagggagaaaagagcaggcattatggagaaacaaaaatgaatcaaagaagcagtcgttctcataccatctttaggatgattttggaaagcagagagaagggtgaaccttctaattgtgaaggatctgttaaggtatcccatttgaatttggttgatcttgcaggcagtgaaagagctgctcaaacaggcgctgcaggtgtgcggctcaaggaaggctgtaatataaatcgaagcttatttattttgggacaagtgatcaagaaacttagtgatggacaagttggtggtttcataaattatcgagatagcaagttaacacgaattctccagaattccttgggaggaaatgcaaagacacgtattatctgcacaattactccagtatcttttgatgaaacacttactgctctccagtttgccagtactgctaaatatatgaagaatactccttatgttaatgaggtatcaactgatgaagctctcctgaaaaggtatagaaaagaaataatggatcttaaaaaacaattagaggaggtttctttagagacgcgggctcaggcaatggaaaaagaccaattggcccaacttttggaagaaaaagatttgcttcagaaagtacagaatgagaaaattgaaaacttaacacggatgctggtgacctcttcttccctcacgttgcaacaggaattaaaggctaaaagaaaacgaagagttacttggtgccttggcaaaattaacaaaatgaagaactcaaactatgcagatcaatttaatataccaacaaatataacaacaaaaacacataagctttctataaatttattacgagaaattgatgaatctgtctgttcagagtctgatgttttcagtaacactcttgatacattaagtgagatagaatggaatccagcaacaaagctactaaatcaggagaatatagaaagtgagttgaactcacttcgtgctgactatgataatctggtattagactatgaacaactacgaacagaaaaagaagaaatggaattgaaattaaaagaaaagaatgatttggatgaatttgaggctctagaaagaaaaactaaaaaagatcaagagatgcaactaattcatgaaatttcgaacttaaagaatttagttaagcatgcagaagtatataatcaagatcttgagaatgaactcagttcaaaagtagagctgcttagagaaaaggaagaccagattaagaagctacaggaatacatagactctcaaaagctagaaaatataaaaatggacttgtcatactcattggaaagcattgaagacccaaaacaaatgaagcagactctgtttgatgctgaaactgtagcccttgatgccaagagagaatcagcctttcttagaagtgaaaatctggagctgaaggagaaaatgaaagaacttgcaactacatacaagcaaatggaaaatgatattcagttatatcaaagccagttggaggcaaaaaagaaaatgcaagttgatctggagaaagaattacaatctgcttttaatgagataacaaaactcacctcccttatagatggcaaagttccaaaagatttgctctgtaatttggaattggaaggaaagattactgatcttcagaaagaactaaataaagaagttgaagaaaatgaagctttgcgggaagaagtcattttgctttcagaattgaaatctttaccttctgaagtagaaaggctgaggaaagagatacaagacaaatctgaagagctccatataataacatcagaaaaagataaattgttttctgaagtagttcataaggagagtagagttcaaggtttacttgaagaaattgggaaaacaaaagatgacctagcaactacacagtcgaattataaaagcactgatcaagaattccaaaatttcaaaacccttcatatggactttgagcaaaagtataagatggtccttgaggagaatgagagaatgaatcaggaaatagttaatctctctaaagaagcccaaaaatttgattcgagtttgggtgctttgaagaccgagctttcttacaagacccaagaacttcaggagaaaacacgtgaggttcaagaaagactaaatgagatggaacagctgaaggaacaattagaaaatagagattctacgctgcaaactgtagaaagggagaaaacactgattactgagaaactgcagcaaactttagaagaagtaaaaactttaactcaagaaaaagatgatctaaaacaactccaagaaagcttgcaaattgagagggaccaactcaaaagtgatattcacgatactgttaacatgaatatagatactcaagaacaattacgaaatgctcttgagtctctgaaacaacatcaagaaacaattaatacactaaaatcgaaaatttctgaggaagtttccaggaatttgcatatggaggaaaatacaggagaaactaaagatgaatttcagcaaaagatggttggcatagataaaaaacaggatttggaagctaaaaatacccaaacactaactgcagatgttaaggataatgagataattgagcaacaaaggaagatattttctttaatacaggagaaaaatgaactccaacaaatgttagagagtgttatagcagaaaaggaacaattgaagactgacctaaaggaaaatattgaaatgaccattgaaaaccaggaagaattaagacttcttggggatgaacttaaaaagcaacaagagatagttgcacaagaaaagaaccatgccataaagaaagaaggagagctttctaggacctgtgacagactggcagaagttgaagaaaaactaaaggaaaagagccagcaactccaagaaaaacagcaacaacttcttaatgtacaagaagagatgagtgagatgcagaaaaagattaatgaaatagagaatttaaagaatgaattaaagaacaaagaattgacattggaacatatggaaacagagaggcttgagttggctcagaaacttaatgaaaattatgaggaagtgaaatctataaccaaagaaagaaaagttctaaaggaattacagaagtcatttgaaacagagagagaccaccttagaggatatataagagaaattgaagctacaggcctacaaaccaaagaagaactaaaaattgctcatattcacctaaaagaacaccaagaaactattgatgaactaagaagaagcgtatctgagaagacagctcaaataataaatactcaggacttagaaaaatcccataccaaattacaagaagagatcccagtgcttcatgaggaacaagagttactgcctaatgtgaaagaagtcagtgagactcaggaaacaatgaatgaactggagttattaacagaacagtccacaaccaaggactcaacaacactggcaagaatagaaatggaaaggctcaggttgaatgaaaaatttcaagaaagtcaggaagagataaaatctctaaccaaggaaagagacaaccttaaaacgataaaagaagcccttgaagttaaacatgaccagctgaaagaacatattagagaaactttggctaaaatccaggagtctcaaagcaaacaagaacagtccttaaatatgaaagaaaaagacaatgaaactaccaaaatcgtgagtgagatggagcaattcaaacccaaagattcagcactactaaggatagaaatagaaatgctcggattgtccaaaagacttcaagaaagtcatgatgaaatgaaatctgtagctaaggagaaagatgacctacagaggctgcaagaagttcttcaatctgaaagtgaccagctcaaagaaaacataaaagaaattgtagctaaacacctggaaactgaagaggaacttaaagttgctcattgttgcctgaaagaacaagaggaaactattaatgagttaagagtgaatctttcagagaaggaaactgaaatatcaaccattcaaaagcagttagaagcaatcaatgataaattacagaacaagatccaagagatttatgagaaagaggaacaatttaatataaaacaaattagtgaggttcaggaaaaagtgaatgaactgaaacaattcaaggagcatcgcaaagccaaggattcagcactacaaagtatagaaagtaagatgctcgagttgaccaacagacttcaagaaagtcaagaagaaatacaaattatgattaaggaaaaagaggaaatgaaaagagtacaggaggcccttcagatagagagagaccaactgaaagaaaacactaaagaaattgtagctaaaatgaaagaatctcaagaaaaagaatatcagtttcttaagatgacagctgtcaatgagactcaggagaaaatgtgtgaaatagaacacttgaaggagcaatttgagacccagaagttaaacctggaaaacatagaaacggagaatataaggttgactcagatactacatgaaaaccttgaagaaatgagatctgtaacaaaagaaagagatgaccttaggagtgtggaggagactctcaaagtagagagagaccagctcaaggaaaaccttagagaaactataactagagacctagaaaaacaagaggagctaaaaattgttcacatgcatctgaaggagcaccaagaaactattgataaactaagagggattgtttcagagaaaacaaatgaaatatcaaatatgcaaaaggacttagaacactcaaatgatgccttaaaagcacaggatctgaaaatacaagaggaactaagaattgctcacatgcatctgaaagagcagcaggaaactattgacaaactcagaggaattgtttctgagaagacagataaactatcaaatatgcaaaaagatttagaaaattcaaatgctaaattacaagaaaagattcaagaacttaaggcaaatgaacatcaacttattacgttaaaaaaagatgtcaatgagacacagaaaaaagtgtctgaaatggagcaactaaagaaacaaataaaagaccaaagcttaactctgagtaaattagaaatagagaatttaaatttggctcagaaacttcatgaaaaccttgaagaaatgaaatctgtaatgaaagaaagagataatctaagaagagtagaggagacactcaaactggagagagaccaactcaaggaaagcctgcaagaaaccaaagctagagatctggaaatacaacaggaactaaaaactgctcgtatgctatcaaaagaacacaaagaaactgttgataaacttagagaaaaaatttcagaaaagacaattcaaatttcagacattcaaaaggatttagataaatcaaaagatgaattacagaaaaagatccaagaacttcagaaaaaagaacttcaactgcttagagtgaaagaagatgtcaatatgagtcataaaaaaattaatgaaatggaacagttgaagaagcaatttgaggcccaaaacttatctatgcaaagtgtgagaatggataacttccagttgactaagaaacttcatgaaagccttgaagaaataagaattgtagctaaagaaagagatgagctaaggaggataaaagaatctctcaaaatggaaagggaccaattcatagcaaccttaagggaaatgatagctagagaccgacagaaccaccaagtaaaacctgaaaaaaggttactaagtgatggacaacagcaccttacggaaagcctgagagaaaagtgctctagaataaaagagcttttgaagagatactcagagatggatgatcattatgagtgcttgaatagattgtctcttgacttggagaaggaaattgaattccaaaaagagctttcaatgagagttaaagcaaacctctcacttccctatttacaaaccaaacacattgaaaaactttttactgcaaaccagagatgctccatggaattccacagaatcatgaagaaactgaagtatgtgttaagctatgttacaaaaataaaagaagaacaacatgaatccatcaataaatttgaaatggattttattgatgaagtggaaaagcaaaaggaattgctaattaaaatacagcaccttcaacaagattgtgatgtaccatccagagaattaagggatctcaaattgaaccagaatatggatctacatattgaggaaattctcaaagatttctcagaaagtgagttccctagcataaagactgaatttcaacaagtactaagtaataggaaagaaatgacacagtttttggaagagtggttaaatactcgttttgatatagaaaagcttaaaaatggcatccagaaagaaaatgataggatttgtcaagtgaataacttctttaataacagaataattgccataatgaatgaatcaacagagtttgaggaaagaagtgctaccatatccaaagagtgggaacaggacctgaaatcactgaaagagaaaaatgaaaaactatttaaaaactaccaaacattgaagacttccttggcatctggtgcccaggttaatcctaccacacaagacaataagaatcctcatgttacatcaagagctacacagttaaccacagagaaaattcgagagctggaaaattcactgcatgaagctaaagaaagtgctatgcataaggaaagcaagattataaagatgcagaaagaacttgaggtgactaatgacataatagcaaaacttcaagccaaagttcatgaatcaaataaatgccttgaaaaaacaaaagagacaattcaagtacttcaggacaaagttgctttaggagctaagccatataaagaagaaattgaagatctcaaaatgaagcttgtgaaaatagacctagagaaaatgaaaaatgccaaagaatttgaaaaggaaatcagtgctacaaaagccactgtagaatatcaaaaggaagttataaggctattgagagaaaatctcagaagaagtcaacaggcccaagatacctcagtgatatcagaacatactgatcctcagccttcaaataaacccttaacttgtggaggtggcagcggcattgtacaaaacacaaaagctcttattttgaaaagtgaacatataaggctagaaaaagaaatttctaagttaaagcagcaaaatgaacagctaataaaacaaaagaatgaattgttaagcaataatcagcatctttccaatgaggtcaaaacttggaaggaaagaacccttaaaagagaggctcacaaacaagtaacttgtgagaattctccaaagtctcctaaagtgactggaacagcttctaaaaagaaacaaattacaccctctcaatgcaaggaacggaatttacaagatcctgtgccaaaggaatcaccaaaatcttgtttttttgatagccgatcaaagtctttaccatcacctcatccagttcgctattttgataactcaagtttaggcctttgtccagaggtgcaaaatgcaggagcagagagtgtggattctcagccaggtccttggcacgcctcctcaggcaaggatgtgcctgagtgcaaaactcagtagactcctctttgtcacttctctggagatccagcattccttatttggaaatgactttgtttatgtgtctatccctggtaatgatgttgtagtgcagcttaatttcaattcagtctttactttgccactagagttgaaagataagggaacaggaaatgaatgcattgtggtaatttagaatggtgatagcaataccttcttcttgcatatggtaatacttttaaaagttgaattgttttatttatttgtatattttgtaaagaataaagttattgaaagaaatgtaaagttatctacatgacttagcatattccaaagcataatacatacattaatataaaacatcattttattaacaaaattgtaaatgtttttaataccttacacattcaataaatgtttagtagttctgaatcaccaaaaaaaaaaaaaaaaaa

SEQ ID NO: 449 - protein, 2701 aa, Homo sapiens
MAEEGAVAVCVRVRPLNSREESLGETAQVYWKTDNNVIYQVDGSKSFNFDRVFHGNETTKNVYEEIAAPIIDSAIQGYNGTIFAYGQTASGKTYTMMGSEDHLGVIPRAIHDIFQKIKKFPDREFLLRVSYMEIYNETITDLLCGTQKMKPLIIREDVNRNVYVADLTEEVVYTSEMALKWITKGEKSRHYGETKMNQRSSRSHTIFRMILESREKGEPSNCEGSVKVSHLNLVDLAGSERAAQTGAAGVRLKEGCNINRSLFILGQVIKKLSDGQVGGFINYRDSKLTRILQNSLGGNAKTRIICTITPVSFDETLTALQFASTAKYMKNTPYVNEVSTDEALLKRYRKEIMDLKKQLEEVSLETRAQAMEKDQLAQLLEEKDLLQKVQNEKIENLTRMLVTSSSLTLQQELKAKRKRRVTWCLGKINKMKNSNYADQFNIPTNITTKTHKLSINLLREIDESVCSESDVFSNTLDTLSEIEWNPATKLLNQENIESELNSLRADYDNLVLDYEQLRTEKEEMELKLKEKNDLDEFEALERKTKKDQEMQLIHEISNLKNLVKHAEVYNQDLENELSSKVELLREKEDQIKKLQEYIDSQKLENIKMDLSYSLESIEDPKQMKQTLFDAETVALDAKRESAFLRSENLELKEKMKELATTYKQMENDIQLYQSQLEAKKKMQVDLEKELQSAFNEITKLTSLIDGKVPKDLLCNLELEGKITDLQKELNKEVEENEALREEVILLSELKSLPSEVERLRKEIQDKSEELHIITSEKDKLFSEVVHKESRVQGLLEEIGKTKDDLATTQSNYKSTDQEFQNFKTLHMDFEQKYKMVLEENERMNQEIVNLSKEAQKFDSSLGALKTELSYKTQELQEKTREVQERLNEMEQLKEQLENRDSTLQTVEREKTLITEKLQQTLEEVKTLTQEKDDLKQLQESLQIERDQLKSDIHDTVNMNIDTQEQLRNALESLKQHQETINTLKSKISEEVSRNLHMEENTGETKDEFQQKMVGIDKKQDLEAKNTQTLTADVKDNEIIEQQRKIFSLIQEKNELQQMLESVIAEKEQLKTDLKENIEMTIENQEELRLLGDELKKQQEIVAQEKNHAIKKEGELSRTCDRLAEVEEKLKEKSQQLQEKQQQLLNVQEEMSEMQKKINEIENLKNELKNKELTLEHMETERLELAQKLNENYEEVKSITKERKVLKELQKSFETERDHLRGYIREIEATGLQTKEELKIAHIHLKEHQETIDELRRSVSEKTAQIINTQDLEKSHTKLQEEIPVLHEEQELLPNVKEVSETQETMNELELLTEQSTTKDSTTLARIEMERLRLNEKFQESQEEIKSLTKERDNLKTIKEALEVKHDQLKEHIRETLAKIQESQSKQEQSLNMKEKDNETTKIVSEMEQFKPKDSALLRIEIEMLGLSKRLQESHDEMKSVAKEKDDLQRLQEVLQSESDQLKENIKEIVAKHLETEEELKVAHCCLKEQEETINELRVNLSEKETEISTIQKQLEAINDKLQNKIQEIYEKEEQFNIKQISEVQEKVNELKQFKEHRKAKDSALQSIESKMLELTNRLQESQEEIQIMIKEKEEMKRVQEALQIERDQLKENTKEIVAKMKESQEKEYQFLKMTAVNETQEKMCEIEHLKEQFETQKLNLENIETENIRLTQILHENLEEMRSVTKERDDLRSVEETLKVERDQLKENLRETITRDLEKQEELKIVHMHLKEHQETIDKLRGIVSEKTNEISNMQKDLEHSNDALKAQDLKIQEELRIAHMHLKEQQETIDKLRGIVSEKTDKLSNMQKDLENSNAKLQEKIQELKANEHQLITLKKDVNETQKKVSEMEQLKKQIKDQSLTLSKLEIENLNLAQKLHENLEEMKSVMKERDNLRRVEETLKLERDQLKESLQETKARDLEIQQELKTARMLSKEHKETVDKLREKISEKTIQISDIQKDLDKSKDELQKKIQELQKKELQLLRVKEDVNMSHKKINEMEQLKKQFEAQNLSMQSVRMDNFQLTKKLHESLEEIRIVAKERDELRRIKESLKMERDQFIATLREMIARDRQNHQVKPEKRLLSDGQQHLTESLREKCSRIKELLKRYSEMDDHYECLNRLSLDLEKEIEFQKELSMRVKANLSLPYLQTKHIEKLFTANQRCSMEFHRIMKKLKYVLSYVTKIKEEQHESINKFEMDFIDEVEKQKELLIKIQHLQQDCDVPSRELRDLKLNQNMDLHIEEILKDFSESEFPSIKTEFQQVLSNRKEMTQFLEEWLNTRFDIEKLKNGIQKENDRICQVNNFFNNRIIAIMNESTEFEERSATISKEWEQDLKSLKEKNEKLFKNYQTLKTSLASGAQVNPTTQDNKNPHVTSRATQLTTEKIRELENSLHEAKESAMHKESKIIKMQKELEVTNDIIAKLQAKVHESNKCLEKTKETIQVLQDKVALGAKPYKEEIEDLKMKLVKIDLEKMKNAKEFEKEISATKATVEYQKEVIRLLRENLRRSQQAQDTSVISEHTDPQPSNKPLTCGGGSGIVQNTKALILKSEHIRLEKEISKLKQQNEQLIKQKNELLSNNQHLSNEVKTWKERTLKREAHKQVTCENSPKSPKVTGTASKKKQITPSQCKERNLQDPVPKESPKSCFFDSRSKSLPSPHPVRYFDNSSLGLCPEVQNAGAESVDSQPGPWHASSGKDVPECKTQ

SEQ ID NO: 450 - DNA, 5004 bp, Homo sapiens
gttttatatttaactcgctgcagtgcaggaggggtaggggtggagatgcgtcgtttataaggggagctgtgacaatcttcttgccagccctcttcctcccactcggctcctcttacggagtcctcattccaccccccttgtttccgcattcatcctgagtggctggtgggaacgtgaaaagggagaggaaaaggcgcaagaagccagagagaggggtgtgggaaaagcgaaaacaggctgccaaatcaggggattccttccaatttaaaaaggaagtctgctgacgttagttagttaaatttaacatctttttatgtgtaacacttgactttggaagcaaaaatgaactttgcggagagagagggctctaagagatactgcattcaaacgaaacatgtggccattctctgtgcggtggtggtgggtgtaggattaatagtgggacttgccgtgggcttgaccagatcgtgtgactccagcggggacggcgggccgggcactgcgccagctccttcccacctgccttcttccacggccagcccctcaggtcctcctgcccaggaccaggacatctgcccggccagtgaggatgagagcggacagtggaaaaactttcgactgccggacttcgtcaacccagtccactacgacctgcacgtgaagcccctgttggaggaggacacctacacgggcaccgtgagcatctccatcaacctgagcgctcccacccggtacctgtggctgcacctccgggagaccaggatcacccggctcccggagctgaagaggccctctggggaccaggtgcaagtccggaggtgtttcgagtacaaaaagcaggagtacgtggtggtcgaggcggaggaagagcttacccccagcagtggagatggcctgtatctcctgaccatggagttcgccggctggctgaacggctccctcgtgggattttatagaaccacctacacggagaacggacaagtcaagagcatagtggccaccgatcatgaaccaacagatgccaggaaatcttttccttgttttgatgagcccaacaaaaaggcaacttatacaatatctatcacccatcccaaagaatacggagcactttcaaatatgccagtggcgaaagaagagtcagtggatgataaatggactcgaacaacttttgagaagtctgtccccatgagcacgtacctggtgtgctttgctgtacatcaatttgactctgtaaagagaatatcaaatagtggaaaacctcttacaatttatgtccagccagagcaaaagcacacagccgaatatgctgcaaacataactaaaagtgtgtttgattattttgaagaatactttgctatgaattattctcttcctaaattagataaaatcgctattccagattttggcactggtgccatggagaactggggactcatcacgtacagagaaacgaacctgctttatgaccctaaggaatcagcctcatcaaaccaacagagggtggccactgtggttgcccatgaacttgtgcatcagtggtttggaaatattgtgaccatggactggtgggaagacttgtggctaaatgaaggatttgcttctttctttgagtttctgggagtaaaccatgcagaaacagactggcaaatgcgtgaccaaatgttacttgaagatgtattacctgttcaagaggatgattctttgatgtcttcgcatccaattattgtgactgtgacaacccctgatgaaataacatctgtttttgatggaatatcctatagcaagggatcttctattttgagaatgcttgaagactggataaaaccagagaattttcaaaaaggatgtcagatgtacttggaaaaataccaattcaagaatgcaaaaacttctgatttttgggcagcactggaagaggcaagtaggctaccagtgaaagaagtaatggacacctggaccagacagatgggttatcctgtgcttaacgtgaacggtgtcaagaacatcacacagaaacgctttttgttggacccaagagctaacccttctcagcccccttcagatcttggttatacatggaatatcccagttaaatggactgaagataatataacaagcagtgtgttatttaataggtcagaaaaagaaggaatcactttgaactcctctaatcctagtggaaatgcttttctcaaaataaacccagatcatattgggttttatcgtgtaaattatgaagtagcaacttgggactcgatagctacagcgctctccttgaaccacaagacattttcttcagcagatcgtgcaagtcttattgatgatgcttttgccttggcaagagctcaacttctagattataaggtggctttgaacttgaccaagtatctcaaaagggaagagaattttttaccatggcagagagtaatttcagctgtaacctacatcattagcatgtttgaagatgataaagagctatatcctatgattgaggaatacttccaaggtcaagtgaagcctattgcagattctctgggatggaatgatgctggagaccatgtcacaaagttactccgttcctccgtgttagggtttgcgtgcaagatgggagacagagaagccttgaacaatgcttcctcgttatttgagcagtggctaaatgggactgtaagccttcccgtaaatctcaggcttctggtgtatcggtatgggatgcagaactctggcaatgagatttcatggaactacactcttgagcaataccagaaaacttcattagctcaagaaaaagaaaaactgctgtatggattagcatcagtgaagaacgttactcttttgtcaaggtatttggatttgctcaaggacacgaaccttattaaaactcaggatgtgtttacagtcattcgatatatctcatataacagctatgggaagaacatggcctggaattggatacaactcaactgggactatctagtcaacagatatacactcaataacagaaaccttggccgaattgtcacaatagcagagccattcaacactgaactgcaactgtggcagatggagagcttttttgcaaaatatccacaagctggagcaggagaaaaacctagggaacaagtgctggaaacagtgaaaaacaatatagagtggctaaaacaacatagaaacaccatcagagaatggttttttaatttacttgagagtggttaatgtattcaaatgttagagtttaattttgtgaatctattgtttctcctctgaagcatttggtggcctaatttacaagcacgatggagagagccttataaacagataatgcttttactaagcactgtgtttatatgtcttgcaaagcctttaaattgttcctctttgtttatgaagaaagatactaatagagtacttaatatactcagggattccttctaagtgtacttcataagatattctttacaaactgaagataatgaaatagttattttaatacctttaaatatcattctttgtatcttaaatctgtgaagtagaacaatttggtcttagctttacattttcagtaccaaagaaacaccacttaatcttctctcttgattgatttttaaagtttaaataccagtacttgagggaccaatattaccatcttaatctttattttattattcagaattatacagacctaatatcattttattcacatatgtcttactactttaaatcctaccaaagtaacctgggcttaagttttacttgaggatcatatgaattagccaaaagaatggctgactgttgcctttgctcttataaaatcaataagagaactctcctctttttttaaaaataaatctaaatgattatcttgaaaaagtattgttttccagtgtcacttgactcttgaataaaaataactgcagtgttccccaaataatttaacacattgcaaatatgattcaagaatctggcctttttcatgcttggtactctcttctcttgctccattccttacaaagctccttcaaatatgctatgaaattagagggaacatagtgcttaactctgctccatggattttagaggaaaaaagctaaataattggaaactgttcaggaaagagagaaggcagattatttcttaaaactaaatggaattagaatttagctttgacctcacctagcaatctaagtgtgaaaatggggagacctgtgggcatccccagcatgactctgcatatctgagcatatatctccttatagatcaattttatgtataaacccttagatcctaatccatacagaatagcactgatcaaatttaaatgcatgacttgattaaagacatcaatttcatagaagctggtggcaagaatatgtttaatatggcacttgatacctcctagatccataatgtaagtccaataggcagaaaagatggtaagttactatgtttcaatctgctatatctagaaaatctaaatttatttggaactttcaaaaatgtaaggtaatttagaatcggcttgatgagaattgaagcatatggaaacaaaaccttagctttaactttatttatacaataatgtgccctaatcatgtactctgaaactttataaactttcctgttgctgtttcttaattatcacttctcaatccgtacagccaaactagtaaattcaaatgtagactgggttgtgggtggcagatatagaagaagaaatttccagaccaaaaaatattaaatattattttaaattatttcagaagcaaaaacatattaacatcataacttaccagaaaaaccccactatcctcataagattaacttaaaattctgaccacaatcagaaccagcacttgaagtctatgtattgtttcaagtaggacatattatgaggtgagatggtttatccttctgttttatgaaattaatacattttaaaagaaaaatgttagtttaagggggtggtaaataaaacagatttcaacttgcctacaaaaaaaaaaa

SEQ ID NO: 451 - protein, 957 aa, Homo sapiens
MNFAEREGSKRYCIQTKHVAILCAVVVGVGLIVGLAVGLTRSCDSSGDGGPGTAPAPSHLPSSTASPSGPPAQDQDICPASEDESGQWKNFRLPDFVNPVHYDLHVKPLLEEDTYTGTVSISINLSAPTRYLWLHLRETRITRLPELKRPSGDQVQVRRCFEYKKQEYVVVEAEEELTPSSGDGLYLLTMEFAGWLNGSLVGFYRTTYTENGQVKSIVATDHEPTDARKSFPCFDEPNKKATYTISITHPKEYGALSNMPVAKEESVDDKWTRTTFEKSVPMSTYLVCFAVHQFDSVKRISNSGKPLTIYVQPEQKHTAEYAANITKSVFDYFEEYFAMNYSLPKLDKIAIPDFGTGAMENWGLITYRETNLLYDPKESASSNQQRVATVVAHELVHQWFGNIVTMDWWEDLWLNEGFASFFEFLGVNHAETDWQMRDQMLLEDVLPVQEDDSLMSSHPIIVTVTTPDEITSVFDGISYSKGSSILRMLEDWIKPENFQKGCQMYLEKYQFKNAKTSDFWAALEEASRLPVKEVMDTWTRQMGYPVLNVNGVKNITQKRFLLDPRANPSQPPSDLGYTWNIPVKWTEDNITSSVLFNRSEKEGITLNSSNPSGNAFLKINPDHIGFYRVNYEVATWDSIATALSLNHKTFSSADRASLIDDAFALARAQLLDYKVALNLTKYLKREENFLPWQRVISAVTYIISMFEDDKELYPMIEEYFQGQVKPIADSLGWNDAGDHVTKLLRSSVLGFACKMGDREALNNASSLFEQWLNGTVSLPVNLRLLVYRYGMQNSGNEISWNYTLEQYQKTSLAQEKEKLLYGLASVKNVTLLSRYLDLLKDTNLIKTQDVFTVIRYISYNSYGKNMAWNWIQLNWDYLVNRYTLNNRNLGRIVTIAEPFNTELQLWQMESFFAKYPQAGAGEKPREQVLETVKNNIEWLKQHRNTIREWFFNLLESG

SEQ ID NO: 452 - DNA, 2337 bp, Homo sapiens
gttaggccaacagggaagcgcggagccgcagatctggtccgtcgctcgcctgggtgcctggagctgagctgcggcaaggcccggctcctgttcgaccgcccgaggggtgtgcgtgtgcgcgttgcggagggtgcgctcagagggccgcgtcgtggctgcagcggctgctgccgccgcaggggatctaatatcacctacctgtccctgtcactcttgacacttctctgtcagggctgccgcgtggggggggggcgggcagagcgcggtcggcgttagctttccttattggaggggttcttgggggagggagggagagaagaagggggtctttgcccactcttgtttcgctttggagcttggaagcctgctccctaaagacgctctgagtggtgcccttctgcccacatcccatgtcttcgtttgcccgctgactttccgtctccggactttttcgcttgagccttccggaggagacgggggcagcttggcttgagaactcggcgggggttgcgtcccctggctctccccgcagcggggaaactccgcgcctagagcgcgacccggagcgggcagcggcggctacgggggctcggcggggcagtagccaaggactagtagagcgtcgcgctccctcgtccatgaactgcatgaaaggcccgcttcacttggagcaccgagcagcggggaccaagctgtcggccgtctcctcatcttcctgtcaccatccccagccgttagccatggcttcggttctggctcccggtcagccccggtcgctggactcctccaagcacaggctggaggtgcacaccatctccgacacctccagcccggaggccgcagagaaagataaaagccagcaggggaagaatgaggacgtgggcgccgaggacccgtctaagaagaagcggcaaaggcggcagcggactcactttaccagccagcagctccaggagctggaggccactttccagaggaaccgctacccggacatgtccacacgcgaagaaatcgctgtgtggaccaaccttacggaagcccgagtccgggtttggttcaagaatcgtcgggccaaatggagaaagagggagcgcaaccagcaggccgagctatgcaagaatggcttcgggccgcagttcaatgggctcatgcagccctacgacgacatgtacccaggctattcctacaacaactgggccgccaagggccttacatccgcctccctatccaccaagagcttccccttcttcaactctatgaacgtcaaccccctgtcatcacagagcatgttttccccacccaactctatctcgtccatgagcatgtcgtccagcatggtgccctcagcagtgacaggcgtcccgggctccagtctcaacagcctgaataacttgaacaacctgagtagcccgtcgctgaattccgcggtgccgacgcctgcctgtccttacgcgccgccgactcctccgtatgtttatagggacacgtgtaactcgagcctggccagcctgagactgaaagcaaagcagcactccagcttcggctacgccagcgtgcagaacccggcctccaacctgagtgcttgccagtatgcagtggaccggcccgtgtgagccgcacccacagcgccgggatcctaggaccttgccggatggggcaactccgcccttgaaagactgggaattatgctagaaggtcgtgggcactaaagaaagggagagaaagagaagctatatagagaaaaggaaaccactgaatcaaagagagagctcctttgatttcaaagggatgtcctcagtgtctgacatctttcactacaagtatttctaacagttgcaaggacacatacacaaacaaatgtttgactggatatgacattttaacattactataagcttgttattttttaagtttagcattgttaacatttaaatgactgaaaggatgtatatatatcgaaatgtcaaattaattttataaaagcagttgttagtaatatcacaacagtgtttttaaaggttaggctttaaaataaagcatgttatacagaagcgattaggatttttcgcttgcgagcaagggagtgtatatactaaatgccacactgtatgtttctaacatattattattattataaaaaatgtgtgaatatcagttttagaatagtttctctggtggatgcaatgatgtttctgaaactgctatgtacaacctaccctgtgtataacatttcgtacaatattattgttttacttttcagcaaatatgaaacaaatgtgttttatttcatgggagtaaaatatactgcatacaaaaaaaaaaaaaaaaaaaaaaaaa

SEQ ID NO: 453 - protein, 324 aa, Homo sapiens
MNCMKGPLHLEHRAAGTKLSAVSSSSCHHPQPLAMASVLAPGQPRSLDSSKHRLEVHTISDTSSPEAAEKDKSQQGKNEDVGAEDPSKKKRQRRQRTHFTSQQLQELEATFQRNRYPDMSTREEIAVWTNLTEARVRVWFKNRRAKWRKRERNQQAELCKNGFGPQFNGLMQPYDDMYPGYSYNNWAAKGLTSASLSTKSFPFFNSMNVNPLSSQSMFSPPNSISSMSMSSSMVPSAVTGVPGSSLNSLNNLNNLSSPSLNSAVPTPACPYAPPTPPYVYRDTCNSSLASLRLKAKQHSSFGYASVQNPASNLSACQYAVDRPV

SEQ ID NO: 454 - DNA, 2250 bp, Homo sapiens
tgggagtccgtgctcctgctcctcggttggctcctaagtgccccgccaggtcccctctcctttcgctctcccggctccggctcccgactcttcggcccgctggcatctgcttccctcccctgcctcgtttctcgtcgcccctgctcgctccccccggcgctcgcccgggcgctgtgctcgctcctggatcgccagccgcgcagccgggctcggccggccgcccgcgcgccactgtgcagtggagtttggtggaatctctgctgacgtcacgtcactccccacacggagtaggagcagagggaagagagagggatgagagggagggagaggagagagagtgcgagaccgagcgagaaagctggagaggagcagaaagaaactgccagtggcggctagatttcggaggccccagtgcacccgtggactccttcggaacttggcaccctcaggagccctgcagtcctctcaggcccggctttcgggcgcttgccgtgcagccggaggctcggctcgctggaaatcgccccgggaagcagtgggacgcggagacagcagctctctcccggtagccgataacggggaatggagaccaactgccgcaaactggtgtcggcgtgtgtgcaattaggcgtgcagccggcggccgttgaatgtctcttctccaaagactccgaaatcaaaaaggtcgagttcacggactctcctgagagccgaaaagaggcagccagcagcaagttcttcccgcggcagcatcctggcgccaatgagaaagataaaagccagcaggggaagaatgaggacgtgggcgccgaggacccgtctaagaagaagcggcaaaggcggcagcggactcactttaccagccagcagctccaggagctggaggccactttccagaggaaccgctacccggacatgtccacacgcgaagaaatcgctgtgtggaccaaccttacggaagcccgagtccgggtttggttcaagaatcgtcgggccaaatggagaaagagggagcgcaaccagcaggccgagctatgcaagaatggcttcgggccgcagttcaatgggctcatgcagccctacgacgacatgtacccaggctattcctacaacaactgggccgccaagggccttacatccgcctccctatccaccaagagcttccccttcttcaactctatgaacgtcaaccccctgtcatcacagagcatgttttccccacccaactctatctcgtccatgagcatgtcgtccagcatggtgccctcagcagtgacaggcgtcccgggctccagtctcaacagcctgaataacttgaacaacctgagtagcccgtcgctgaattccgcggtgccgacgcctgcctgtccttacgcgccgccgactcctccgtatgtttatagggacacgtgtaactcgagcctggccagcctgagactgaaagcaaagcagcactccagcttcggctacgccagcgtgcagaacccggcctccaacctgagtgcttgccagtatgcagtggaccggcccgtgtgagccgcacccacagcgccgggatcctaggaccttgccggatggggcaactccgcccttgaaagactgggaattatgctagaaggtcgtgggcactaaagaaagggagagaaagagaagctatatagagaaaaggaaaccactgaatcaaagagagagctcctttgatttcaaagggatgtcctcagtgtctgacatctttcactacaagtatttctaacagttgcaaggacacatacacaaacaaatgtttgactggatatgacattttaacattactataagcttgttattttttaagtttagcattgttaacatttaaatgactgaaaggatgtatatatatcgaaatgtcaaattaattttataaaagcagttgttagtaatatcacaacagtgtttttaaaggttaggctttaaaataaagcatgttatacagaagcgattaggatttttcgcttgcgagcaagggagtgtatatactaaatgccacactgtatgtttctaacatattattattattataaaaaatgtgtgaatatcagttttagaatagtttctctggtggatgcaatgatgtttctgaaactgctatgtacaacctaccctgtgtataacatttcgtacaatattattgttttacttttcagcaaatatgaaacaaatgtgttttatttcatgggagtaaaatatactgcatacaaaaaaaaaaaaaaa

SEQ ID NO: 455 - protein, 317 aa, Homo sapiens
METNCRKLVSACVQLGVQPAAVECLFSKDSEIKKVEFTDSPESRKEAASSKFFPRQHPGANEKDKSQQGKNEDVGAEDPSKKKRQRRQRTHFTSQQLQELEATFQRNRYPDMSTREEIAVWTNLTEARVRVWFKNRRAKWRKRERNQQAELCKNGFGPQFNGLMQPYDDMYPGYSYNNWAAKGLTSASLSTKSFPFFNSMNVNPLSSQSMFSPPNSISSMSMSSSMVPSAVTGVPGSSLNSLNNLNNLSSPSLNSAVPTPACPYAPPTPPYVYRDTCNSSLASLRLKAKQHSSFGYASVQNPASNLSACQYAVDRPV

SEQ ID NO: 456 - DNA, 2122 bp, Homo sapiens
tgggagtccgtgctcctgctcctcggttggctcctaagtgccccgccaggtcccctctcctttcgctctcccggctccggctcccgactcttcggcccgctggcatctgcttccctcccctgcctcgtttctcgtcgcccctgctcgctccccccggcgctcgcccgggcgctgtgctcgctcctggatcgccagccgcgcagccgggctcggccggccgcccgcgcgccactgtgcagtggagtttggtggaatctctgctgacgtcacgtcactccccacacggagtaggagcagagggaagagagagggatgagagggagggagaggagagagagtgcgagaccgagcgagaaagctggagaggagcagaaagaaactgccagtggcggctagatttcggaggccccagtgcacccgtggactccttcggaacttggcaccctcaggagccctgcagtcctctcaggcccggctttcgggcgcttgccgtgcagccggaggctcggctcgctggaaatcgccccgggaagcagtgggacgcggagacagcagctctctcccggtagccgataacggggaatggagaccaactgccgcaaactggtgtcggcgtgtgtgcaattagagaaagataaaagccagcaggggaagaatgaggacgtgggcgccgaggacccgtctaagaagaagcggcaaaggcggcagcggactcactttaccagccagcagctccaggagctggaggccactttccagaggaaccgctacccggacatgtccacacgcgaagaaatcgctgtgtggaccaaccttacggaagcccgagtccgggtttggttcaagaatcgtcgggccaaatggagaaagagggagcgcaaccagcaggccgagctatgcaagaatggcttcgggccgcagttcaatgggctcatgcagccctacgacgacatgtacccaggctattcctacaacaactgggccgccaagggccttacatccgcctccctatccaccaagagcttccccttcttcaactctatgaacgtcaaccccctgtcatcacagagcatgttttccccacccaactctatctcgtccatgagcatgtcgtccagcatggtgccctcagcagtgacaggcgtcccgggctccagtctcaacagcctgaataacttgaacaacctgagtagcccgtcgctgaattccgcggtgccgacgcctgcctgtccttacgcgccgccgactcctccgtatgtttatagggacacgtgtaactcgagcctggccagcctgagactgaaagcaaagcagcactccagcttcggctacgccagcgtgcagaacccggcctccaacctgagtgcttgccagtatgcagtggaccggcccgtgtgagccgcacccacagcgccgggatcctaggaccttgccggatggggcaactccgcccttgaaagactgggaattatgctagaaggtcgtgggcactaaagaaagggagagaaagagaagctatatagagaaaaggaaaccactgaatcaaagagagagctcctttgatttcaaagggatgtcctcagtgtctgacatctttcactacaagtatttctaacagttgcaaggacacatacacaaacaaatgtttgactggatatgacattttaacattactataagcttgttattttttaagtttagcattgttaacatttaaatgactgaaaggatgtatatatatcgaaatgtcaaattaattttataaaagcagttgttagtaatatcacaacagtgtttttaaaggttaggctttaaaataaagcatgttatacagaagcgattaggatttttcgcttgcgagcaagggagtgtatatactaaatgccacactgtatgtttctaacatattattattattataaaaaatgtgtgaatatcagttttagaatagtttctctggtggatgcaatgatgtttctgaaactgctatgtacaacctaccctgtgtataacatttcgtacaatattattgttttacttttcagcaaatatgaaacaaatgtgttttatttcatgggagtaaaatatactgcatacaaaaaaaaaaaaaaaaaaaaaaaaa

SEQ ID NO: 457 - protein, 271 aa, Homo sapiens
METNCRKLVSACVQLEKDKSQQGKNEDVGAEDPSKKKRQRRQRTHFTSQQLQELEATFQRNRYPDMSTREEIAVWTNLTEARVRVWFKNRRAKWRKRERNQQAELCKNGFGPQFNGLMQPYDDMYPGYSYNNWAAKGLTSASLSTKSFPFFNSMNVNPLSSQSMFSPPNSISSMSMSSSMVPSAVTGVPGSSLNSLNNLNNLSSPSLNSAVPTPACPYAPPTPPYVYRDTCNSSLASLRLKAKQHSSFGYASVQNPASNLSACQYAVDRPV

SEQ ID NO: 458 - DNA, 3053 bp, Homo sapiens
gcaagaggcgccaccgtctccaaggagtggtccggggcaccggtttcaaagtcgcagggcgggccgagtggacttccgctgctggcctggggcttcccagccgtcttggcgttgtcctctccaacccccgccgctccgcgtagaacgccgctctcaggctgccgtcaagctcccgcggcactctcctaggtggcccgacgagacccagagtgacccgcgggacgcctgtatcgaccgcgtcctcttcccaccagcgtgggattcggttgaacgtggagtccccagcaatcttcagtctctcaccagggccagggactcgtctggggcgcgggggaaagaagcgtggcggggctgtagatgccgcgtgagtaggatgcagattgcaccgctggagcgcttgacaaccaaccgagcgttggcttagttttgttttcccgcacagcaagctctctgtctttcagaggaaggtaaaggtggtgaaagctctaaactaaaattgtatcgaaatggctgcagaaatcgactttctgagagagcaaaatcgaagactaaatgaagattttaggcggtatcaaatggaaagtttttccaaatattcatctgtacagaaagctgtctgccaaggagaaggagacgacacatttgaaaacctagtatttgaccaaagctttttagctcctcttgttactgagtatgataaacacctaggagaactaaatgggcagctgaaatattaccagaaacaggtgggtgagatgaaattacaacttgaaaatgtcatcaaggaaaatgaaaggttgcacagtgaattaaaagatgctgttgaaaaaaaattggaggcctttcccctgggcacagaggtaggaactgacatatatgcagatgatgaaacagtcagaaaccttcaagaacaattgcagctagccaatcaagaaaaaactcaggctgtggaactctggcagactgtttctcaggagttggacagactacacaagctttaccaggaacatatgactgaggcccagattcatgtatttgaaagtcaaaaacaaaaggatcagctatttgattttcaacaactgaccaaacaacttcatgttactaatgagaacatggaagtgactaaccaacagtttctgaaaacagtaactgaacaaagtgtgataatcgaacaactccgaaaaaaacttaggcaagccaaattagagctgagagttgctgtagcaaaagtggaagagttaactaatgtgactgaagatctgcagggacagatgaaaaagaaggagaaggatgtggtgtctgcccatggaagagaggaagcatcagataggcgtttacagcagttacagtctagtataaaacaattagaaataagattatgtgtgacaatccaagaagccaaccaattaagaaccgaaaatacacatctggaaaaacagaccagagagctacaagcaaagtgcaatgaattagaaaatgagagatatgaggctattgtaagagccagaaatagcatgcaactcttagaagaagctaaccttcaaaaaagtcaggctctacttgaggagaagcaaaaagaagaagacatagagaaaatgaaagagacagtttctcggtttgtacaagatgctaccataagaaccaagaaagaagttgcaaacaccaaaaaacaatgtaatatacaaatttctcgattaacagaagaactttcagcccttcaaatggagtgtgctgaaaaacaaggccaaattgaacgagtcattaaggaaaaaaaagcagtggaagaagaactagaaaagatttaccgtgaaggcagaggaaatgagagtgattacagaaaactggaagaaatgcaccaaagattcctggtttcagagcgttcaaaagatgatcttcagctaagacttacgagagcagaaaatagaataaaacaacttgaaactgactcctcagaagaaatatcacgttaccaagaaatgattcagaaacttcaaaatgtattggagtctgagagagagaactgtgggcttgtcagtgaacaaaggctaaaacttcagcaagaaaataaacagttacggaaagagactgagagtttaaggaagattgccctggaggctcaaaaaaaagccaaagtaaagatcagtacaatggaacatgaattttcaataaaggaacgtggatttgaagttcaattgagagagatggaagacagtaatagaaattccattgttgaactgaggcatctcctagcgactcaacagaaggcagccaataggtggaaagaagaaacgaagaaacttactgaaagtgcagaaattagaatcaataatctaaagagtgagctgagtcgacagaaacttcatacccaagagctgctttctcagctggaaatggcaaatgaaaaggtagctgagaatgaaaagctaattctagagcatcaagaaaaagccaacagacttcaaaggcgtctaagtcaggcagaagagagagctgcttcagcttcccagcagctcagtgtgattacagtgcagagaagaaaagcagcctccctgatgaatctggaaaatatttaaaaatattcatagttcactcacagaactttagagttgggaaagcagttggactagaagtgtattgaaatggtaaagcctgcaaagtataatagttaaggcttgtgttatttcgcgtaagcattgttgttctgttttgagggttattggaaaacagagcagtgaccacttcctgtaagtaaagaaaatataatcctatattgagcttcagtggagaataaaccagctgagaagaactcattgccttcatcaatgtgtctgttttttaattcctcctttttcccttgaaaggacataataattttcaaactatgcaaatttctctttcataagaaagagtttttaagaaaattctagaatttaatatttcagtttccaagatttgagaattttacatctaattgttacttctaactcatttttaaagttcctaagtatccattttattatgaactcataaatgtaataaattgtgcactttct

SEQ ID NO: 459 - protein, 688 aa, Homo sapiens
MAAEIDFLREQNRRLNEDFRRYQMESFSKYSSVQKAVCQGEGDDTFENLVFDQSFLAPLVTEYDKHLGELNGQLKYYQKQVGEMKLQLENVIKENERLHSELKDAVEKKLEAFPLGTEVGTDIYADDETVRNLQEQLQLANQEKTQAVELWQTVSQELDRLHKLYQEHMTEAQIHVFESQKQKDQLFDFQQLTKQLHVTNENMEVTNQQFLKTVTEQSVIIEQLRKKLRQAKLELRVAVAKVEELTNVTEDLQGQMKKKEKDVVSAHGREEASDRRLQQLQSSIKQLEIRLCVTIQEANQLRTENTHLEKQTRELQAKCNELENERYEAIVRARNSMQLLEEANLQKSQALLEEKQKEEDIEKMKETVSRFVQDATIRTKKEVANTKKQCNIQISRLTEELSALQMECAEKQGQIERVIKEKKAVEEELEKIYREGRGNESDYRKLEEMHQRFLVSERSKDDLQLRLTRAENRIKQLETDSSEEISRYQEMIQKLQNVLESERENCGLVSEQRLKLQQENKQLRKETESLRKIALEAQKKAKVKISTMEHEFSIKERGFEVQLREMEDSNRNSIVELRHLLATQQKAANRWKEETKKLTESAEIRINNLKSELSRQKLHTQELLSQLEMANEKVAENEKLILEHQEKANRLQRRLSQAEERAASASQQLSVITVQRRKAASLMNLENI

SEQ ID NO: 460 - DNA, 1873 bp, Homo sapiens
ggctgtcaagcaatgggaggagtcgtgagaacctggatgacagcgggctgagccaccggcttggcgcggcggccaaactggtgggacagtgtctccaggtagtgaggcccaacctctttaaaacaaacaaacaaacaaacaaaaaaccaaaatgcaaacgtgagtagagaatgaaatacacagtttaaatgccctcactatctttgggttactaatatactaagcctttctggactaagtaaaagatgcaggttcctgcggctagggatagaagccagactggcgtcttcagaatctcccaccaaggctgtacctctggaggagttctaggtttggatttggtcatctcaagaagagacttcagatggattttaaaattgaacacacttgggatggttttccagtgaagcatgagcccgtatttatcaggctgaatccaggtgacagaggagtgatgatggacattagtgctccatttttcagggatcctccagccccacttggagaaccaggaaaacctttcaatgaactgtgggattatgaagttgtggaagcatttttcttgaatgatataactgagcaatatttagaagttgaactttgtccccacggacagcatttagtgcttttactttctggaagaagaaatgtgtggaaacaagaacttcctttatcgttcagaatgtccagaggagagacaaaatgggaaggcaaagcttatctcccttggagttattttccaccaaatgtgacaaaattcaattcatttgcaattcatggatcaaaagataaacgaagttatgaagctctttaccctgtacctcagcatgaactgcagcaaggacaaaaacctgatttccattgcctagaatacttcaagtctttcaattttaacacactgcttggagaagagtggaaacaaccggaatcagacctgtggctaatagagaaatgtgatatataggagtaatagataaccataccgatcattttttcctctataccttttaagataaacaaaaaataaatatcaattttttaagatgtcatgcatacatttcaacaacaaatatcttcatagaagtcactgaaaatatagtatctgtggcaaattgtatatgattaacaagaaaatatatgattctttgtagatgatttcatctgtaaagtcacaatgtttctcagagtcacttagtccaggatgttgcattcccagcacacagtacagttattcttgaaaactacaagtgaaaaagggggaacaattgaggttgtccaaggccacctagaggactgtcttgcactaccttgtgattcaaccatttcattcctagatatataccccagaaaaatgactgctcatagcagctttattcataatagcacaaaattgtaaacagtgaaatttccatccataggaaaatggatagacaaactacaatatagtcagtggaatactgttcatttaaaaaaggactgctgatacatgcaacaacctgtatgaatctcaaaaacattaagttgagcaaaacaaaccaaacataacatactatctaattacttttatattaaagccacttccaggcaaaactaatatttgatgatagataccagaacagtggctgcttagagtgagggcagggaattcaaattgaatggaaaaggggcctgaggaaattttccggggtgattgaaatgttttgtattttgatctggatgatggttatgtagctgcatatatttgtcaacattcctcatgctgtatgtttagatttgtgattttactatatgtaaattaattccttaataaaatactattataaaataagctgtaaattaaatggaattaacttcaagtttaaaaaaaaaaaaa

SEQ ID NO: 461 - protein, 199 aa, Homo sapiens
MDFKIEHTWDGFPVKHEPVFIRLNPGDRGVMMDISAPFFRDPPAPLGEPGKPFNELWDYEVVEAFFLNDITEQYLEVELCPHGQHLVLLLSGRRNVWKQELPLSFRMSRGETKWEGKAYLPWSYFPPNVTKFNSFAIHGSKDKRSYEALYPVPQHELQQGQKPDFHCLEYFKSFNFNTLLGEEWKQPESDLWLIEKCDI

SEQ ID NO: 462 - DNA, 798 bp, Homo sapiens
atgagcaattgtgctgagaaacaaaggagagtggatgaagaacacagcagcctgcctccacagctttggaatcgatgtgcaaataatttccttgggaggaactctttatatacaagaggattcactccaaattgtacaccacactcaggcatgggactaagataatgaaagagaggcacctgactcaagcaatggatgtcggagcagaagactagaaggcaaagcaagtacatgctacctgtctgggcaagacctttcagtgcctttccatatttcaatgggtagtcatctgcacaccttccagtcttttcttctgtattgcaaaggctagaagccttggtactatatttatcaaacttactttttttttttttaacaaatcttcaatgtgattctcattttgctaagatacatttgtatgaaattttgagatagaaaagtatgaataagaaagcattgccttctttctcagtggcagcacacaaacatatggacttcacagacacgacattttgcagcaacttctagatcttccccctgtgagtgccctgggacatcattacaataaataaaccattcaggaagtcaaaggatggtagttttcacagaagcattgcaagcattgagaagaaaaataatccatatctagtaggtttatttttatgaggataaatctctggcctctccatatggaaaaggatctcctgtaagttaatcctgccatcaggttgctggctggtttgcctgggatataaagccctattagtgagccagtggtgacctttgctgctgtctggt

SEQ ID NO: 463 - protein, 54 aa, Homo sapiens [sequence omitted]

SEQ ID NO: 464 - DNA, 4197 bp, Homo sapiens
atttgatctcacattaaccaaggaggagaatgtgagaaaagggggaaaatgcccaggaggaagcaggagcagcccaagcgccttccctcacatgttagtaggcaggaagaggcggagggagagctcagtgaaggagaacactggtatggaaactcttcagagactccgtcagaagcatcctatggggaagtccaggagaactataagttgtctctggaggaccggatccaggagcagtccacgtccccggacacctccttgggaagcacgactcccagcagccacacgttggagctggtggcactggacagtgaggtcctgcgagactcactgcagtgtcaagatcacctttccccgggagtgtcttctttgtgtgacgatgacccaggctccaacaagcccctgagcagcaatttgaggcggctgctggaggctggttccctcaaactcgatgctgcagccacggctaatggcagagtggagtcccccgtaaacgttggctcgaacctctccttttccccgccttcccaccacgcccagcagctcagtgttctggccaggaagttggccgagaagcaggaacagaatgaccaatacactccaagtaaccgttttatatggaatcaaggtaagtggttgccaaactcaaccaccacctgcagcttgtctccggattcagccatcctaaaactgaaagctgcagccaatgccgttctgcaggacaaatctctcaccaggactgaggagaccatgcgatttgagtccttttcctccccttttagctcccagtctgccagttctaccttggccgctttgtccaagaaggtcagtgaaagaagtttgactcctggtcaggagcaccctccaccggccagctccttcctttccctggcttctatgacctcctcagcggcccttctgaaggaggtggccgcaagggctgcgggcagtcttctggctgagaaatcatcgctgctgcctgaggaccctctaccgcccccgccttcagagaagaaaccagaaaaagtcactccgccacctccaccgccacctccaccacctccaccaccaccaccacaatccctggaattattattactcccagttcctaagggaagagtttctaaaccctccaattcagcctcagaagaggaaagtggaaagcctttccagtgtccaatatgtggtttggttattaaaaggaagagttactggaagcggcacatggtgattcacacaggtttaaaaagtcatcagtgtccgctctgtccattccggtgtgctcgcaaggacaatctcaaatcccacatgaaggttcatcagcaccaggatcggggagagacctttcagtgccagctgtgcccttttacttcctcacgccacttcagcctgaaactccacatgcgttgccatcagcacttcctgaggacagaagccaaggtgaaggaggagatcccagacccagatgtcaagggatctccccacctcagtgacagtgcctgcctggggcagcaaagggaaggaggagggacagagctagtggggaccatgatgacgtctaacactccagagaggactagccagggaggggctggcgtctcgcctttgctggtgaaggaggaacccaaggaagataacggcctgcccacctcctttactttgaatgctgccgacaggcccgccaaccacacaaagctgaaagacccctccgagtatgtggccaacagtgcgtcagcattgttcagccaggacatctctgttaagatggcgtctgattttctcatgaagctgtcagctgcaaatcagaaggagcccatgaatcttaattttaaagtgaaagaggagcctaaggaaggggagtccctaagcacgactttgcctcggtccagctatgtgttcagcccggaatctgaagtgtcagccccaggcgtctctgaggacgcactaaagccccaggaagggaagggaagtgtgctaaggcgggatgtgtcagtcaaagcagcctctgaacttctcatgaaactctcagcggaaagctacaaggaaacacagatggtgaagattaaagaggaacccatggaggttgacatccaggactcccatgtctcgatatcacccagccggaatgttggctacagcactttaatcgggcgagagaaaaccgaacccttacagaagatgccagagggcagagtacccccagagagaaacctcttcagtcaggatatctctgtgaaaatggcttccgagctcctctttcaactgtcagaaaaagtgagcaaagagcacaatcatacaaaagaaaacaccatccggaccacgaccagccctttcttttcagaagacacatttagacaatcaccattcacctccaattcaaaagaactgctgcccagtgactccgtgctgcacggaagaatatcagctccagaaacagaaaagatagtcctagaggcaggaaatggattaccatcctggaaattcaatgaccagctttttccctgtgacgtgtgtgggaaagtgtttggccgacagcagacattgtcccgacacctctcgctgcacacagaggaaagaaaatacaaatgccacttgtgcccctatgctgctaagtgccgtgcaaatctgaaccagcacttgaccgtccattccgtgaagctggtgagtacagacaccgaggacattgtcagcgccgtcacctctgaaggcagtgatgggaagaaacatccttattattacagttgtcacgtgtgtggatttgagaccgagctcaatgtccagtttgtcagccacatgtcactccacgtggacaaggagcagtggatgttttcgatctgctgcactgcctgcgacttcgtcaccatggaggaagcagagataaagactcacattggcaccaagcacacaggggaagacaggaagacccccagcgaatcaaatagcccctcttcatcctccctctcagctctgagtgattcagccaacagcaaagatgattcagatggctcccagaaaaacaagggcgggaacaatctgctggtcatctctgtcatgcctgggagccagccctcactgaacagtgaggaaaagccagagaaagggttcgaatgtgttttttgcaactttgtctgcaagacgaagaacatgtttgagcgtcatctgcagatacacctcatcacccggatgtttgagtgtgatgtgtgccacaagttcatgaagacccccgaacagctgctggagcataagaaatgccacactgtccccaccggtgggctcaagtaaggaaactcaggacagtggtgagtttcagactcctctaggtgcccattctgcatttattccaccaaccgccccgctgccatggagtgccacctcaagacccactacaagatggagtacaagtgccggatctgccagacggtgaaggccaaccagctggagctggagacgcacacccgggagcaccgcctgggcaaccactacaagtgcgaccagtgcggctacctgtccaagaccgccaacaagctcatcgagcacgtgcgcgtccacaccggggagcggcccttccactgtgaccagtgcagctacagctgcaagcgcaaggacaatctcaacctgcacaagaagctgaagcacgccccacgccagaccttcagctgcgaagagtgcctgttcaagaccacacaccctttcgtcttcagccgccacgtcaagaagcaccagagtggggactgccccgaggaggacaagaagggcctgtgtccagcccccaaggaaccggccggcccgggggccccgctcctggtggtcgggagctcccggaatctcctgtctcccctgtcagttatgtctgcctcccaggctctgcagaccgtggccctgtcggcagcccacggcagcagctcagagcccaacctggcactcaaggctttggccttcaacggctcccctttgcgctttgacaagtaccggaactcagattttgcccatctcattcccttgacaatgttataccccaagaaccacttggatctcacattccaccctccccgacctcagactgcgcctcccagcatcccctcacccaaacactccttcctggcctatctcggactgagagaaagagcagagactgtctgagggcagccatgttctgtaccaaaaacagagagacaaaagacaaaaaaaaaaaaaaaa

SEQ ID NO: 465 - protein, 1077 aa, Homo sapiens
MPRRKQEQPKRLPSHVSRQEEAEGELSEGEHWYGNSSETPSEASYGEVQENYKLSLEDRIQEQSTSPDTSLGSTTPSSHTLELVALDSEVLRDSLQCQDHLSPGVSSLCDDDPGSNKPLSSNLRRLLEAGSLKLDAAATANGRVESPVNVGSNLSFSPPSHHAQQLSVLARKLAEKQEQNDQYTPSNRFIWNQGKWLPNSTTTCSLSPDSAILKLKAAANAVLQDKSLTRTEETMRFESFSSPFSSQSASSTLAALSKKVSERSLTPGQEHPPPASSFLSLASMTSSAALLKEVAARAAGSLLAEKSSLLPEDPLPPPPSEKKPEKVTPPPPPPPPPPPPPPPQSLELLLLPVPKGRVSKPSNSASEEESGKPFQCPICGLVIKRKSYWKRHMVIHTGLKSHQCPLCPFRCARKDNLKSHMKVHQHQDRGETFQCQLCPFTSSRHFSLKLHMRCHQHFLRTEAKVKEEIPDPDVKGSPHLSDSACLGQQREGGGTELVGTMMTSNTPERTSQGGAGVSPLLVKEEPKEDNGLPTSFTLNAADRPANHTKLKDPSEYVANSASALFSQDISVKMASDFLMKLSAANQKEPMNLNFKVKEEPKEGESLSTTLPRSSYVFSPESEVSAPGVSEDALKPQEGKGSVLRRDVSVKAASELLMKLSAESYKETQMVKIKEEPMEVDIQDSHVSISPSRNVGYSTLIGREKTEPLQKMPEGRVPPERNLFSQDISVKMASELLFQLSEKVSKEHNHTKENTIRTTTSPFFSEDTFRQSPFTSNSKELLPSDSVLHGRISAPETEKIVLEAGNGLPSWKFNDQLFPCDVCGKVFGRQQTLSRHLSLHTEERKYKCHLCPYAAKCRANLNQHLTVHSVKLVSTDTEDIVSAVTSEGSDGKKHPYYYSCHVCGFETELNVQFVSHMSLHVDKEQWMFSICCTACDFVTMEEAEIKTHIGTKHTGEDRKTPSESNSPSSSSLSALSDSANSKDDSDGSQKNKGGNNLLVISVMPGSQPSLNSEEKPEKGFECVFCNFVCKTKNMFERHLQIHLITRMFECDVCHKFMKTPEQLLEHKKCHTVPTGGLK

SEQ ID NO: 466 - DNA, 3085 bp, Homo sapiens
aagtcagcaccgacccaaacaagcaggaaacaggaaatgttcacgtttcagagaggctgcagcccggcgcagcatcctgagcgcgcctctgccgaggcgagcggacatgcaggctccccgcgcagccctagtcttcgccctggtgatcgcgctcgttcccgtcggccggggtaattatgaggaattagaaaactcaggagatacaactgtggaatctgaaagaccaaataaagtgactattccaagcacatttgctgcagtgaccatcaaagaaacattaaatgcaaatataaattctaccaactttgctccggatgaaaatcagttagagtttatactgatggtgttaatcccattgattttattggtcctcttacttttatccgtggtattccttgcaacatactataaaagaaaaagaactaaacaagaaccttctagccaaggatctcagagtgctttacagacatatgaactgggaagtgaaaacgtgaaagtccctatttttgaggaagatacaccctctgttatggaaattgaaatggaagagcttgataaatggatgaacagcatgaatagaaatgccgactttgaatgtttacctaccttgaaggaagagaaggaatcaaatcacaacccaagtgacagtgaatcctaaacctgaatggcgctcatgttttccaagagaagcagcccctgagggagtctgctgaggctgccaacagaggatgaagaggatacaaatttaattaatttcaaatcaacatagacacaagaaccttttgctgtttcttccaacgcccactcttcctaatgatggcatcacttgcacttggaagaatgtgcaattgagaagtactaggaaaaggcctggctgccatccatcgctgcctctgagggtggagaaggaggcgggtgatgtgctcacttctgatcaacatgtgttgcctcctctcagccaacttctagctcactgcactcactctggtcatgataaatgttcgtcacctttctgcttcattccttagggcctaaatcaggaagctgttttatcgatggtttccttttgggtcagtaaccagctttggataatttcctctgattattcaagtcgtgggacaggtaaactacattcagcaggaacttttctcgaggagtgttatgtcatggaaaagacaccaaacacagcaagtattttaatgaatacaccatcccagggggtcagtaagctctgcctgccaagaagacacagtgagaggggtccacagtcctgatgaggtggcgtttggtaacttgtagaccctagcatggccaggtctggtcacccttaagaacttctcagagaaactaggaatcttcagtgaaagaactaatgttctcctcagctgaaattcccttgcttgtcagcatttctgcaaagctcacacttgtttcaccatacctcccttggatgtgacatgtaggtaggaagtatgtgcaggtgggagtcatctgtcagccttctatgtttcagagatcctgaaggtggtttgaaacaaacagaagaggagcaggaaatatccgtgcctgtggcagatctcactcatcatgcttagcattctctcccgccaagctgggataagcctcatgtcctaacacagcacaacaggaggtctctgtcagtccatcagagatgacattctatgtgatatttttgacatccttgtgctaaaagcaatggcacaaaatggaaaagggcctattgaccacacctactccagtaaaattgttcttcatttattccttaattttctaaatctgacccctttaaagcaatctagcaaattgagaatcctcagctctccttggatacctgatattttatttcaagaaagagacaaagaaggaaaattttatttattttactacccacatataaaccgaagggagatgggactacccaaacatttgctgctcaattttgtgtcttgtgcttgaaagtctgccctaatgcataacaaaaactacttgtctcctaccttttgggatccctttaacaagtatttgccttctgaactacgtggataatttcaaaggcagagttccagaccagagaggtctttccatacaatgaaagctataactagctggttgtgtttaaccactgctatcacgctatcctgggactgcatagaactttgacaaaagacagacttcatggtacacaacttcaacagattttctgtcatattctcaccagcacatctgaatgaggctttgtgttttccttgctctcttgcatgttccttttcaactcatggcccacagtgactctcagagatttatgccaaaattgcatacaattgttttctgaatcataacttgtctatttttctgcctatgtgtgctactttcagtttgtttctcatcaacattttgactctcagaagagcctccatttgcccctttctctctttaggtatctaagatctttgaacacctggacctttacatttgatccaaccctatcaaataatgaacttctcagagaggcatctggggtcctggaacttcatgttgatgaagtcatattatataatatgataaaaatattctcatgcagtattttaaataatttcaaattctagaagaagcaaatttcagcgacatgtcattgagtttttatttggtaaagctataattgtgcagtgtacaaagcactttttaaaaagatagtttattctgtcagggtatatgaagttagtatacagccagaacagccaagcctcaattcttgtaccttgtgtctttttattactgtttaatcaatagatatcatatgtttatgacagtttcaagaattgtttttaaacccaaacttaattttatgtttcagactattgttagaaaaacaaaacaaaaaacaaaaaaaccctcactaatttgccctaattggatagggcaatcaggacaaaatctgactttcgaatatttaaaagatatgtaagtttgattgcattttcgtacattttaagcaaactaggttaacaacaacatagcctagtcaaacttctcaggaaacttgttttaataaatatgtaaaaat

SEQ ID NO: 467 - protein, 183 aa, Homo sapiens
MQAPRAALVFALVIALVPVGRGNYEELENSGDTTVESERPNKVTIPSTFAAVTIKETLNANINSTNFAPDENQLEFILMVLIPLILLVLLLLSVVFLATYYKRKRTKQEPSSQGSQSALQTYELGSENVKVPIFEEDTPSVMEIEMEELDKWMNSMNRNADFECLPTLKEEKESNHNPSDSES

SEQ ID NO: 468 - DNA, 929 bp, Homo sapiens
agtgaatactctctgtgggcctactatgtgccaggcattatgcaccagacgaaaacatatcttcttgagaagccagtgctaagtcactgttcttgttcatatttggatcccttcccttttcaggttggttcattaacggaaatattaacagcaacttatatgtacttctccacttgttgctccaagagatttacagcctctttttctgtcttcagatactactttgaaaacaagatgaaagccatggaatctcccgagaaaaatgtacatcttacagactttcagtgagttctggaataccaggaaccagagcccacactaatgaacagcagtttcctaacctaatgcgagagatttgagatttcttctggctcccatgatcttctaattgtcttcttagcaagactaaacacatctccaagaaatgtgcactgccatgaatgtcttccagctatcttctatgacagcacttcccagtgtgttctgtggaataatggtacagggtgatattctatgaagaaaaatacggaaagtaatatactccacagtccgtatattagatcggactaataaaaataaatatggaaagtaatatattccacagtcatatattagatcgcctacacaacagcaatttgatatagtttaataggatttgaatgaataaaattaatgcccacagctactttcttctgccggtaaatatttttctgcccataatcttgctaaacagaattcatctgaacttacgttgttgccaacaaatatacgaacaattatacctaatcaaaaacaaaaaccaaactgatgttaaagaaaattaatcatttgctttgaataaatcaactattaagaaagcttatataattgagcctaacagtgccaaatcatgtctgagatgaaatgctgcatgatacataatcaaacag

SEQ ID NO: 469 - protein, 82 aa, Homo sapiens
MHQTKTYLLEKPVLSHCSCSYLDPFPFQVGSLTEILTATYMYFSTCCSKRFTASFSVFRYYFENKMKAMESPEKNVHLTDFQ

SEQ ID NO: 470 - DNA, 1919 bp, Homo sapiens
cggaaagcgttgctgcgtaaatggcgggggcgtgtcttttggctcctccgcgtgtagttacctgagaaacgcgggaagttgggcccaggcagtgttgctgcggttgcctaagttgttttactatttctggagagagccgtgagcttgtccaggggccccaatcctgaggccgacccggtttctggcgcggtgcgatggaggtagtggaggccgccgccgctcagctggaaactctgaaattcaatggcaccgactttggagttggggaaggtccggcggctccgtctccgggctctgcccctgtgccagggacacagccgccgctacagtcgtttgaggggtccccggacgctgggcagaccgtggaggttaagcctgccggggagcagcctctgcagcccgttctgaacgccgtcgcggccgggaccccggcgccgcagccacagccaccggctgaatcgccggcctgcggagactgcgtcacctccccaggagccgcagagcctgcgcgggcgccggactccttggagacctcggactcggattcggactcggacagtgaaacagattcagatagttcaagttcatcgtcttcctcttcatcttcctcatcgtcgtcttcttcctcttgtatatcacttcctccagtgctgtcagatggagatgatgatttacaagttgagaaggaaaataagaattttcctcttaaaacaaaagatgaattacttcttaatgaactgccttctgttgaagaactcactattattctgcctgaagatattgagttaaagcctcttgggatggtttcaagtattattgaacaactagtaataattgaatctatgactaacctacctccagttaatgaggagactgtaatttttaaaagtgatcgacaagcagcaggaaagatattcgagatatttggacctgttgcacatccattttatgtgttacggtttaattcttcagatcacattgagagtaaaggtattaaaataaaggagactatgtattttgctccatcaatgaaagatttcactcaatatatattcacagaaaaactaaaacaggataagggatcagatgcatcatggaagaatgatcaggaaccaccaccagaggccttagattttagtgatgatgaaaaagagaaggaagccaaacagaggaaaaaatctcagattcaaggccggaaaaaactcaaatctgaatttaatgagcctggtgaagattttactgaagtacatcagaattggaatgctcatagctctgcttcagagcatgcaaaaggatatcgtaacagagaattcacacgaggattttccagggccagataccctcgatcttgccatggcaggcctccacctcagcatttctataactcagaacatatggtatctcaggagacttcaggatttccttctcagagacaaaataatcccattatgccacaatacccctttcctcttccagtgtttgacatgcataattttcccctccgccctccacccccaccaccacccccacctgtaaacatgggttgggctacaccaaacatggctgctcatccattacttaacttaccatactccctacccccaccccctccccctccaccactgcctcctccaccctcttctggagatagtaattctcattttggaccttactattaggtgactatgcatttccagagaaatgtggacttttcatattatgtggtaaggattttttttttttcaagagtgattatggagctagatttttaaaaacactgtaaaatactaaatgattccttctgttgtaagttgatatatatttgtaacctttgtgaaattgtattcatatgaaaatgtcagctcaaattcttgggagaacattaaattatgtaatatttaattaaaaaaaaaaaaaaa

SEQ ID NO: 471 - protein, 494 aa, Homo sapiens
MEVVEAAAAQLETLKFNGTDFGVGEGPAAPSPGSAPVPGTQPPLQSFEGSPDAGQTVEVKPAGEQPLQPVLNAVAAGTPAPQPQPPAESPACGDCVTSPGAAEPARAPDSLETSDSDSDSDSETDSDSSSSSSSSSSSSSSSSSSCISLPPVLSDGDDDLQVEKENKNFPLKTKDELLLNELPSVEELTIILPEDIELKPLGMVSSIIEQLVIIESMTNLPPVNEETVIFKSDRQAAGKIFEIFGPVAHPFYVLRFNSSDHIESKGIKIKETMYFAPSMKDFTQYIFTEKLKQDKGSDASWKNDQEPPPEALDFSDDEKEKEAKQRKKSQIQGRKKLKSEFNEPGEDFTEVHQNWNAHSSASEHAKGYRNREFTRGFSRARYPRSCHGRPPPQHFYNSEHMVSQETSGFPSQRQNNPIMPQYPFPLPVFDMHNFPLRPPPPPPPPPVNMGWATPNMAAHPLLNLPYSLPPPPPPPPLPPPPSSGDSNSHFGPYY

SEQ ID NO: 472 - DNA, 2775 bp, Homo sapiens
aatctttaggatctgagcaggagaaataccagcggatcttccccactctgctcccttccattcccacccttccttctttaataagcaggagcgaaaaagacaaattccaaagaggattgttcagttcaagggaatgaagaattcagaataattttggtaaatggattccaatatggggaataagaataagctgaacagttgacctgctttgaagaaacatactgtccatttgtctaaaataatctataacaaccaaaccaatcaaaatgaattcaacattattttcccaggttgaaaatcattcagtccactctaatttctcagagaagaatgcccagcttctggcttttgaaaatgatgattgtcatctgcccttggccatgatatttaccttagctcttgcttatggagctgtgatcattcttggtgtctctggaaacctggccttgatcataatcatcttgaaacaaaaggagatgagaaatgttaccaacatcctgattgtgaacctttccttctcagacttgcttgttgccatcatgtgtctcccctttacatttgtctacacattaatggaccactgggtctttggtgaggcgatgtgtaagttgaatccttttgtgcaatgtgtttcaatcactgtgtccattttctctctggttctcattgctgtggaacgacatcagctgataatcaaccctcgagggtggagaccaaataatagacatgcttatgtaggtattgctgtgatttgggtccttgctgtggcttcttctttgcctttcctgatctaccaagtaatgactgatgagccgttccaaaatgtaacacttgatgcgtacaaagacaaatacgtgtgctttgatcaatttccatcggactctcataggttgtcttataccactctcctcttggtgctgcagtattttggtccactttgttttatatttatttgctacttcaagatatatatacgcctaaaaaggagaaacaacatgatggacaagatgagagacaataagtacaggtccagtgaaaccaaaagaatcaatatcatgctgctctccattgtggtagcatttgcagtctgctggctccctcttaccatctttaacactgtgtttgattggaatcatcagatcattgctacctgcaaccacaatctgttattcctgctctgccacctcacagcaatgatatccacttgtgtcaaccccatattttatgggttcctgaacaaaaacttccagagagacttgcagttcttcttcaacttttgtgatttccggtctcgggatgatgattatgaaacaatagccatgtccacgatgcacacagatgtttccaaaacttctttgaagcaagcaagcccagtcgcatttaaaaaaatcaacaacaatgatgataatgaaaaaatctgaaactacttatagcctatggtcccggatgacatctgtttaaaaacaagcacaacctgcaacatactttgattacctgttctcccaaggaatggggttgaaatcatttgaaaatgactaagattttcttgtcttgctttttactgcttttgttgtagttgtcataattacatttggaacaaaaggtgtgggctttggggtcttctggaaatagttttgaccagacatctttgaagtgctttttgtgaatttatgcatataatataaagacttttatactgtacttattggaatgaaatttctttaaagtattactattaactgacttcagaagtacctgccatccaatacggtcattagattgggtcatcttgattagattagattagattagattgtcaacagattgggccatccttactttatgataggcatcattttagtgtgttacaatagtaacagtatgcaaaagcagcattcaggagccgaaagatagtctgaagtcattcagaagtggtttgaggtttctgttttttggtggtttttgtttgttttttttttttttcaccttaagggaggatttaatttgctcccaactgattgtcacttaaatgaaaatttaaaaatgaataaaaagacatacttctcagctgcaaatattatggagaattggggcacccacaggaatgaagagagaaagcagctccctaacttcaaaaccattttggtacctgacaacaagagcattttagagtaattaatttaataaagtaaattagtattgctgcaaatagttaaattatatttatttgaattgatggtcaagagattttccattttttttacagactgttcagtgtttgtcaagctttctggcataaatatgtactcaaaaggcatttccgcttacaatttgtagaaacacaaaatgcgttttccatacagcagtgcctatatagtgactgatttttaactttcaatgtccatctttcaaaggaagtaacaccaaggtacaatgttaaaggaatattcactttacctagcagggaaaaatacacaaaaactgcagatacttcatatagcccattttaacttgtataaactgtgtgacttgtggcgtcttataaataatgcactgtaaagattactgaatagttgtgtcatgttaatgtgcctaatttcatgtatcttgtaatcatgattgagcctcagaatcatttggagaaactatattttaaagaacaagacatacttcaatgtattatacagataaagtattacatgtgtttgattttaaaagggcggacattttattaaaatcaatattgtttttgctttttcaaaaaaaaaaaaaaaa

SEQ ID NO: 473 - protein, 384 aa, Homo sapiens
MNSTLFSQVENHSVHSNFSEKNAQLLAFENDDCHLPLAMIFTLALAYGAVIILGVSGNLALIIIILKQKEMRNVTNILIVNLSFSDLLVAIMCLPFTFVYTLMDHWVFGEAMCKLNPFVQCVSITVSIFSLVLIAVERHQLIINPRGWRPNNRHAYVGIAVIWVLAVASSLPFLIYQVMTDEPFQNVTLDAYKDKYVCFDQFPSDSHRLSYTTLLLVLQYFGPLCFIFICYFKIYIRLKRRNNMMDKMRDNKYRSSETKRINIMLLSIVVAFAVCWLPLTIFNTVFDWNHQIIATCNHNLLFLLCHLTAMISTCVNPIFYGFLNKNFQRDLQFFFNFCDFRSRDDDYETIAMSTMHTDVSKTSLKQASPVAFKKINNNDDNEKI

SEQ ID NO: 474 - DNA, 1225 bp, Homo sapiens
aaatattcagctcatggttctcccctaaaaaaactaaaaagcagctaagcgctgggaacaaatctgacttaatgcattttctcagtgggccaaagaaaggagggccgattgactgctttgactttttaaaggtcttctctttgttcacttataaagtgaggaaaacaaattctcggcactggcgtgagagttatttgagcgtcacaaaagaaagcaaaagaaaatattagtgccattattgtggcgaatttcatgtttcccagcgagccctttgattcctggtttgggctggcgctcgagctctccagccgggtatgacttcggccacaagatggcactgacctgcaaacaaagaaaagcacagtggcaccgactttttcaagcctcgggaaactgccctgccttccccggagtcgaggactgtggggattagggcttcctttcccctgcgcgggaggtctgtgtcgaataatgtgtggcttctgttggattgcttttctttccaaaattcctaggcaatgcttccccgaggtgtgcacctttgtgaggtgtttgtggggttgggggagcttcaggcgctactcgcgggacgccgtcacgtgatccgggatgaggtggagttcggctttaaggaggcgtctcttcctagcttcatcaatctttaggatctgagcaggagaaataccagcggatcttccccactctgctcccttccattcccacccttccttctttaataagcaggagcgaaaaagacaaattccaaagagggtaagttgcgagtttatgcctttccagagacttctgcgaaatctctcattgacaaggtgaaggatgagaggggaagaaaaacgatgcgagtgtccgaaactggctctgggggaccaaggtggggtctccagtgcaggcaggtcgcaggttgctccaaatcaccggaccgttcgcgggctcctgccgaagggtatggggacgacgcgggtgaaaggagagggtaccctacgcggagttcgggctttcccaccacctgctcccggggaatttctggatggggatccaagttttcctttaccccggttctctttaaaaggccgaggcactgggaaggcgcccgagttcgcctatcccacacccgctcattttccttacgtgtcttgagctggctggaggcgctggctctggccgcaccggagttttcgcggagtaactggctgggatgagccggaga

SEQ ID NO: 475 - protein, 120 aa, Homo sapiens
MRVSETGSGGPRWGLQCRQVAGCSKSPDRSRAPAEGYGDDAGERRGYPTRSSGFPTTCSRGISGWGSKFSFTPVLFKRPRHWEGARVRLSHTRSFSLRVLSWLEALALAAPEFSRSNWLG

SEQ ID NO: 476 - DNA, 1936 bp, Homo sapiens
agcgatcgcgctgggccgcgctcccgggagcccagggcctgcagcggccggggcgccccgaggtctgctcattgtgtttttcaggaaaaaggaagggaaagggtgttacaaggaaaggctatcggtaacaactgacctgccacaaagttagaagaaaggattgattcaagaaagactataatatggatttagagctcgacgagtattataacaagacacttgccacagagaataatactgctgccactcggaattctgatttcccagtctgggatgactataaaagcagtgtagatgacttacagtattttctgattgggctctatacatttgtaagtcttcttggctttatggggaatctacttattttaatggctctcatgaaaaagcgtaatcagaagactacggtaaacttcctcataggcaatctggccttttctgatatcttggttgtgctgttttgctcacctttcacactgacgtctgtcttgctggatcagtggatgtttggcaaagtcatgtgccatattatgccttttcttcaatgtgtgtcagttttggtttcaactttaattttaatatcaattgccattgtcaggtatcatatgataaaacatcccatatctaataatttaacagcaaaccatggctactttctgatagctactgtctggacactaggttttgccatctgttctccccttccagtgtttcacagtcttgtggaacttcaagaaacatttggttcagcattgctgagcagcaggtatttatgtgttgagtcatggccatctgattcatacagaattgcctttactatctctttattgctagttcagtatattctgcccttagtttgtcttactgtaagtcatacaagtgtctgcagaagtataagctgtggattgtccaacaaagaaaacagacttgaagaaaatgagatgatcaacttaactcttcatccatccaaaaagagtgggcctcaggtgaaactctctggcagccataaatggagttattcattcatcaaaaaacacagaagaagatatagcaagaagacagcatgtgtgttacctgctccagaaagaccttctcaagagaaccactccagaatacttccagaaaactttggctctgtaagaagtcagctctcttcatccagtaagttcataccaggggtccccacttgctttgagataaaacctgaagaaaattcagatgttcatgaattgagagtaaaacgttctgttacaagaataaaaaagagatctcgaagtgttttctacagactgaccatactgatattagtatttgctgttagttggatgccactacaccttttccatgtggtaactgattttaatgacaatcttatttcaaataggcatttcaagttggtgtattgcatttgtcatttgttgggcatgatgtcctgttgtcttaatccaattctatatgggtttcttaataatgggattaaagctgatttagtgtcccttatacactgtcttcatatgtaataattctcactgtttaccaaggaaagaacaaatgctggggtcatataaaatatatttatgataactatttacatataataaatagaaattttgttaacatggaatttaatttatgtgaaagagttctggattcaaatgtcagttcataatatatggaagataattttatgtgttatagtaggattaatttatttagttgtgcagtcagtgtcaatccaatctgtaatttcactttagaaggttgtattaccttccacttccatgttgtcttataaacaaatgaattgtattttttgttgaaagtaaaagttatatctaaccaaaaaaaaaaaaaaaaaaaaaaaaaaaaaaaaaaaaaaaaaaaaaaaaaaaaaaaaaaaaaaaaaaaaaaaaaaaaaaaaaaaaaaaaaaaaaaa

SEQ ID NO: 477 - protein, 445 aa, Homo sapiens
MDLELDEYYNKTLATENNTAATRNSDFPVWDDYKSSVDDLQYFLIGLYTFVSLLGFMGNLLILMALMKKRNQKTTVNFLIGNLAFSDILVVLFCSPFTLTSVLLDQWMFGKVMCHIMPFLQCVSVLVSTLILISIAIVRYHMIKHPISNNLTANHGYFLIATVWTLGFAICSPLPVFHSLVELQETFGSALLSSRYLCVESWPSDSYRIAFTISLLLVQYILPLVCLTVSHTSVCRSISCGLSNKENRLEENEMINLTLHPSKKSGPQVKLSGSHKWSYSFIKKHRRRYSKKTACVLPAPERPSQENHSRILPENFGSVRSQLSSSSKFIPGVPTCFEIKPEENSDVHELRVKRSVTRIKKRSRSVFYRLTILILVFAVSWMPLHLFHVVTDFNDNLISNRHFKLVYCICHLLGMMSCCLNPILYGFLNNGIKADLVSLIHCLHM

SEQ ID NO: 478 - DNA, 490 bp, Homo sapiens
atgaagttcaatccctttgtgacttctgacagaagcaagaaccacaaaagtcatttcagtgcaccttcccacattcgcaggaagattttgtcttcctctctttccaaagagctgagacagaagtacgaagtacgacgtttgatccatgcccatccaaaaggatgatgaagttcaggttgtacgaggacactataaaggtcagcaacttggcaaagtagttcaggtttacaggaaagaaatatgtcatctacattgaacaggtgcagtgggaaaaggctaatggcacaactgtccatgtaggcattcaccccaataaggtagttatcactaggctaaaactggacaaagactgcaaaaagatccttgaaaaggaagccaaatctcgccaagtaggaaaagaaaagggcaaatacaaggaagaaacaattgagaagatgcaggaataaagtaatcttatatacaagctttggttaaaacttgaaaaaaaaaa

SEQ ID NO: 479 - DNA, 1164 bp, Homo sapiens
atggcctttgcagcctctctggctgagctccaagcagaggccagctgccccatgtgcctggattacatgaaggacccagtcaccactcactgtgggcacaacttctgtcgctcctgcatccaccagtgctgggaagacttacaggatgtcctcccctgtcctgtctgcctccgtcactgccctgatgagaacctcaggagcaaacacccagttgcgccacatgactgatatggttcagcagcttctcaccgtgacgagcaagagggaatggcaggaagaggagcccctctgtgagaagcacagtcagggtctagtcctgctctgtgagaaggacctggagctattgtgtccccagtgcaaggtctcctctgaccatcaggatcatcccttgttgcccattgagcaagctgcagctacacacagaaggaagctcaaaagctacattaagccactaaagaaggaaactgaacatgccaagatgcggtgtgaagtcccaattttgagatcacttaatgtgaaaaggaagatggcaacatggaggaaggaattacaatttgaatttaaagaaattaagtctttcttggtaaaggaacgagctaatctcttaaatgaagtaacagagaagagttttcaggcagacctggatatgctgacaggtattgagaacagctacaacacatatgaccacctgaaaacccctgcagtcttctctccaccttattttggcctgaaaaaaatgatgagcccatttcaggaagatttgacactagatccagaaacagcccaccctagtcttattatctcaagagacagaaactgtgagggatttgatgctgggagacacttttggcaagtagaagtgagagcaaaggtacatggttccttggtgtgtgtaaagaaatgtttcccagagatggtcttacatcaccaactccacagatggggtgctggcaaattcagccattccgtagttcatgcagtacaaggaacacagaagtcctgcaagttggcatttttctggactatgagttgggagaagtttccttttataatttaaataccagatcatatgtgtatactttcactggtaagtttacagaaaagcttatgccttatttctctattgcaccttcttcacaagctgttacaatcacattgtcatag

SEQ ID NO: 480 - DNA, 801 bp, Homo sapiens
tctttctgccaccatcttggttcctcgttccctgcacaaaatgccctgtgaagccacagaaaccgtccctgctacagagcaggagttgccgcagccgcaggctgagacagggtctggaacagaatctgacagtgatgaatcagtaccagagcctgaagaacaggattccacccagacgtccacacaagaagcccagctggtggcagcagctgaaattgatgaagagccagtcagtaaagcaaaacagatttggagtgaaaagaaggcacagaaggctatgtccaaactgggtcttcgacaggttacaggagtcactagagtcgctatccggaaatctaagaatatcctttttgtcatcacaaaaccaaatgtctgcaagagccctgctttggatacctacatagtttctggggaagccaagatcgaagatttatctgagcaagcacaactagcagctgctgagaaattcaatgttcaaggtgaagctgtctcaaacattcaagaaaacacacaaactccaactgtacaaaaggagagtgaagaagaagaggtcgatgaaacaggtgtagaagttaaggacatagaattggtcatgtcacaagcaaatgtgtggagagcaaaggcagtccatgccctgaagaacaacagtaatgatattgtaagtgccattatggaattaacaatgtaaccatctgaaagcaacttttcttggtgtctcaaaggagtaactgcagcttggtttgaaatttgtactgtttctatcataaataaagttatggcttcttgttggaaaaaaaaaac

SEQ ID NO: 481 - protein, 215 aa, Homo sapiens [sequence omitted]

SEQ ID NO: 482 - DNA, 1300 bp, Homo sapiens
atggcctttgcagcctctctggctgagctccaagcagaggccagctgccccatctgcctggattacatgaaggaccactcattgtgggcacaacttctgtcgctcctgcatccacaagtgctgggaagacctacaagatgtcctcccctgtcctgtctgcctccgtcactgccctgatgagaacctcaggagcaacacccagttgtgccacatgactgatatggttcagcagcttcttaccatgagaagcaagaggaaatggcaggaagaggagcccctgtgtgggaagcacagtcagcgtctggctctgttctgtgagaagggcctggagctgttgtgtccccagtgcagggtctcctctgaccaccagtatcaccgcctgatgcccattgagcaagctgcagccagaaacaggagaaagctcgaaagctacattaagccactaaagaaggaaactgaacatgccaagatgcggtgtgaagtcccaattttgagttctcttaatgtgaaaaggaagatggcaacatggaggaaggaattacaatctgaatttaaagaaattaaatatttcttggtaaagaaacaagctgcagttcatgcaagattacttactgaagagaaggatgataaagaaaaactcactgaaaaccgaagacaaatttcagaccacttatccacactacagaatctcttaaatgaagtaacagagaagtgttttcgggcagacctggatgtgctgacaggtgttgagaacacctacaacacatatgacaacctgaaaacccctgcagtcttctcatacaaattaaagaaggagagtttgagtttccctccacattattttggcctgcaaagaattataagcacatttcaagaagatttgatgctagatccagaaacagcccaccctagtcttattatctcaagagatagaaaaaatgtgatatttaggatgaggaagccacactttactgataatcctccgtcatttagtttttacccagctgtctggagctgtgagggctttgatgctgggagacacttttgttcatgtagtacaaggaatacggaagtcctgcaaattggcgtttttctggactatgaattgggagaagtttcattttataatttaaaaaccagatcatatgtttacactttcactacctcccaccccatcacaaccattctgcaggtccctacccctgtccccttcaccaacccaggaccctgcaggagcaatcagagaacaagagagaactgccctctgggacctgtcacttcccccatgctgactgcataa

SEQ ID NO: 483 - DNA, 1608 bp, Homo sapiens
ctgccaaccaccgcgcaggctgagccccaggcaggaagcagcccacttggtggggttggggtatgagtccttcctcgcgggggctcggtgggtcctgagtattctttggccggatttgctgatccgtctgctccagcataggttcacaaagtacagtccgcaggccagcagcatcatctgggaacttaggaaaaaaccagccctactgagtcagaaactggggatgtggcccaggcaatcttttaccaagacctccaggtgattataatgcaaggaaggattccctatcttggacctgaggctgctttcttgaagaaaacttgactttatttcatttagtgggaagagcagcagcccagctattaagttctaatatgcaacaggctgcaggctgtgaagtgttcgtggcagtagactctgaagctaaggagctgagggcttaacaagtttctagaagctgccatcaacatgccaagtcagtaaaactgatagttgatcagatttcaaggtctggggaggatatccactgtgtactgggtcttgagctctagagagctaggccttgctaaaataaaagaattaccttacctaccatctttgttcaagtctcaatggaatttgttacggccctggctgacctccgagcagaggctagctgtcccatctgtctggactacttgaaagacccagtgaccatcagctgtgggcataacttctgtctctcctgcatcattatgtcctggaaggatctacatgatagtttcccctgccccttttgccacttttgctgtccagaaaggaaatttataagcaatccccagctgggtagtttgactgaaattgctaagcaactccagataagaagcaagaagaggaagaggcaggaagagaagcatgtgtgtaagaagcataatcaggttttgactttcttctgtcagaaagacctagagcttttatgtccaaggtgcagtttgtccactgatcaccagcatcactgtgtttggcccataaagaaggctgcctcctatcataggaaaaaactggaggaatacaatgcaccgtggaaggagagagtggaactaattgaaaaagtcataactatgcaaaccaggaaatcactggaactgaagaaaaagatggagtctccttctgtcaccaggctggagtgcagttgcacgatctcggctcacttcaacctccgcctcccgggatcaagcgattcttctgcctctggctcctgagtagctgggactacagagatggttgcccaggctggtctggaactcctgacctcaagcgatcttcctgccttgacctcccaaagtgctgggattatagccatgctgccaaccatgtgtagggtatgtatatgttcctataccataataaaattttaattacatttgtaaggtatgtaattatatgtatttctgtataatatgtacatataaatatgctaattaatacaagaacatattgaattataatcaatatatataattttagatgtatattggaatgtttatctttctaataatacaaaactgatggttaaaaaataaaatgcacaaactccccaaaaaaaaaaaaaaaaaaaaaaaaaaaaaa

SEQ ID NO: 484 - protein, 209 aa, Homo sapiens
MEFVTALADLRAEASCPICLDYLKDPVTISCGHNFCLSCIIMSWKDLHDSFPCPFCHFCCPERKFISNPQLGSLTEIAKQLQIRSKKRKRQEEKHVCKKHNQVLTFFCQKDLELLCPRCSLSTDHQHHCVWPIKKAASYHRKKLEEYNAPWKERVELIEKVITMQTRKSLELKKKMESPSVTRLECSCTISAHFNLRLPGSSDSSASGS

SEQ ID NO: 485 - DNA, 2174 bp, Homo sapiens
gcttcgacttccgggtgagaccgtgaaggtgtggcgcgacgttggagaccggggcagcgccatgtaccacagtggatggaaggatgcgcggtgcggcggggcagctgtcctcttctccccggacccagcgcctggagagccagccctgcagggtgggctgggcgagccaaactgcgttcctggtgcagggcttcgggtctccctaacagaccttatacgctgaccggcggccgccatggcagtgtctctttgctcagacatccagggacgaccacattcgtccaacagcggtcgctccaccaatcctgggagaagcgaatcgttttctccgcgtgccctgtcagccgctcatggtgcccagagaggaattttagtggcagcattccggctgtcacgccaccgaaattgccaggccactccaagtcagaaggaccaccaggaaaagtcaggaagagaaccaccatcaggtcccagcctctttttgtgacaaggactagagggtttgggtctgcagtgggctggctcccgctgggctcacctgtcctatagagcaggctgcctcaaggaagaagctcacaggggacatctgacatctgaaacagcaagtgtaaaatgctttaaataagccaaaactaaaccaatcgttatgttaactaaaaatacatgaatgctaccgaagatagtcgaatattagaggaagagattaaactctgattttgagcactttgtgctttattcggaaaatgaataagatgcagttctgaaaacctgaaaatataaagaataggatatgatacgcacactagatgaaaacaaaactttcagaccatattttcttatttaaagctctaataagtgagatagcagagtaaactattcactcaaataattagtaactgatataagggtatgtatcaataacaggtattaagacaaaaactttatgagcttttccattttaacaagggatgatgattctagacttctgccacaacattatggtcgacaaaacattcttaattcattttacatagatctgactctagattctgaaacagcaagtcataatcttgtatctctaaagatagaatacagtgcgatttggaaagacaccacaaaaactcatgatccaaaaaagattaaggctgttattaccaggaggaagagaaagaggacaaaatcaaactggatagatataatagagttgtttgttagaattgtcttcccaggagatggaaaaagacgccatcacaataggattcatgctttagttttcagctatagaaatgtaataactttgccaaagtaattacactacatagagtggcaatcgttctattaaaagtaagacccagtaatgttaggatttgttctggacaatgaaggggatgaggtttaatcttatgacttgaatgccaggtctgaaatcttttcttcaagtgatatttttatgaaactacttaggctgtgtttcacactgggtatgatttctaacctcttataacctgtacagtaatagattatgaaggatgaattatttgaaagctattttgtattatttaggagaggagctcttcaattctgaattgtctgccacttacaagcagaagaaagtttttttctttcattattttagcaactatcaataaaacagtattagaaatgcctactcttcagagatgtaatgggaataaattgtaaagtacttttgatattctaagatgaaagatggtattacacagtcaataattcaatgcttcccacattatgaattttatcaaaattatgtagagagctattagttcattccagcaacaaaacaggcttatataaaaacaaaaacctcctgggtcatgccatcctacaccaaattcctgttaaacagaggcatgatttattccagtgaccttgctatttcttcataactgtaatatgtctaatgttagacattttaaattaacattctattagataaactgagaatttaggtctctcgcaccacccaggcacatactctatctttccccacaaatatccaaatatggtaatataattggattaatacgttcatatgactatataattgttcacagctgagccacttaggtgctataattataatttctttgatacacaaattttgttttattgtgattaaaattgcctgatttctt

SEQ ID NO: 486 - protein, 157 aa, Homo sapiens
MEGCAVRRGSCPLLPGPSAWRASPAGWAGRAKLRSWCRASGLPNRPYTLTGGRHGSVSLLRHPGTTTFVQQRSLHQSWEKRIVFSACPVSRSWCPERNFSGSIPAVTPPKLPGHSKSEGPPGKVRKRTTIRSQPLFVTRTRGFGSAVGWLPLGSPVL

SEQ ID NO: 487 - DNA, 1910 bp, Homo sapiens
atgagaattctcatggacaaaagctccccatgcaaaggtcccgtggcaggagagttccctgtgctgagtgtggaaatagaggtgaagggagctcatttacagcctggccctgcccaggctcctcaggggcagggccgcaagtcctcggtggacggggccctaagtgcgaccttgctgctggtgcatataaatctgggtctcagcgctgacctcagtctggtgcaagagtgtcctcggtcgacgctcttggaggtccgtgtccaagaccattctgaatcatctgctccaggtaagccgggagtaggactcagtacctggggaagatggagcctagaaagacccctgactccctgggtgcccgctctgcctaacgagagccggcaacttgtgaaggaatccaaactggcatctggctattttaaaatagatgccgtttattatggttcccaaggattgacactacagaatcgggaccgggagaagatggaggtcgcagttactgggactgcagatatccaaacggtcacatttactacagtcgcagggttagtaggagagctcatggcactctccccgctgctctataacactgtgtcagggagcctgatggcggaggcagcagccctggcaggactccaggaagaggccaagtgctccatctgtctggattacctgagcaatcccgttcccattgaatgtgaacacaacttctgtcattcctgcatccaacagtcttggctggatctacaggaattgttctcttgccctgtctgtagtcaccaatgcccagagggaaacttcaggagcaacacccagctgggaaggatgattgacattgccaagctactccagagagccagaggcaatgacgtcaggcaggacaagatgcccctgtgggagaagcacaaccagcccctgagtgttttctgcaaggaggacctggtggtgttgtgtcccctgtgcactcagacccatgaccaccaaggccaccatcaggacagaaagttgttggagctcagagagaagacagaaagccaaaggcaggaattatcctctcagttgaagcacctaacgaagtttgttgaccatgaaaagcaggcagctttctgtagattagctgaggaaaagacggacattcagaagaaactcggtgcaaacataagggcattttcagaacacatttccaccctgaaaggtctgcttacgcaggtggccgagatgagtgtgatggcagatgtgaaactgctgatggatgtaaggaccgtcctgcacaggtgtaaggcctgcaggccccagctgtccactctatgcagctccagaaggaaggaaacaggcttcccctgcagtactcggctcttcagaaaatcatacagaagtttagagaagttactctggatcctgaaagtgcacatcctcatctgcgtgtctctgaggataagaaatgtgtgacatttgtgaaggaaagtcagagagttcactggaatccaaagagattgttgtcccatccagtggtcctgggttctgagggatttgagtgtggccggcattactgggaggtgcaagtggatgacaagccaatgtggaccgtgggggtgtgtaaggaatccctgcccaggaagggaaagtggcccctgtcaggacagagcatgtgctgggctatccagctgcagaatggtgagtgtgtggcctgaggcgctgttcctgtcatccttccgctaaaggagaagcccagaggaattggcatttatctggactacaagttgggcgagatctccttttacaatttgaatgacaggtctcacatccattccttcactgatacattttcagaagtactgaagccttatttctgtatggggcatgattcaaaacctcttagaatctgcataatgacagattatgatggctga

SEQ ID NO: 488 - DNA, 708 bp, Homo sapiens
atgagatgggctgccccaggaaagaagacatctggtctgcaacagaaaaatattgaagtgaaaacaaaaaagaacaaacagaaaacacctggaaatggagatggtggcagtaccagtgagactccccagcctcctcgaaagaaaagggcccaggtagatcctactgttgaaaatgaggaaacattcatgaacagagttgaagttaaagtaaagattcctgaagagctaaaaccatggcttgttgatgactgggacttaattaccaggcaaaaacagctcttctatcttcctgccgagaagaatgtggattccattcttgaggactatgcaaattacaagaaatctcatggaaacacagataataaggagtatgcagttaatgaagttgtggcagggataaaagaatacttcaacctaatgttgggcacccagctactcaacaaatttgagagaccacagtatgccgaaattcttgcagattgtcccgatgcacccatgtcccaggtgtatggagtgccacatctcctgagattatctgtacaaattggagcaatgttggcctatacacctctgaatgagaagagccttgctttattactcaattatcttcacgatttcctaaagtacctggcaaagaattctgcaactttgtttagtgccagcgattatgaagtggctcttcctgagtaccatcggaaagctgtgtga

SEQ ID NO: 489 - protein, 235 aa, Homo sapiens
MRWAAPGKKTSGLQQKNIEVKTKKNKQKTPGNGDGGSTSETPQPPRKKRAQVDPTVENEETFMNRVEVKVKIPEELKPWLVDDWDLITRQKQLFYLPAEKNVDSILEDYANYKKSHGNTDNKEYAVNEVVAGIKEYFNLMLGTQLLNKFERPQYAEILADCPDAPMSQVYGVPHLLRLSVQIGAMLAYTPLNEKSLALLLNYLHDFLKYLAKNSATLFSASDYEVALPEYHRKAV

SEQ ID NO: 490 - DNA, 2592 bp, Homo sapiens
ggctgcaccatgcacgtgaacggcaaagtggcgctggtgaccggcgcggctcagggcataggcagagcctttgcagaggcgctgctgcttaagggcgccaaggtagcgctggtggattggaatcttgaagcaggtgtacagtgtaaagctgccctggatgagcagtttgaacctcagaagactctgttcatccagtgcgatgtggctgaccagcaacaactgagagacacttttagaaaagttgtagaccactttggaagactggacattttggtcaataatgctggagtgaataatgagaaaaactgggaaaaaactctgcaaattaatttggtttctgttatcagtggaacctatcttggtttggattacatgagtaagcaaaatggaggtgaaggcggcatcattatcaatatgtcatctttagcaggactcatgcccgttgcacagcagccggtttattgtgcttcaaagcatggcatagttggattcacacgctcagcagcgttggctgctaatcttatgaacagtggtgtgagactgaatgccatttgtccaggctttgttaacacagccatccttgaatcaattgaaaaagaagaaaacatgggacaatatatagaatataaggatcatatcaaggatatgattaaatactatggaattttggacccaccattgattgccaatggattgataacactcattgaagatgatgctttaaatggtgctattatgaagatcacaacttctaagggaattcattttcaagactatgatacaactccatttcaagcaaaaacccaatgaacagcttatgtgttagccatagctgaaaataagcacaaatagcttatattcagatcctatcttcatttgaatatagcttttaaatgaaatgttacagtttgaagttttccttcatgcacttggtgataaacgttttctaaatttttagttaagtatatggataaaaagttatgaactattaaaaatgtgatgtggaccaaaggctaggttgtaatcttgatagtctaaaaaatgatcaaaacaaatgattttcaaggaatattcaatattctgcctttcagaaagtgtatttatatctgtgcttcataaatattaatgttcttcagaacatcattttaaaggagatacttgaattgttatttaaatcaaaccagatgtaaaacactcacatacaagttcatactttaaaagaggaaagctacttaacaatgacaaatatttcacaataataatttttacttatataccatctttcaactgaacatttcagttcttccaagagcttcttagagtagtatattttgggggcagtcaaggaataaactacagtgtaaacatatcccagatgaaaactgctgtatggaaaaatgacagaaagtaactgattgacactgttgattcacagttcagcctcctatctgggaaagacatttctttcctctgctcactttaagaacttttaccgactccaaaaatctcaggaattaaacttttaacagttacagcaataaagaatagttagtactccaaaaatattatatttaagatgctcaacaagaaaaaaatgcaaatgtaatatttttttcaaattacttctttattgacttgtccaaatttcaaaagtgcctacccttcaataaaacttttttattctgatctccataaattacttagtcttctatgtatagctatcaaggaaataaaaccaattttgccacagccacaactgtaaatgtttttgtacccatgctgaaactcataacaacacagacataaaaatagctgtgaggttttgctttttttgttgtcagctatcttaagaatcattaaatacacctgctttgggtaaaactctttgcaagcagtaattaacactagtaacagtgaaagcacaagatttccaaatcagtcgttttctcaaaaaaatatcgtataagtgactcatcctgtctgctaactccagacctcccagcttgaagccaaatctttccatgtgagattgatatggatttcctagaagtactggaatgttgtcatatcttgccctattttaattctgctatagaaaacaattgccttcacttttaaggagtaatttgaatattaataactctggtctagattttcatataatgtattaaagacaaagtagtgaacatcaatgaacatctgatagagataaactgtaatcaggcataagcttgtttgtatgttctggcagtgactaatcagtaaatgatgtcggtttgcccagtatcacttatcttctgtatttttcctctgtcgtgtaaatagtataaccttttcatttatggacaattttttggactagtagccttcaatatacattctgctttgaattaattttttcaaatcaataaattatgtagacatttaaaatcaaatatcaagtagaattgaaaaatgtgagttacataagttaaaaacttactttaaatcttaccttctataggtagctctaaataaattcatatggttatatggcaaaaaaaaaaaaaaaaaaaaaaaaaaaaaaaaaaaaaaaaaaaaaaaaaaaaaaaa

SEQ ID NO: 491 - protein, 266 aa, Homo sapiens [sequence omitted]

SEQ ID NO: 492 - DNA, 2422 bp, Homo sapiens
aagaggactgtcagaaggacgtagaaggcacggttttactgtgaggagcaaagattctttacctacgcattttacaagaaatgtgcagaaagccattgataaatatacctgcggaagccatacacccacgggagcccacacctcttggtctgggtcggccacacagagctctaccaccggctcatccacggagaggggctccgtttattcctggagagatgacgaatttgacgaagccagttcacagtcagtgcagcggttactctgggaggtggaggaaatgttatttgaagggaaagtgaaccctcagacccagagtctgctggccgaatgcggggagtggacaagaagatccctccatttgagagtattaggaagacagctgatcctgcccactgacaaaggcgtccagcatttccagggcagcactcctgcctccgcagtccacagacccccgctcagtgcctgcggacacagcagcaacatcagagagttgtgcatttctggctctcaaatagtcccagcagcactctcagcctctgccctgccaggccctgatgacacaggggttgctgacctaacggcacgttcatccctggaagaagaggtttaccatgtggatggaaagattgaggagtatttcgcttttgacagaaaagaggatgatgatgaatgtcttgaacaaaaaccagctcagcccggtaggaaatggcgcaaactcggacttcctcctgtttccccgcgtgactgtgtcaaagatgccgtggcagcagaagtgtttgatcacgtctggacaaatatggtagaacttttggaagagctgattagaaaacactgggaaactacactcacagaagggaaaaaacagagagaaacattgaaagtggctggaaacagatttccgcacgtcctcgttccacacgctcacgccgatggagccagtggccccccgtccggacacgccgaggctcacggcatctccctggcttctcgtctgaacccgccccagattcatcacttctccagcagtttttatagtgacatgaatggtgtcatgacaattcaagcaaaaccgcttcagcggagacctgcctattttgctgacagaacgcagaatgagaaggaggacaaagcatcgggtggaggggcaggtgctctctcctccgcaccgcacagactgggacgggcctcagacactcatggattatcaccttctgcaaagaaaacaccagtgccctggaggctgccttctcttgcttcagattcacagagactaaaaactcccaacatctatagtgacgaagttcttcggggaacaaaactgccgactggcgtggaccacatggcttccccactggttcaaacgtcacggagcaggttccccccgctagtcacggagaccagggggcagaatacagcagttcctggatgccgccttgtttcttacagaggaaggcatctacaaaaccgtgtgttgagtgccatgcctgacggtacagaacgatcgcgtcttcgagaaagaacagccaccctggaacggttgtcaaggcccagcacaacccacacgttccggcagtcggatacgcctcgaaaaagttcattgacacaaatggaatttgctgctcacacatggacaggtcaaagtattttgacaggttcacaatatgtgcctaaatcttttcagaggacaactttgactttcaagaggagattccaagtgacatcttgaaaccacctcaccagaaccattggagcacctgtggcctcggcacactgcttatcacttgaaaaatggaggaacaagtgttatatttatctgtgtgtctgacagtgtgagatgttagaccgagagaaaagcaaacaaataaatcacttaatcttgaacactttgcactgtaaagagagtgaaagtcaaacccaccaagctgccttgctgaaagcatctccaaggttctgtaggctttgttcagaagcccctgatgtgtgtttgcagtccgtcattttatcaatgatacgcaaacataattagcatgtgtatgtactcacacactaattacatgtaagaatatattatctaggaatatgtcatttgtaactttgtactctgacgtattttctagtctcaccctattagtaattctgtcaaaatcctagacgctagtagatattagtatttgagacaatatgtcagagtctgaataagactcagcttgttctagtcatgctgagtttctcatatattttttaaaagtgcttccgccatgaacctctttgagaaatgtcagtggcaaaatctcccaagctaattttctttttctatgttccatcttcaaattcagacagttcacgtgaagtaccccacatttattgatcttagggttgaatataaacgcaattaaaagctaaaaaaaaaaaaaaaaaa

SEQ ID NO: 493 - protein, 482 aa, Homo sapiens
MLFEGKVNPQTQSLLAECGEWTRRSLHLRVLGRQLILPTDKGVQHFQGSTPASAVHRPPLSACGHSSNIRELCISGSQIVPAALSASALPGPDDTGVADLTARSSLEEEVYHVDGKIEEYFAFDRKEDDDECLEQKPAQPGRKWRKLGLPPVSPRDCVKDAVAAEVFDHVWTNMVELLEELIRKHWETTLTEGKKQRETLKVAGNRFPHVLVPHAHADGASGPPSGHAEAHGISLASRLNPPQIHHFSSSFYSDMNGVMTIQAKPLQRRPAYFADRTQNEKEDKASGGGAGALSSAPHRLGRASDTHGLSPSAKKTPVPWRLPSLASDSQRLKTPNIYSDEVLRGTKLPTGVDHMASPLVQTSRSRFPPLVTETRGQNTAVPGCRLVSYRGRHLQNRVLSAMPDGTERSRLRERTATLERLSRPSTTHTFRQSDTPRKSSLTQMEFAAHTWTGQSILTGSQYVPKSFQRTTLTFKRRFQVTS

SEQ ID NO: 494 - DNA, 2721 bp, Homo sapiens
gcggaggatctggagagggaaggggcgtgcgagccccgcggaccccgggcgcgcccgggccgcctgagctgggccagccgcgcggcgggcgcgggcgcgggcgcgggcgcgggcgcgggcgggtggggagccccagccccggggccgcgggggcgcgtgaccggctgtctgcgtggggcccgcgcgcggtgcctctgcctgacggtgcccgagcctagcgcggagcctggcgcgggggctgcgagcacaggcccggggctgatcgtaatcggaagaggactgtcagaaggacgtagaaggcacggttttactgtgaggagcaaagattctttacctacgcattttacaagaaatgtgcagaaagccattgataaatatacctgcaaatccttgtcatccttttcctccagcggaagccatacacccacgggagcccacacctcttggtctgggtcggccacacagagctctaccaccggctcatccacggagaggggctccgtttattcctggagagatgacgaatttgacgaagccagttcacagtcagtgcagcggttactctgggaggtggaggaaatgttatttgaagggaaagtgaaccctcagacccagagtctgctggccgaatgcggggagtggacaagaagatccctccatttgagagtattaggaagacagctgatcctgcccactgacaaaggcgtccagcatttccagggcagcactcctgcctccgcagtccacagacccccgctcagtgcctgcggacacagcagcaacatcagagagttgtgcatttctggctctcaaatagtcccagcagcactctcagcctctgccctgccaggccctgatgacacaggggttgctgacctaacggcacgttcatccctggaagaagaggtttaccatgtggatggaaagattgaggagtatttcgcttttgacagaaaagaggatgatgatgaatgtcttgaacaaaaaccagctcagcccggtaggaaatggcgcaaactcggacttcctcctgtttccccgcgtgactgtgtcaaagatgccgtggcagcagaagtgtttgatcacgtctggacaaatatggtagaacttttggaagagctgattagaaaacactgggaaactacactcacagaagggaaaaaacagagagaaacattgaaagtggctggaaacagatttccgcacgtcctcgttccacacgctcacgccgatggagccagtggccccccgtccggacacgccgaggctcacggcatctccctggcttctcgtctgaacccgccccagattcatcacttctccagcagtttttatagtgacatgaatggtgtcatgacaattcaagcaaaaccgcttcagcggagacctgcctattttgctgacagaacgcagaatgagaaggaggacaaagcatcgggtggaggggcaggtgctctctcctccgcaccgcacagactgggacgggcctcagacactcatggattatcaccttctgcaaagaaaacaccagtgccctggaggctgccttctcttgcttcagattcacagagactaaaaactcccaacatctatagtgacgaagttcttcggggaacaaaactgccgactggcgtggaccacatggcttccccactggttcaaacgtcacggagcaggttccccccgctagtcacggagaccagggggcagaatacagcagttcctggatgccgccttgtttcttacagaggaaggcatctacaaaaccgtgtgttgagtgccatgcctgacggtacagaacgatcgcgtcttcgagaaagaacagccaccctggaacggttgtcaaggcccagcacaacccacacgttccggcagtcggatacgcctcgaaaaagttcattgacacaaatggaatttgctgctcacacatggacaggtcaaagtattttgacaggttcacaatatgtgcctaaatcttttcagaggacaactttgactttcaagaggagattccaagtgacatcttgaaaccacctcaccagaaccattggagcacctgtggcctcggcacactgcttatcacttgaaaaatggaggaacaagtgttatatttatctgtgtgtctgacagtgtgagatgttagaccgagagaaaagcaaacaaataaatcacttaatcttgaacactttgcactgtaaagagagtgaaagtcaaacccaccaagctgccttgctgaaagcatctccaaggttctgtaggctttgttcagaagcccctgatgtgtgtttgcagtccgtcattttatcaatgatacgcaaacataattagcatgtgtatgtactcacacactaattacatgtaagaatatattatctaggaatatgtcatttgtaactttgtactctgacgtattttctagtctcaccctattagtaattctgtcaaaatcctagacgctagtagatattagtatttgagacaatatgtcagagtctgaataagactcagcttgttctagtcatgctgagtttctcatatattttttaaaagtgcttccgccatgaacctctttgagaaatgtcagtggcaaaatctcccaagctaattttctttttctatgttccatcttcaaattcagacagttcacgtgaagtaccccacatttattgatcttagggttgaatataaacgcaattaaaagctaaaaaaaaaaaaaaaaaa

SEQ ID NO: 495 - protein, 482 aa, Homo sapiens; identical to SEQ ID NO: 493

SEQ ID NO: 496 - DNA, 1798 bp, Homo sapiens
cggcgatggggaaactgcagtcgaagcacgccgccgccgcccgcaagcggagagagagcccggaaggggacagcttcgtggcgtccgcgtacgcgagcggccgcaaaggcgcggaggaagcggagcggcgcgcgcgggacaagcaggagctgcccaatggggaccccaaggaggggcctttccgggaggaccagtgtcccctacaggtggcactccccgctgagaaagctgagggccgcgagcacccgggacaactcctcagcgcagatgacggagagagggcagcaaaccgcgagggcccgcgaggaccgggcgggcagcgcctcaacattgacgcactccagtgcgatgtctcggtggaggaggacgaccgccaggagtggacgttcacgctctatgactttgacaactgcgggaaggtcaccagggaggacatgtccagcctcatgcacaccatctatgaggtcgtggatgcctcggtcaaccactcctcgggcagcagcaagaccctccgtgtgaagctaaccgtcagccctgagccctccagcaagaggaaggagggtcctcctgctggccaggaccgggagcccacccgttgcaggatggagggtgaactggcagaggagccaagggtggctgacaggaggttgtctgcacacgtcaggaggcccagtactgacccccagccctgctcggagcgggggccctactgcgtggacgagaacacggagcgcagaaaccactacctggacctcgccgggattgagaactacacgtccagattcggccctgggtcccctcctgtgcaagcaaagcaggagccccagggcagggcctcgcacctccaggcccggtcccgctcccaggagccagatacacatgccgtacaccaccgcaggtcacaggtgctggtggaacacgtcgtgccagcctcggagcctgctgcccgggccctggacacgcagccccggccgaaggggccggagaagcagttcctcaagtcccccaagggctccgggaagccgcctggggtgccagccagcagcaagtccgggaaagccttcagctactacctgccggccgtcctgccgccccaggcccctcaggacggccaccacctcccgcagcccccaccgccaccctacggccacaagcggtaccgccaaaagggcagggagggccactcgccactcaaggccccacacgctcagcctgccacagtggagcacgaggtggtgcgggacctgccgcccacgccagcaggagagggctacgcggtgccagtgatccagcggcacgagcaccaccaccaccacgagcaccaccaccaccaccaccaccaccacttccacccgtcctagcgccactgccaagcacacctcgctcccagcacaccacggcccgcgacctcagggcagggagcagagcagctgccggctgtgtgcccatggggagcccagcccccaccccccacctccgacagcaaacagcaactgactgcaggtgctggcatgatggaggtggtgcaccttggacacgtggacaaggcccaggcgccctctgctcttctgccctcgatgccacatggcggtgaacacatctgaagccactatgtttcctggctctaaggctcgtctgtgtaacccataaaacctgctttgattccaaaatgaggccctggagtgcgcaaggagtgcccggatgcttggggtgggtgttcctcccggggcttcaaggggtgactgctgtaggctgtcccagtgcgaggccgggagcgaatggaaaagctgaggctttg

SEQ ID NO: 497 - protein, 451 aa, Homo sapiens
MGKLQSKHAAAARKRRESPEGDSFVASAYASGRKGAEEAERRARDKQELPNGDPKEGPFREDQCPLQVALPAEKAEGREHPGQLLSADDGERAANREGPRGPGGQRLNIDALQCDVSVEEDDRQEWTFTLYDFDNCGKVTREDMSSLMHTIYEVVDASVNHSSGSSKTLRVKLTVSPEPSSKRKEGPPAGQDREPTRCRMEGELAEEPRVADRRLSAHVRRPSTDPQPCSERGPYCVDENTERRNHYLDLAGIENYTSRFGPGSPPVQAKQEPQGRASHLQARSRSQEPDTHAVHHRRSQVLVEHVVPASEPAARALDTQPRPKGPEKQFLKSPKGSGKPPGVPASSKSGKAFSYYLPAVLPPQAPQDGHHLPQPPPPPYGHKRYRQKGREGHSPLKAPHAQPATVEHEVVRDLPPTPAGEGYAVPVIQRHEHHHHHEHHHHHHHHHFHPS

SEQ ID NO: 498 - DNA, 5316 bp, Homo sapiens
gtggcgtcggcgggagcggcgcagcgcgggccgggccgggacggggactgtcggctgcaggcggccatgcccaccaacttcaccgtggtgcccgtggaggctcacgccgacggcggcggggacgagactgccgagcggacggaggctccgggcacccccgagggccccgagcccgagcgccccagcccgggagatggaaatccaagagaaaacagcccattcctcaacaatgtcgaggtggaacaagagagcttctttgaagggaagaacatggcacttttcgaggaggagatggacagtaaccccatggtgtcctcgctgctcaacaagctggccaactacaccaacctgagccagggcgtggtggagcacgaggaggacgaggagagccggcggcgggaggccaaggctccgcgcatgggcaccttcatcggcgtctacctgccgtgcctgcagaacatcctgggcgtcatcctcttcctgcgcctgacgtggatcgtgggggtggctggtgtcctggagtccttcctcatcgtggccatgtgctgcacatgtacaatgctgaccgccatttccatgagtgcgatcgctaccaacggtgtggtcccagctggcgggtcctactacatgatatcgcgctcgctgggacccgagtttggaggcgctgtcggcctctgcttctacctgggcacgacgtttgcaggggccatgtatattttggggaccatcgagatttttctgacgtacatctccccgggtgcggccatcttccaggcggaggctgcaggtggcgaggcggccgccatgctgcacaacatgcgtgtgtacggcacgtgcacgctcgtgctcatggccctggtggtcttcgtgggcgtcaagtatgtcaacaagctggcgctggtcttcctggcctgcgtcgtgctgtccatcctggccatctatgccggcgtcatcaagtctgccttcgaccccccggacatcccggtctgcctcctggggaaccgcacgctgtcacggcgcagcttcgatgcctgcgtcaaggcctacggcatccacaacaactcagccacctccgcgctctggggcctcttctgcaacggctcccagcccagcgccgcctgtgacgagtacttcatccagaacaacgtcaccgaaatccagggcatcccgggcgcggccagtggtgtcttcctggagaacctgtggagtacgtacgcgcacgcgggggcgtttgtggagaagaaaggtgtgccctcggtgcccgtggcagaggagagccgtgccagcgcactgccctacgtgctcaccgacatcgcggcctccttcaccctgctggttggcatctacttcccttccgtgaccggtatcatggcgggttcaaaccggtccggggacctcaaggatgcacagaagtccatccccacggggaccatcctggccatagtgacgacgtctttcatctatctctcctgcattgtgctgtttggggcctgcattgaaggcgtggtcttacgagataagttcggggaggccctgcaggggaacctggtcatcggcatgctggcctggccctccccctgggtcatcgtcatcggctccttcttctccacctgcggtgccggcctgcagagcctcacgggggcaccgcgcctactgcaggccattgcccgtgacggcatcgtccccttcctgcaggtgtttggccacgggaaggccaacggggagcccacgtgggcgctgctgctgacagtcctcatctgcgagactggcatcctcatcgcctctctggacagcgtggccccgatcctctccatgttcttcctcatgtgctacctgttcgtgaacctggcctgcgccgtgcagaccctgctacgtacccccaactggcgtccacgcttcaagttctaccactggaccctgtcctttctgggtatgagcctgtgcctggcgctgatgttcatctgctcctggtactacgcgctgtccgccatgctcatcgctggctgcatctacaagtacatcgagtaccgcggggccgagaaggagtggggcgatggcatccgtggcctatccctgaacgccgcccgctacgccctgctgcgcgtggagcacggtcccccccacaccaagaactggaggccccaggtgctggtgatgctgaacctggacgcggagcaggccgtgaagcacccccgcctgctgtccttcacgtcgcagctgaaggccggcaagggcctgaccatcgtgggctcggtgctggaggggacgtacctggacaagcacatggaggctcagcgggccgaggagaacatacggtccctaatgagcacagagaagaccaagggcttctgccagctggtggtctcgtccagcctgcgggatggcatgtcccacctgatccagtcggccggcctgggcggcctgaagcacaacacggtgctcatggcctggcccgcatcctggaagcaggaggacaaccccttctcctggaagaactttgtggacaccgtccgcgacaccaccgccgcgcaccaggctctgctggtggccaagaacgtcgactcgtttccgcaaaaccaggagcgcttcggcgggggccacatcgacgtgtggtggatcgtgcacgacggcggcatgctcatgctgctgcccttcctgctgcgccagcacaaggtgtggaggaagtgccggatgcgtatcttcaccgtggcccaggtggacgacaacagcatccagatgaagaaggacctgcagatgttcttgtaccacttgcgcatcagcgccgaggtggaggtggtggagatggttgaaaacgacatatctgctttcacctacgagaggacactaatgatggagcagaggtcgcagatgctgaagcagatgcagctgtccaagaacgagcaggagcgagaggcccagctgatccacgacaggaacaccgcgtcccacaccgcggcggcagccaggacccaagcgccgcctacgccagacaaggtgcagatgacctggaccagggagaagctgatcgctgagaagtacaggagcagagacaccagcctatctggtttcaaagacctcttcagcatgaagccggaccagtccaacgtcaggcggatgcacacggctgtgaagctcaatggcgtcgtcctcaacaagtcccaggatgcgcagctggtcctgctcaacatgccaggtcctcccaaaaaccggcagggagacgagaactacatggagtttcttgaagtcctgaccgaggggctgaacagagtcctcctggtcaggggtggcggccgggaggtgatcaccatctactcctaatgcccaacagcatcacggcactctgggacaggcacggaggacggcgtgggcagcctgggcctgggcttggcccagggaaacagacggcagacacacctgtcccccagtgatgccgcccaagctgcccatggggcttcctacggaagtttctaggcccgtcacctagggctctcctgttcagccttaacaggctcagcaaatcagggcgtggctggacgatttccttgcatctgagggcagacgctgctaccggagtgacctggacgtggccagatcttctcgcaggtcacaagaagccagtgagcccttgccttggtttctggaagttcttttccttggctggatttacccagtggttaggttgcatttctaccccatccagaacattcttggaagagcacccggagctgaagctgtccctgatgatgaaggtgaaacgtcagccctggccatggctccgctcagggccccggtcacctccgagtcactctgttccttgactgtctttgtgtttctgtacctcaaggcactgaagctggaggactctgtccatgcccgtgtcaccctcgtgtgggagcctctgggctcggcaggtccacatttcatgagctgaggcgtgggccagggccatctggaaagggaactcggcttttccagaacgtggtggatcatctgtcgggtgtgtggtgaacacgttcagttcatcagggcctacgctccgggaaggggcccccagctgtggctctgccatgccgggctgtgtttgcagctgtccgagtctccatccacctttagaaaaccagccacttcttttcataagcactgacagggcccagcccacagccacaggtgcgatcagtgcctcacgcaggcaaatgcactgaaacccaggggcacacgcgcgcagagtgaacagtgagttcccccgacagcccacgacagccaggactgccctccccaccccaccccaccccaggagcacggcacacagttcagcctctgagctggctcacacgtgccatccccaccccggtgctccagggaaggaggacacggacccgacgtgggaggtcctcaggcagcagtggcgcctggtgtcaggtctgtctggctgagtcccgggcgtcccctgccatggcctgtgccttgcatggaggcggcggtggcactgaagagatagctttcaagggcccaacactttgcacttcggctggctgtgagtttctgctttgtaggttgtggtcacatttgcaggctgcgggcagtggcaccgacttgggcctccctttctatgtggcatatttatttatttaaacaccccagggagttacgtggtaacaaggttgtccataaagaggttgcttctatatactagaggccccagatggccaggccttgggctacgtctggcttgcatggtctcccaagggaatcagccccatcaacaaagttcaaatcggggcagaggctgcacttgtgcccccagatgtttctgaggagccagactagggctggcattgctgtagagtgacggctgctgcccagagcgtgtcccagacatcacagcggggctcagcagttcccacagcctctgcctgccttggctaagcatgagttaagcagcaaaacgctcctccatgtctggatggggccggcaggtcctgtgtcccctgcacctggaggagagcaggctagaggcacagcggccacatggtgctggctctgaacgttggttggtggctggaaaacagccctgcttctgagggccgctcagttctgcacacgaaaccacctcctgagggctcagctctgcccccgccctgggctgcagcctctgcacgcaagcaccaggcatcctttgtgttgtcaactccgtgtaaccagtaactacagccatttacaattgactccgtttccttttgtaggtttccctgtctgtctgtgttagtagaaaaataaaatcctatgaaatctgagtacgttgaaaaaaaaaaaaaa

SEQ ID NO: 499 - protein, 1083 aa, Homo sapiens
MPTNFTVVPVEAHADGGGDETAERTEAPGTPEGPEPERPSPGDGNPRENSPFLNNVEVEQESFFEGKNMALFEEEMDSNPMVSSLLNKLANYTNLSQGVVEHEEDEESRRREAKAPRMGTFIGVYLPCLQNILGVILFLRLTWIVGVAGVLESFLIVAMCCTCTMLTAISMSAIATNGVVPAGGSYYMISRSLGPEFGGAVGLCFYLGTTFAGAMYILGTIEIFLTYISPGAAIFQAEAAGGEAAAMLHNMRVYGTCTLVLMALVVFVGVKYVNKLALVFLACVVLSILAIYAGVIKSAFDPPDIPVCLLGNRTLSRRSFDACVKAYGIHNNSATSALWGLFCNGSQPSAACDEYFIQNNVTEIQGIPGAASGVFLENLWSTYAHAGAFVEKKGVPSVPVAEESRASALPYVLTDIAASFTLLVGIYFPSVTGIMAGSNRSGDLKDAQKSIPTGTILAIVTTSFIYLSCIVLFGACIEGVVLRDKFGEALQGNLVIGMLAWPSPWVIVIGSFFSTCGAGLQSLTGAPRLLQAIARDGIVPFLQVFGHGKANGEPTWALLLTVLICETGILIASLDSVAPILSMFFLMCYLFVNLACAVQTLLRTPNWRPRFKFYHWTLSFLGMSLCLALMFICSWYYALSAMLIAGCIYKYIEYRGAEKEWGDGIRGLSLNAARYALLRVEHGPPHTKNWRPQVLVMLNLDAEQAVKHPRLLSFTSQLKAGKGLTIVGSVLEGTYLDKHMEAQRAEENIRSLMSTEKTKGFCQLVVSSSLRDGMSHLIQSAGLGGLKHNTVLMAWPASWKQEDNPFSWKNFVDTVRDTTAAHQALLVAKNVDSFPQNQERFGGGHIDVWWIVHDGGMLMLLPFLLRQHKVWRKCRMRIFTVAQVDDNSIQMKKDLQMFLYHLRISAEVEVVEMVENDISAFTYERTLMMEQRSQMLKQMQLSKNEQEREAQLIHDRNTASHTAAAARTQAPPTPDKVQMTWTREKLIAEKYRSRDTSLSGFKDLFSMKPDQSNVRRMHTAVKLNGVVLNKSQDAQLVLLNMPGPPKNRQGDENYMEFLEVLTEGLNRVLLVRGGGREVITIYS

SEQ ID NO: 500 - DNA, 3925 bp, Homo sapiens
cggagcgggaggggaggcttcgcggaacgctctcggcgccaggactcgcgtgcaaagcccaggcccgggcggccagaccaagagggaagaagcacagaattcctcaactcccagtgtgcccatgagtaagagcaaatgctccgtgggactcatgtcttccgtggtggccccggctaaggagcccaatgccgtgggcccgaaggaggtggagctcatccttgtcaaggagcagaacggagtgcagctcaccagctccaccctcaccaacccgcggcagagccccgtggaggcccaggatcgggagacctggggcaagaagatcgactttctcctgtccgtcattggctttgctgtggacctggccaacgtctggcggttcccctacctgtgctacaaaaatggtggcggtgccttcctggtcccctacctgctcttcatggtcattgctgggatgccacttttctacatggagctggccctcggccagttcaacagggaaggggccgctggtgtctggaagatctgccccatactgaaaggtgtgggcttcacggtcatcctcatctcactgtatgtcggcttcttctacaacgtcatcatcgcctgggcgctgcactatctcttctcctccttcaccacggagctcccctggatccactgcaacaactcctggaacagccccaactgctcggatgcccatcctggtgactccagtggagacagctcgggcctcaacgacacttttgggaccacacctgctgccgagtactttgaacgtggcgtgctgcacctccaccagagccatggcatcgacgacctggggcctccgcggtggcagctcacagcctgcctggtgctggtcatcgtgctgctctacttcagcctctggaagggcgtgaagacctcagggaaggtggtatggatcacagccaccatgccatacgtggtcctcactgccctgctcctgcgtggggtcaccctccctggagccatagacggcatcagagcatacctgagcgttgacttctaccggctctgcgaggcgtctgtttggattgacgcggccacccaggtgtgcttctccctgggcgtggggttcggggtgctgatcgccttctccagctacaacaagttcaccaacaactgctacagggacgcgattgtcaccacctccatcaactccctgacgagcttctcctccggcttcgtcgtcttctccttcctggggtacatggcacagaagcacagtgtgcccatcggggacgtggccaaggacgggccagggctgatcttcatcatctacccggaagccatcgccacgctccctctgtcctcagcctgggccgtggtcttcttcatcatgctgctcaccctgggtatcgacagcgccatgggtggtatggagtcagtgatcaccgggctcatcgatgagttccagctgctgcacagacaccgtgagctcttcacgctcttcatcgtcctggcgaccttcctcctgtccctgttctgcgtcaccaacggtggcatctacgtcttcacgctcctggaccattttgcagccggcacgtccatcctctttggagtgctcatcgaagccatcggagtggcctggttctatggtgttgggcagttcagcgacgacatccagcagatgaccgggcagcggcccagcctgtactggcggctgtgctggaagctggtcagcccctgctttctcctgttcgtggtcgtggtcagcattgtgaccttcagacccccccactacggagcctacatcttccccgactgggccaacgcgctgggctgggtcatcgccacatcctccatggccatggtgcccatctatgcggcctacaagttctgcagcctgcctgggtcctttcgagagaaactggcctacgccattgcacccgagaaggaccgtgagctggtggacagaggggaggtgcgccagttcacgctccgccactggctcaaggtgtagagggagcagagacgaagaccccaggaagtcatcctgcaatgggagagacacgaacaaaccaaggaaatctaagtttcgagagaaaggagggcaacttctactcttcaacctctactgaaaacacaaacaacaaagcagaagactcctctcttctgactgtttacacctttccgtgccgggagcgcacctcgccgtgtcttgtgttgctgtaataacgacgtagatctgtgcagcgaggtccaccccgttgttgtccctgcagggcagaaaaacgtctaacttcatgctgtctgtgtgaggctccctccctccctgctccctgctcccggctctgaggctgccccaggggcactgtgttctcaggcggggatcacgatccttgtagacgcacctgctgagaatccccgtgctcacagtagcttcctagaccatttactttgcccatattaaaaagccaagtgtcctgcttggtttagctgtgcagaaggtgaaatggaggaaaccacaaattcatgcaaagtcctttcccgatgcgtggctcccagcagaggccgtaaattgagcgttcagttgacacattgcacacacagtctgttcagaggcattggaggatgggggtcctggtatgtctcaccaggaaattctgtttatgttcttgcagcagagagaaataaaactccttgaaaccagctcaggctactgccactcaggcagcctgtgggtccttgcggtgtagggaacggcctgagaggagcgtgtcctatccccggacgcatgcagggcccccacaggagcgtgtcctatccccggacgcatgcagggcccccacaggagcatgtcctatccctggacgcatgcagggcccccacaggagcgtgtactaccccagaacgcatgcagggcccccacaggagcgtgtactaccccaggacgcatgcagggcccccactggagcgtgtactaccccaggacgcatgcagggcccccacaggagcgtgtcctatccccggaccggacgcatgcagggcccccacaggagcgtgtactaccccaggacgcatgcagggcccccacaggagcgtgtactaccccaggatgcatgcagggcccccacaggagcgtgtactaccccaggacgcatgcagggcccccatgcaggcagcctgcagaccacactctgcctggccttgagccgtgacctccaggaagggaccccactggaattttatttctctcaggtgcgtgccacatcaataacaacagtttttatgtttgcgaatggctttttaaaatcatatttacctgtgaatcaaaacaaattcaagaatgcagtatccgcgagcctgcttgctgatattgcagtttttgtttacaagaataattagcaatactgagtgaaggatgttggccaaaagctgctttccatggcacactgccctctgccactgacaggaaagtggatgccatagtttgaattcatgcctcaagtcggtgggcctgcctacgtgctgcccgagggcaggggccgtgcagggccagtcatggctgtcccctgcaagtggacgtgggctccagggactggagtgtaatgctcggtgggagccgtcagcctgtgaactgccaggcagctgcagttagcacagaggatggcttccccattgccttctggggagggacacagaggacggcttccccatcgccttctggccgctgcagtcagcacagagagcggcttccccattgccttctggggagggacacagaggacagcttccccatcgccttctggctgctgcagtcagcacagagagcggcttccccatcgccttctggggaggggctccgtgtagcaacccaggtgttgtccgtgtctgttgaccaatctctattcagcatcgtgtgggtccctaagcacaataaaagacatccacaatggaaaaa

SEQ ID NO: 501 - protein, 620 aa, Homo sapiens
MSKSKCSVGLMSSVVAPAKEPNAVGPKEVELILVKEQNGVQLTSSTLTNPRQSPVEAQDRETWGKKIDFLLSVIGFAVDLANVWRFPYLCYKNGGGAFLVPYLLFMVIAGMPLFYMELALGQFNREGAAGVWKICPILKGVGFTVILISLYVGFFYNVIIAWALHYLFSSFTTELPWIHCNNSWNSPNCSDAHPGDSSGDSSGLNDTFGTTPAAEYFERGVLHLHQSHGIDDLGPPRWQLTACLVLVIVLLYFSLWKGVKTSGKVVWITATMPYVVLTALLLRGVTLPGAIDGIRAYLSVDFYRLCEASVWIDAATQVCFSLGVGFGVLIAFSSYNKFTNNCYRDAIVTTSINSLTSFSSGFVVFSFLGYMAQKHSVPIGDVAKDGPGLIFIIYPEAIATLPLSSAWAVVFFIMLLTLGIDSAMGGMESVITGLIDEFQLLHRHRELFTLFIVLATFLLSLFCVTNGGIYVFTLLDHFAAGTSILFGVLIEAIGVAWFYGVGQFSDDIQQMTGQRPSLYWRLCWKLVSPCFLLFVVVVSIVTFRPPHYGAYIFPDWANALGWVIATSSMAMVPIYAAYKFCSLPGSFREKLAYAIAPEKDRELVDRGEVRQFTLRHWLKV

SEQ ID NO: 502 - DNA, 11659 bp, Homo sapiens
gctggagggatcctccattcctgtgtcatttgcatgggtcctgctgtgaaatgaacctggcagggacttgttagacacttccttccttccctcattgagcactccagtgccattgttccacagttgttctaattgggtcctagcttcctcctgccaaggcaaacagcatagtctcgagtaggtgtccctaggctcatctgccagcctgaacatgaacacaggcaaagctgatgatggccagggaccccaggggacgtggggccctgtggggtctggcccccaggagcaagacctctgatgatgctggtgtctgggagtgagcaccatgcccatcacccaggacaatgccgtgctgcacctgcccctcctctaccagtggctgcagaacagcctgcaggaaggtggggatgggccggagcagcggctctgccaggcggccatccagaagctgcaggagtacatccagctgaactttgctgtggatgagagtacggtcccacctgatcacagcccccccgaaatggagatctgtactgtgtacctcaccaaggagctgggggacacagagactgtgggcctgagttttgggaacatccctgttttcggggactatggtgaaaagcgcagggggggcaagaagaggaaaacccaccagggtcctgtgctggatgtgggctgcatctgggtgacagagctgaggaagaacagcccagcagggaagagtgggaaggtccgactgcgggatgagatcctctcactgaatgggcagctgatggttggagttgatgtcagtggggccagttacctggctgagcagtgctggaatggcggctttatctacctgatcatgctgcgtcgctttaagcacaaagcccactccacttataatggcaacagtagcaacagctctgaaccaggagaaacacctaccttggagctgggtgaccgaactgcgaaaaaggggaaacgaaccagaaagtttggggtcatctccaggcctcctgccaacaaggcccctgaagaatccaagggcagcgctggctgtgaggtgtccagtgaccccagcactgagctggagaacggccctgaccctgaacttggaaacggccatgtctttcagctagaaaatggcccagattctctcaaggaggtggctggaccccatctagagaggtcagaagtggacagagggacagagcatagaattccaaagacagatgctcctctgaccacaagcaatgacaaacgccgcttctcaaaaggtgggaagacggacttccaatcgagtgactgcctggcacgggaggaagttggccgaatatggaagatggagctgctcaaagaatcggatgggctgggaattcaggttagtggaggccgaggatcaaagcgctcacctcacgctatcgttgtcactcaagtgaaggaaggaggtgccgctcacagggatggcaggctgtccttaggagatgagctgctggtaatcaatggtcatttactggtcgggctctcccacgaggaagcagtggccattcttcgctccgccacgggaatggtgcagcttgtggtggccagcaaggaaaactccgcagaggacctcctcaggttaacatctaagagcttgccagatctgaccagctcggtagaagatgtgtcctcctggactgataacgaagaccaggaggcagacggggaagaggacgaaggaaccagctcttctgtccagagagcaatgcctgggacagatgaaccccaagatgtgtgcggtgctgaggaatccaaggggaacttggaaagtcccaaacagggcagcaataaaatcaagctcaagagtcgcctttcagggggtgtacaccgccttgagtcagttgaagaatataacgagctgatggtgcggaatggggacccccggatccggatgttggaggtctcccgagatggccggaaacactccctcccgcagctgctggactcttccagtgcctcacaggaataccacattgtgaagaagtctacccgctccttaagcacgactcaggtggaatctccttggaggctcattcggccatccgtcatctcgatcattgggttgtacaaagaaaaaggcaagggccttggctttagtattgctggaggtcgagactgcattcgtggacagatggggatttttgtcaagaccatcttcccaaatggatcagctgcagaggacggaagacttaaagaaggggatgaaatcctagatgtaaatggaataccaataaagggcttgacatttcaagaagccattcatacctttaagcaaatccggagtggattatttgttttaacggtacgcacaaagttggtgagccccagcctcacaccctgctcgacacccacacacatgagcagatccgcctccccgaacttcaataccagtgggggagcctcagcgggaggttccgatgaaggcagttcttcatccctgggtcggaagacccctgggcccaaggacaggatcgtcatggaagtaacactcaacaaagagccaagagttggattaggcattggtgcctgctgcttggctctggaaaacagtcctcctggcatctacattcacagccttgctccaggatcagtggccaagatggagagcaacctgagccgcggggatcaaatcctggaagtgaactccgtcaacgtccgccatgctgctttaagcaaagtccacgccatcttgagtaaatgccctccaggacccgttcgccttgtcatcggccggcaccctaatccaaaggtttccgagcaggaaatggatgaagtcatagcacgcagcacttatcaggagagcaaagaggccaattcctctcctggcttaggtacccccttgaagagtccctctcttgcaaaaaaggactcccttatttctgaatctgaactctcccagtactttgcccacgatgtccctggccccttgtcagacttcatggtggccggttctgaggacgaggatcacccgggaagtggctgcagcacgtcggaggagggcagcctgcctcccagcacctccactcacaaggagcctggaaaacccagagccaacagcctcgtgactcttgggagccatcgggcttctgggctcttccacaagcaggtgacagttgccagacaagccagtctccccggaagcccacaggccctccgaaaccctctcctccgccagaggaaggtaggctgctacgatgccaacgatgccagtgatgaggaagagtttgacagagaaggggactgcatttcactcccaggggccctcccgggtcccatcaggcctctgtcagaggatgacccgaggcgtgtctcaatttcctcttccaagggcatggacgtccacaaccaagaggaacgaccccggaaaacactggtgagcaaggccatctcggcacctcttcttggtagctcagtggacttagaggagagtatcccagagggcatggtggatgctgcgtcctatgcagccaacctcacggactctgcagaggcccccaaggggagccctggaagctggtggaagaaggaactgtcaggatcaagtagcgcacccaaattggaatacacagtccgtacagacacccagagtccgacgaacactgggagccccagttccccccagcagaaaagtgaaggcctgggctccaggcacagaccagtggccagggtaagcccccactgcaagagatccgaggctgaggccaagcccagtggctcacagacagtgaacctgactggcagagccaatgatccatgcgatctggactcgagagtccaggccacttctgtcaaagtgactgtcgctggctttcagccaggtggagctgtggagaaggaatctctgggaaagctgaccactggagatgcttgtgtctctaccagctgtgaactagccagtgctctgtcccatctggatgccagccacctcacagagaacctgcccaaagctgcatcagagctggggcaacaacccatgactgaactggacagctcctcagacctcatctcttccccagggaagaagggggccgctcatcctgaccccagcaagacctctgtagacacagggcaagtcagtcggccagagaatcccagccagcctgcatcgcccagggtcaccaagtgcaaggccaggtctccagtcaggctcccccatgagggcagcccctccccgggggagaaagcagcggctccccctgactacagcaagactcgatcagcatcggaaaccagcacaccccacaataccaggagggtggctgccctcaggggagcgggacctggagcagagggaatgacaccagctggtgctgtcctgccaggagaccccctcacatcccaggagcagagacagggagctccaggtaaccacagtaaggctctggaaatgacaggaatccatgcacctgaaagctcccaggagccttccctgctggagggagcagattctgtgtcctcaagggcaccgcaggccagcctctccatgctgccatccactgacaacaccaaagaagcatgtggccatgtctcggggcactgctgcccaggggggagtagagagagccctgtgacggacattgacagcttcatcaaggagctggatgcttctgcagcaaggtctccgtcttcccagacgggggacagtggctctcaggagggcagtgctcagggccacccaccagccggggctggaggtgggagctcctgccgtgccgaaccagtcccggggggccagacctcctccccgaggagggcctgggctgctggtgcccccgcctacccacaatgggcctcccagccttcggttttagattcaattaatcccgacaaacattttactgtgaacaaaaactttctgagcaactactctagaaattttagcagttttcatgaagacagcacctccctatcaggcctgggtgacagcacggagccgtctctgtcatccatgtatggcgatgctgaggattcttcttctgaccctgagtcactcactgaagccccacgagcttctgccagggacggctggtcccctcctcgttcccgtgtgtctttgcacaaggaagatccttcggagtcagaagaggaacagattgagatttgttccacacgtggctgccccaatccaccctcgagtcctgctcatcttcccacccaggctgccatctgtcctgcctcagccaaagttctgtcattaaaatacagcactccgagagagtcggtggccagtccccgtgagaaggccgcctgcttgccaggctcatacacttcaggcccagactcttcccagccatcatcactcttggagatgagctctcaggagcatgaaactcatgcggacataagcacttcacagaaccacaggccctcgtgtgcagaagaaaccacagaagtcaccagcgctagctcagccatggaaaacagtccgctgtctaaagtagccaggcattttcacagtccgcccatcattctcagctcccccaacatggtaaatggcttggaacatgacctgctagatgacgaaaccctgaatcaatacgaaacaagcattaatgcagctgccagtctgtcctccttcagtgtggatgtccctaagaatggagaatctgttttggaaaacctccacatctctgaaagtcaagacctggatgacttgctacagaaaccaaaaatgatcgctaggaggcccatcatggcctggtttaaagaaataaataaacataaccaaggcacacatttgaggagcaaaaccgagaaggaacaacctctaatgcctgccagaagtcccgactccaagattcagatggtgagttcaagccaaaaaaagggcgttactgtgcctcatagccctcctcagccgaaaacaaacctggaaaataaggacctgtctaagaagagtccggcagaaatgcttctgactaatggtcagaaggcaaagtgtggtccgaagctgaagaggctcagcctcaagggcaaggccaaagtcaactctgaggcccctgctgcgaatgctgtgaaggctggggggacggaccacaggaaacccttgatctcaccccagacctcccacaaaacactttctaaggcagtgtcacagcggctccatgtagccgaccacgaggaccctgacagaaacaccacagctgcccccaggtccccccagtgtgtgctggaaagcaagccacctcttgccacctctgggccactgaaaccctcagtgtctgacacgagcatcaggacatttgtctcgcccctgacctctcccaagcctgttcctgagcaaggcatgtggagcaggttccacatggctgtcctctctgaacccgacagaggttgcccaaccacccctaaatctcctaagtgtagagcagagggcagggcgccccgtgctgactccgggccggtgagtccggcagcgtctaggaacggcatgtccgtggcagggaacagacagagtgagccgcgcctggccagccatgtggcagcagacacagcccaacccaggccgactggcgaaaaaggaggcaacataatggccagcgatcgcctcgaaagaacaaaccagctgaaaatcgtggagatttctgctgaagcagtgtcagagactgtatgtggtaacaagccagctgaaagcgacagacggggagggtgcttggcccagggcaactgtcaggagaagagtgaaatcaggctctatcgccaggtcgcagaatcatccacaagtcatccatcctcactcccatctcatgcctcccaggcagagcaggaaatgtcacgatcattcagcatggcaaaactggcgtcctcctcctcctcccttcaaacagccattagaaaggcagaatactcccagggaaaatcaagcctgatgtcagactcccgaggggtgcccagaaacagcattccagggggcccctcgggggaggaccatctctacttcaccccaaggccagcgaccaggacctactccatgccagcccagttctcaagccattttggacgggagggtcaccccccacacagcctgggtcgctctcgggacagccaggtccctgtgacaagcagtgttgtccccgaggcaaaggcatccagaggtggtcttcccagcctggctaatggacagggcatatatagtgtaaagccgctgctggacacatcgaggaatcttccagccacagatgaaggggatatcatttcagtccaggagacgagctgcctagtcacagacaaaatcaaagtcaccagacgacactactgctatgagcagaactggccccatgaatctacctcatttttctctgtgaagcagcggatcaagtcttttgagaacctggccaatgctgaccggcctgtagccaagtccggggcttccccatttttgtcggtgagctccaagcctcccattgggaggcggtcttccggcagcattgtttccgggagcctgggccacccaggtgacgcagcagcaaggttgttgagacgcagcttgagttcctgcagcgaaaaccaaagcgaagccggcaccctcctgccccagatggccaagtctccctcaatcatgacactgaccatctctcggcagaacccaccagagaccagtagcaagggctctgattcggaactaaagaaatcacttggtcctttgggaattcccaccccaacgatgaccctggcttctcctgttaagaggaacaagtcctcggtacgccacacgcagccctcgcccgtgtcccgctccaagctccaggagctgagagccttgagcatgcctgaccttgacaagctctgcagcgaggattactcagcagggccgagcgccgtgctcttcaaaactgagctggagatcacccccaggaggtcacctggccctcctgctggaggcgtttcgtgtcccgagaagggcgggaacagggcctgtccaggaggaagtggccctaaaaccagtgctgctgagacacccagttcagccagtgatacgggtgaagctgcccaggatctgccttttagaagaagctggtcagttaatttggatcaacttctagtctcagcgggggaccagcaaagattacagtctgttttatcgtcagtgggatcgaaatctaccatcctaactctcattcaggaagcgaaagcacaatcagagaatgaagaagatgtttgcttcatagtcttgaatagaaaagaaggctcaggtctgggattcagtgtggcaggagggacagatgtggagccaaaatcaatcacggtccacagggtgttttctcagggggcggcttctcaggaagggactatgaaccgaggggatttccttctgtcagtcaacggcgcctcactggctggcttagcccacgggaatgtcctgaaggttctgcaccaggcacagctgcacaaagatgccctcgtggtcatcaagaaagggatggatcagcccaggccctctgcccggcaggagcctcccacagccaatgggaagggtttgctgtccagaaagaccatccccctggagcctggcattgggagaagtgtggctgtacacgatgctctgtgtgttgaagtgctgaagacctcggctgggctgggactgagtctggatgggggaaaatcatcggtgacgggagatgggcccttggtcattaaaagagtgtacaaaggtggtgcggctgaacaagctggaataatagaagctggagatgaaattcttgctattaatgggaaacctctggttgggctcatgcactttgatgcctggaatattatgaagtctgtcccagaaggacctgtgcagttattaattagaaagcataggaattcttcatgaattttaacaagaatcattttctcagttctcttctttctttagcaaatcagagtgacttctttaaaccacaggttgttgaaatggccaacactggtacagacacggactataaaaatctccaagcttgtgcttacacatgaagcctgacttaactgtatgtgcaacagcaatgaaattaactccagaagccttccacctgcgtcacccaggccgggagggttccttcgttccagtgcctgtcccctacctttatgttatgtttactgatggggatacaagatgtgacacacccttctttatttgaaacaaacaaacatttagctagacctttgcttccttcttgccagctctcccaacatacccaatcctggtgatcagggaactaaaagtctgagggggacacaaatgtcacacctaagaggacaatcaatcattttgtatgattttgtaagtaaatgacagaatgcttttaggcacattcaatggaaggaggagatgtaggtctgtatatgttaccctgaaaagagaataagacttacttaaaaaaatgaattatgacctgttaggctgagctcaggaattgtccaaaaaggaaaaagcaaaataattaattgagagtattttttagtgagtgtaatgtataatgtacgtatgcaaagttcaactcaataggttattgatcaccatgaagtattgatcattttctatctcaaaagtgtaagccataaggctgttttacagaatagcacttctgataagctgtattaaatagccatgagcttcactgcttagagggagcagaaaggtcaacatctaaaagcaccttacaactagtttttgaacctgtcttgataagtgcttgaattcaagactggtcagtccaagagcagacaaaaatatcacaagtcagtcagtcactgggtttccatttctgaattttatgcactccaaccatgaatttaaactaaatttttagaaatcaagtatctttctaagtgtccttggatttatagacaatgtatgtacaatccaaatagaggagcttaatggaatccttttaggagactggttggtttttttccctctttcccaacatgtttaagaaatgtaacattctaagtattggatctcttttcttgacctagtataatgacaactgcagtgacttaagtttttgctgttttcgttttcccgctttgcaatttcctccttttgccaaaaatgttttcctacagaagactgtcgtgactcacgctacttgggaaactcactctggccactcctcctctggtggcatgagctgcttcccagtagctattccgattggatattccgttcgtcgtcacatagctggcttttctctcctcatgatgtaccttattttcttaggtaaataattccaaactctcatcgggtcataaagaggaggagaaacagggtgagtcaaggtaaaggagcagaaatgtagttacaagccaggtcgtcttcagtggcacaaaccaacccgttgagccctgacaacatgagtggagagtgcatttgccatacctgtgtgcatgacactaagattttatgttggagatacttctttaaataacctacagcttgggtctatggctgtgacccccagattcatggaggggctttagccatcagctttgtacatcatcatttttctgaatgaccaatcccactaaacatctttgaagtcggcctagagaggtccttcagatgagagagaaatagctggcttgtctgagtccagatttctcatcaactggcaatacaaaggaaaatatggtacaggagttagttagaaaggtcttattgattttacttctacttttcactacagttacaggtagaatactgtaggaagtcagtgcaaggtgcatgcttgattgatagatattgattgattgtttttcagtctctggggtcagttttgtggtttctgctttcttgcctaaatcaaagactatttcaagtcaacaacactgaaaactgcttttcgcctccactcttacagctgtgcctaataataattaattaataaacgcacagccctatgtgaacagacaggaatttcttgtgcaatgtggagcaaatggaatggtctccttccgcaagtctttttaatcctcatatctggagtacaagggtagacctctggcttaccacatacactatgctaaagtcatcagccactgctactacatcttgccagaaggtttccctcgccaacaaacagttgaaatttaagggaagaagcaaaagctaaactgtctttgaccctaagatagatagaaagctatttatttgtcttcagtgttcaaggcatgactagtatttctaattagcctaataaattcccacactttctgaagtgaacactaatggtattgtcctactaaaactgtcattgtttctttttttttaactggtcagtcattcacaataagctatgagggtaaataaatatgtgttataacaagtaaaccgtagttgcaagaatataccatgaagattaaagtaggctgggtttcatttccatcttcccacacatctcattgaatttgatggttgacttaattggcaccataactttgtatgatattatacattaacctttatttatgtaaagtaaaatgccttatatattaaagagtaagtgcaataatatgaaatagcctgtacattttaaaaatgttgtcaccaagttatataaatccacatctctgtaaacaaccttttttaagtaattttaaaaaaaataaacactctgcttactacttgaaaaaaaaaaaaaaaaaa

SEQ ID NO: 503 - protein, 2839 aa, Homo sapiens
MPITQDNAVLHLPLLYQWLQNSLQEGGDGPEQRLCQAAIQKLQEYIQLNFAVDESTVPPDHSPPEMEICTVYLTKELGDTETVGLSFGNIPVFGDYGEKRRGGKKRKTHQGPVLDVGCIWVTELRKNSPAGKSGKVRLRDEILSLNGQLMVGVDVSGASYLAEQCWNGGFIYLIMLRRFKHKAHSTYNGNSSNSSEPGETPTLELGDRTAKKGKRTRKFGVISRPPANKAPEESKGSAGCEVSSDPSTELENGPDPELGNGHVFQLENGPDSLKEVAGPHLERSEVDRGTEHRIPKTDAPLTTSNDKRRFSKGGKTDFQSSDCLAREEVGRIWKMELLKESDGLGIQVSGGRGSKRSPHAIVVTQVKEGGAAHRDGRLSLGDELLVINGHLLVGLSHEEAVAILRSATGMVQLVVASKENSAEDLLRLTSKSLPDLTSSVEDVSSWTDNEDQEADGEEDEGTSSSVQRAMPGTDEPQDVCGAEESKGNLESPKQGSNKIKLKSRLSGGVHRLESVEEYNELMVRNGDPRIRMLEVSRDGRKHSLPQLLDSSSASQEYHIVKKSTRSLSTTQVESPWRLIRPSVISIIGLYKEKGKGLGFSIAGGRDCIRGQMGIFVKTIFPNGSAAEDGRLKEGDEILDVNGIPIKGLTFQEAIHTFKQIRSGLFVLTVRTKLVSPSLTPCSTPTHMSRSASPNFNTSGGASAGGSDEGSSSSLGRKTPGPKDRIVMEVTLNKEPRVGLGIGACCLALENSPPGIYIHSLAPGSVAKMESNLSRGDQILEVNSVNVRHAALSKVHAILSKCPPGPVRLVIGRHPNPKVSEQEMDEVIARSTYQESKEANSSPGLGTPLKSPSLAKKDSLISESELSQYFAHDVPGPLSDFMVAGSEDEDHPGSGCSTSEEGSLPPSTSTHKEPGKPRANSLVTLGSHRASGLFHKQVTVARQASLPGSPQALRNPLLRQRKVGCYDANDASDEEEFDREGDCISLPGALPGPIRPLSEDDPRRVSISSSKGMDVHNQEERPRKTLVSKAISAPLLGSSVDLEESIPEGMVDAASYAANLTDSAEAPKGSPGSWWKKELSGSSSAPKLEYTVRTDTQSPTNTGSPSSPQQKSEGLGSRHRPVARVSPHCKRSEAEAKPSGSQTVNLTGRANDPCDLDSRVQATSVKVTVAGFQPGGAVEKESLGKLTTGDACVSTSCELASALSHLDASHLTENLPKAASELGQQPMTELDSSSDLISSPGKKGAAHPDPSKTSVDTGQVSRPENPSQPASPRVTKCKARSPVRLPHEGSPSPGEKAAAPPDYSKTRSASETSTPHNTRRVAALRGAGPGAEGMTPAGAVLPGDPLTSQEQRQGAPGNHSKALEMTGIHAPESSQEPSLLEGADSVSSRAPQASLSMLPSTDNTKEACGHVSGHCCPGGSRESPVTDIDSFIKELDASAARSPSSQTGDSGSQEGSAQGHPPAGAGGGSSCRAEPVPGGQTSSPRRAWAAGAPAYPQWASQPSVLDSINPDKHFTVNKNFLSNYSRNFSSFHEDSTSLSGLGDSTEPSLSSMYGDAEDSSSDPESLTEAPRASARDGWSPPRSRVSLHKEDPSESEEEQIEICSTRGCPNPPSSPAHLPTQAAICPASAKVLSLKYSTPRESVASPREKAACLPGSYTSGPDSSQPSSLLEMSSQEHETHADISTSQNHRPSCAEETTEVTSASSAMENSPLSKVARHFHSPPIILSSPNMVNGLEHDLLDDETLNQYETSINAAASLSSFSVDVPKNGESVLENLHISESQDLDDLLQKPKMIARRPIMAWFKEINKHNQGTHLRSKTEKEQPLMPARSPDSKIQMVSSSQKKGVTVPHSPPQPKTNLENKDLSKKSPAEMLLTNGQKAKCGPKLKRLSLKGKAKVNSEAPAANAVKAGGTDHRKPLISPQTSHKTLSKAVSQRLHVADHEDPDRNTTAAPRSPQCVLESKPPLATSGPLKPSVSDTSIRTFVSPLTSPKPVPEQGMWSRFHMAVLSEPDRGCPTTPKSPKCRAEGRAPRADSGPVSPAASRNGMSVAGNRQSEPRLASHVAADTAQPRPTGEKGGNIMASDRLERTNQLKIVEISAEAVSETVCGNKPAESDRRGGCLAQGNCQEKSEIRLYRQVAESSTSHPSSLPSHASQAEQEMSRSFSMAKLASSSSSLQTAIRKAEYSQGKSSLMSDSRGVPRNSIPGGPSGEDHLYFTPRPATRTYSMPAQFSSHFGREGHPPHSLGRSRDSQVPVTSSVVPEAKASRGGLPSLANGQGIYSVKPLLDTSRNLPATDEGDIISVQETSCLVTDKIKVTRRHYCYEQNWPHESTSFFSVKQRIKSFENLANADRPVAKSGASPFLSVSSKPPIGRRSSGSIVSGSLGHPGDAAARLLRRSLSSCSENQSEAGTLLPQMAKSPSIMTLTISRQNPPETSSKGSDSELKKSLGPLGIPTPTMTLASPVKRNKSSVRHTQPSPVSRSKLQELRALSMPDLDKLCSEDYSAGPSAVLFKTELEITPRRSPGPPAGGVSCPEKGGNRACPGGSGPKTSAAETPSSASDTGEAAQDLPFRRSWSVNLDQLLVSAGDQQRLQSVLSSVGSKSTILTLIQEAKAQSENEEDVCFIVLNRKEGSGLGFSVAGGTDVEPKSITVHRVFSQGAASQEGTMNRGDFLLSVNGASLAGLAHGNVLKVLHQAQLHKDALVVIKKGMDQPRPSARQEPPTANGKGLLSRKTIPLEPGIGRSVAVHDALCVEVLKTSAGLGLSLDGGKSSVTGDGPLVIKRVYKGGAAEQAGIIEAGDEILAINGKPLVGLMHFDAWNIMKSVPEGPVQLLIRKHRNSS

SEQ ID NO: 504 - DNA, 2651 bp, Homo sapiens
tctttttcttttttttttaagaaaaactagtgacattgcagagaaggacgcttcctctctatcttttggcgcattagtgaagggggtattctattttgttaaagcgcccaagggggcgcagggaccttggagagaagagtggggaggaaagaggaagggtgggtggggggcagagggcgagtcggcggcggcgagggcaagctctttcttgcggcacgatgccgtctctgctggtgctcactttctccccgtgcgtactactcggctgggcgttgctggccggcggcaccggtggcggtggcgttggcggcggcggcggtggcgcgggcataggcggcggacgccaggagagagaggcgctgccgccacagaagatcgaggtgctggtgttactgccccaggatgactcgtacttgttttcactcacccgggtgcggccggccatcgagtatgctctgcgcagcgtggagggcaacgggactgggaggcggcttctgccgccgggcactcgcttccaggtggcttacgaggattcagactgtgggaaccgtgcgctcttcagcttggtggaccgcgtggcggcggcgcggggcgccaagccagaccttatcctggggccagtgtgcgagtatgcagcagcgccagtggcccggcttgcatcgcactgggacctgcccatgctgtcggctggggcgctggccgctggcttccagcacaaggactctgagtactcgcacctcacgcgcgtggcgcccgcctacgccaagatgggcgagatgatgctcgccctgttccgccaccaccactggagccgcgctgcactggtctacagcgacgacaagctggagcggaactgctacttcaccctcgagggggtccacgaggtcttccaggaggagggtttgcacacgtccatctacagtttcgacgagaccaaagacttggatctggaagacatcgtgcgcaatatccaggccagtgagagagtggtgatcatgtgtgcgagcagtgacaccatccggagcatcatgctggtggcgcacaggcatggcatgaccagtggagactacgccttcttcaacattgagctcttcaacagctcttcctatggagatggctcatggaagagaggagacaaacacgactttgaagctaagcaagcatactcgtccctccagacagtcactctactgaggacagtgaaacctgagtttgagaagttttccatggaggtgaaaagttcagttgagaaacaagggctcaatatggaggattacgttaacatgtttgttgaaggattccacgatgccatcctcctctacgtcttggctctacatgaagtactcagagctggttacagcaaaaaggatggagggaaaattatacagcagacttggaacagaacatttgaaggtatcgccgggcaggtgtccatagatgccaacggagaccgatatggggatttctctgtgattgccatgactgatgtggaggcgggcacccaggaggttattggtgattattttggaaaagaaggtcgttttgaaatgcggccgaatgtcaaatatccttggggccctttaaaactgagaatagatgaaaaccgaattgtagagcatacaaacagctctccctgcaaatcatgtggcctagaagaatcggcagtgacaggaattgtcgtgggggctttactaggagctggcttgctaatggccttctactttttcaggaagaaatacagaataaccattgagaggcgaacccagcaagaagaaagtaaccttggaaaacatcgggaattacgggaagattccatcagatcccatttttcagtagcttaaaggaagccccccactttttttttttctgcctgagattctttaaggagatagacgggttgaaagacatcaatgaaacagaaggggcgttcttgaagaattcataattttaagcagttagtaatttcattttaaaatttctgtagaagctcaggaattatgattaatcaccatctgcctccaggcctttcatctcatgacaaacaaatataataatgatatcgtgtcactctgttaaatgttcatactgtttcaagcccatatgattagatttatgtttttaaaatctgttgtctccatatcttgatggcttttgggagcatttcacacaaggatataaaatgcggttttcttaaatgaaatgttttgtagctagaataaaatcatttttacaagtacagcattcttggaaagaatttaacacccaaaaaggggaaaatgtaatgaaaaatctcaaggttggaaatacagccttactctctctagagctggaggacaggtttgtggttgaggacttctctgtccgatgtctacattcaggttctgacttcatatcttgaaaaaggatttcctccctgtctttttcagtgtctcataaacgctactctggattgttgtaaatattagtgagatgggaggatttacagaagaaaagcaagtcaaaaatatttcctttttgatgtaaaaaaaaaaagccctatttcgcactaacattttattttacaagtattttaatcttatattttggtattagaaaaatttgtctattttttcattttgaagattaaatgttgcttacattttaaaaaaaaa

SEQ ID NO: 505 - protein, 540 aa, Homo sapiens
MPSLLVLTFSPCVLLGWALLAGGTGGGGVGGGGGGAGIGGGRQEREALPPQKIEVLVLLPQDDSYLFSLTRVRPAIEYALRSVEGNGTGRRLLPPGTRFQVAYEDSDCGNRALFSLVDRVAAARGAKPDLILGPVCEYAAAPVARLASHWDLPMLSAGALAAGFQHKDSEYSHLTRVAPAYAKMGEMMLALFRHHHWSRAALVYSDDKLERNCYFTLEGVHEVFQEEGLHTSIYSFDETKDLDLEDIVRNIQASERVVIMCASSDTIRSIMLVAHRHGMTSGDYAFFNIELFNSSSYGDGSWKRGDKHDFEAKQAYSSLQTVTLLRTVKPEFEKFSMEVKSSVEKQGLNMEDYVNMFVEGFHDAILLYVLALHEVLRAGYSKKDGGKIIQQTWNRTFEGIAGQVSIDANGDRYGDFSVIAMTDVEAGTQEVIGDYFGKEGRFEMRPNVKYPWGPLKLRIDENRIVEHTNSSPCKSCGLEESAVTGIVVGALLGAGLLMAFYFFRKKYRITIERRTQQEESNLGKHRELREDSIRSHFSVA

SEQ ID NO: 506 - DNA, 2895 bp, Homo sapiens
catgtcagtcatctactttttttctttgaaatctgcatatgggttacaaaaactctgttaggttttgaaaattccattaagttggaaaccttggttaaaaatgtaggtgcctggcccatggttaccctggattcaggtctctcatgattatatttggggatttacgttcctaactgctaagcaacatctttgacaactagtaattcatactctactagtagtcacatgtcatatagtaaaataaatagggctttagttcttaagtaattctataggattttaccctgaaatccagggtgttcagatttcaaaaaggataatttatcagtattttctcatccagtcaaacttcagctgacattgatacaggtcaaaatgcgtagatgctttttggtgttggaaataagtgtctgtcttatggtcatcattgtcttcttagatttttgggtaggggggccaggtagggggagactcagaaataaaagcgttccccagataacttcaatctggaaagaattttttgtatagagtccatctctccctcaagactgaccacaggtttcatgagaaggtccctgaaaacatcacatttctctgaagaaccatcaacttgtcttttcttgaaccacaggaatggttctacagaccctactataattcttcacatttcagaacccatgtttaatggagggaagagagaaatgcatgggaaaagaacacctccttttctcctttctcttaaattcaaagacgtttgctttggaatgccctcacttctccctattcacaggcttctaaaatcattaatttactcaaggcacatgtgccttctttgccccaaatgcatcactttccttttagttatggctgattttgggtgtgtgtgtgtaagacatgcagtcaacaatgagatgaaggccattgcatagatctcatgcagatagtgatggattcagaaagtaggttccagtggcgtcactaccttcttgtaagccagtatacactggctatttgtggaaatctctttgggagatcaaatagagtattatgccactgtgagtgtttataaactggaaggaacaagtacctgtgtttcttgggacacaaagcactcagatcctgagtggatgcagacatgagagtaaatgtcagcccaaattaggcccctcgacctacagacatttcatgggttttatttaatcacaccccatggtttggggctacatgaggaagttggtaatgagctgaatttcttattcagtggaaaaaactgaaactgtctaaaaacacgggatatattttagaggcaattgtggaagcggagagaatgagatgatggtgttcagagggaccagcttctttttcagttgtctttagaactcaagaataatcaataatttagtgccccttcaacagccatactcagcaagaagaatcagaagcttgatcctctaacagaaatagaagagggtagctttgcccattgccactgtctttactgccccttctgcccctccacccacatccacattcagcatcactccaaggatgtgtcagcatcttgcccatgcaggtagaaatttgtgagtaggcctccatacttcctcgggggaagaaagagaaactagtgctggttttaagaatgtagctggcttttcatcagaacccttatgctaacctgaccacacttgctctcggggaagttcaagcctgtgatgtgcataaactccaacaagcctggctttggtgttcagcatgcacattccataaatatctcttgcaggcataccccacagctagactgcaggattaaaataacttccaaaaggtgctggattggagtttgttcaaatttctcattaaccactaatgttaattcataccaaatgcaaagtattctaaaccagctgatgctgtcagtgttcaagttttaagtgacttcaaacacaatggaagtgtttcaatgggagccagatctcatgagtaaaaatccattttataatagctctgtgatatatcagtgggagatgattcataggggagagatttgaacaagcagaattaagtgttagcaaaaatgctgcattgctttgattcatgtttaaagacctaaatttctatgcacaaggaataaagggcctacttaccaagtgtaaatcacaacataggctaccaaaatatttcttatttgctaggagaacaaagctgtcacggtgcatgatagctggacagagatggctaaaaaagaggcaaattcagatttggaaacagggtggcctcttcattatttattgccaagatctgaaaatcttcaacatcttataagacaacaatgaagtagcccctgaacagcatggagttgctgtgagtttgttcgttgcagacctttgtgttgggtcctgggaatctaagctttgttccctgtgcatggtggataattgaaaccaagaggacatgggatagaccttgtgacagaccaattctgtgacccctgtcttctgggtcacattattcattgttgatttaaatacaggactaccaaacagtacaaatctatcatgagtctggtagaaaagtaaaagtaaaagctgcacacgttacatactgtttattgttctaatgtacaactaactatttgcatataatgtgatttaatttattgctgttttgtgtagaaaaggagaactaatgactgtggatataacccatgttttgtataatatattttatttcttgtgcgaactggtcatttaaaatatctacttcatttgatgtttggatataaatgtgtatgtgtccttgtaaatgtttctatcaagcaagaatgccacgtactcagagtataacaatgtgttctcattaaaaaatacatcccgaaaaaaaaaaaaaaaaaaa

SEQ ID NO: 507 - protein, 121 aa, Homo sapiens
MRRSLKTSHFSEEPSTCLFLNHRNGSTDPTIILHISEPMFNGGKREMHGKRTPPFLLSLKFKDVCFGMPSLLPIHRLLKSLIYSRHMCLLCPKCITFLLVMADFGCVCVRHAVNNEMKAIA

SEQ ID NO: 508 - DNA, 863 bp, Homo sapiens
atggctggtggtcccaagaagcatctgaagtaggtagcaactccaaagcattggatgctggataaattgaccagtgtgtttgctccttgtccatccaccagtcctcacaagttgagagagtgtctccccctcatcattttcctaaggaacagacttaagtatgccctgacaggagatgaagtaaagatttgcatgcaggggttcattaaggttgatggcaaggtacgaactgatataacctaccctgctggattcatggatgtcatcagcattgacaagacgggagataatttccatctgatctatgacaccaagggtcgctttgctgtacatcgtattacacccgaggaggctaagtacaaattgggtaaagtgagaaaaatctttgtgggcacaaaaggaatccctcatctggtgactcatgatgctcacagcatccgctaccttgatcccctcatcaaggtaaatgataccattcagactgatttggagactggcaagattactgttttcatcaagttcaacactggtacactggtaacctgtgtatggtgactggaggtgctaacctgggaataactggtgtgatcaccaacagagagaggcaccctggatcttttgacgtggttcacatgaaagatgtcaatggcaacagctttgctactcgactttccaacatttttgttattggcaagggcaacaaaccatggatttctcttccccgaggaaagggtatctgcctcactattgctgaagagagagacaaaagactgggggccaaacagagcagtgggtgaaatggtccctgggtgacgtgttaaatctttgtacataattaaaaataatgtggcaggaattaatag

SEQ ID NO: 509 - DNA, 8459 bp, Homo sapiens
ggtcattgctgtattccttaggtgctgcaaagtctcattttgagtgtggaatggtgggcggtgttcatcctgaggcagcagtgagagtcgtccagtccatggctcgtttcatggctgcctatttcaccaatcagcagctttgcattttgccccctcatcatgtgaatgttcttcccccacttcatattaaaacagagcagtcctttcgacttattcctctgcaacactctaaggtggccagtgttgttagagatcagaatctctctaatgtgtggacagttgaatatgcacttgaattactatttattggtggcctggttccagaggctgtgtggttggcatataaacttggagactggaagacgtctgtttcaattggtgtggctttccagctgttctgtaaacgtgatagcaatttcatgaggtccaagaaaaagagtctgaatctaccactccgtatgactccagcacagatttttcaggaaaaactgcagtgtgttttaggtcaaccagcctctttggaagcaaaaaatgaaatgggctcaaaatataaacagtttacagccaaaatttggaaacacctcaaatgtccgtcaactggtgaatggataagcaaattcaaatatatctttaaaatggaataacaaatagtgaagaggaacaaattgctgataacttgtgacaacatagatgaatcacagaaccgtcatgatcccattgaagaggaagatgcaaatctgctatttggttcagtacaagaagtactgaaagcatcagttatggccgatgcagatattctttcggagacatttcaacttctgatagactctgccaaggacttcagtaaaagactgtggggcttagtgccattcggcttgtatcttccagctcctccattgtactgtccccagccagctattcttagtgaagaagatggtgatgatcttcttttaaaagctgaaaaaaataatcgccagaaggtatctggaatccttcagcgtgttctcctgcttttccgggcggctcagtgttcttttcctgtagcacagtggtatatattgcagttgaggtgggcaagaaaagtcatgcagaagattcgaatgaaaggatcccttccttcactgagtccttttcctcagtcattacttaattactgtaaaggaggtatcgcattttttagacctggagcagctggagaccacaagcttgatgaagtttccattagagcaataggttgcttcagagaactttgtgctctgtgttggatgctgcatgtccgtgataagttatcctatagttgcaggcaatatcagaaagcaagagaaaatgtaaaaggagaaaaggaccttgaagtggagtttgattcttgtatgattgagcactgtcttagtgcagtggaatgggcttatagaatgctgcctttctctcggttttttaatatggaagaacttattcaggatataattttgagccttattggagaactgccaccaatcagaaaggtagcagaaattttcgtgaaagcatttccctatcctgaggacgtgagggttcctttaagagacaaatatcactctcttcaccagagactcagacactgtgttgtgaaaggaccccagactgaggaaatgatgtctgttgtcatgcattctatccagaaagtgagggtgaaagctctaaaacgtgtgcggagaaatataggctcttttgaagtgaatatatgggaaccaattgaagaagagaaaccagatgaggctccaggtgttgacagatattccctggggactagtttgagcagaagtacactcacagaactaggagattctgtggttcacagtgatgcagatacgttctctgaagctttgtcggttgaagaaaaaagtaggataaatatctatcaaagaaatgccccaaatcacatggaattaacatcaattcataagccaactgataaaaggaaaatgtgtaatcagaaagaaaatcctacaaagaaagaagatcatgaaaagttatcacaaaatacacttcctgtaataggtgtttgggaatttgaacgtgatgatgatgaatatattaaattccttgatctgtttttgagttacattcttgaaagagacctaccttattccagggatgctgacattccatttctaactagtttttctggaaagcttagagaacatgaacttaattctttactttttgatgtacatacaacattaaaacgacatcagagcaaaactaaaagccagaatgtgtttagagctggttcttgctttgttgttgctcctgagtcctatgaatcagaaaaatcatcctctttaaatgatgaatatggcatgcatttagaaaaccagaaactttcatcatcagtactggttaatcaagggatcaaaccttttttacaatatccttcgaatgaagtcaataagaatgaaggaatgagtggattatttggtttaaaacaaaggtcaatttacaaaatacaagatgacactagagagaaatgtctaatccagagatcatcaaaccacattttttggactcccaagtccattaaaactagaagatgtattttcaaagctattcagtgcaatgatattaaccctcaagaagatcttcctttagcactaaacacttttggcagtataggaagactgctggaatggatgataaggtggtctaatagaaggctactctgtgattctggtataactgagtcatcctctgagtacagtccagtaattcgtgtaaagacctctacagctgccattcttacatcattatggcttttggaacaaccctattttgctacatataaggcaaaaaatgccattattaagatggtagagaatcgtgacactgggtgtcagattggacccaatattgagagggagagcaaatcagatgctggcggttcagttgcagtagcaactccaggtggaactgaggaaagaaatggtcagaataaatcttgtcaaaatatcttgaaaatgccaactgaagcaaaaaatcctgatataaaagaaatcaatgatgatattatttccatcactcataatactaaaaaagaatttatagatattgatgagaatcttttagaagtagaagcatttacagaagaggaaatggatatgcacatatcagactatgaagaagacattgaagaatctgttggaggtttcagaagtcccagtcttgccatttgcatgatgactttaccacagcagttagaagaagagttcacagaagaggttcagtgtcaaagggaagaaccactggagacaattatggaggaaaaatcgactgaacaaaaaggtatgatcgaagccttttcacatcctgggcataccactcctcaatcaatgcaagtagatacgagttcagaaatttctagtgcacagatttctacatataaagaaaaatcttcctcagttccacttctgatatcaaatggagtcaatgttgcttcacaaccacctgctccaacacctcagaagacccagagaaatgaattcacggctcagttaccagattgttcggagtccgttaggcagatgctgcaagatgaaatgtttaaattagttcagctgcaacagatcaacttcatgagcctaatgcaaatagtaggatcatcctttgctaatctcccagatacacaacaacttgtacagcagtctcagtctgtgcatttaggggaaagccaagaatcaaacctaagaggatgtggtgatgttgaagacagcaacaaaaatcttaaggagagattttttattaaaccacagtcaatgggagagaacgccagagagcctcgcaagaacagcccacactgccatgaaggaactatcccatctggtcaaaatagtactggaaacgtacagaatgttccacatgggagtattcctttatgtcaattaaatggccagccccggaaaaaaggaccaattccatcatctcaaaacttaccatccacttcgttttatccagctcctgctggaaatactcacctctaccttttgtccacaccttctgttgttcagaaggcacctagacttatcccacatgcaaaaacatttagtcctggtgatggctttcctttgcttcaatttaagtctaaacaagaattccagccccttttcttacatacaggaagtattccacaagttcccttcaggcctttgccacaaccaagagaggcttggggattatctgactccttccaacctgctctgccacagagagcagcacaaactactccagcatcccatttgaatgtaagccagtataacactgaagccagaaaaaaagaagttgagcagaagacgtgggcagaaactgtaattacagaaattcctaatcatgtgaacttggatcaatatgttggacaagaaaatttgacacctcaacaggactcttcagtgtttataaaaccagaaaaactatttgatgttaagccagggacccttgagatatctcctcaccattcctttggacttccgttactatacctgccacttaaacctcctaatatgtttccatcaacctcaagagcatctattacagttccctcaacacctatccaacctatagcagaagaaagaaaatacccaagattgtcattacttcattcacatttgtccccagaaaataggtgcaaaaaaacacaacttatcccacttgaaaacctcattgcgtttaaacaaagccaacagaaactaacacataatttatttgaacaaggtgatgctggacaccttcaacttctaaaggtcaaaatagaaccacctgaagtaagacaaggaaaggacagtaaaaaaaggcaaagaagaagagctgagaaagagctgcaagaaaaaagatgtgagaaactgaggagaaaaccaaatgtgacttttcgaccagagaattccataattaataatgatgattcagaaatcattaagaaacccaaggaacaacaagaacattgtggttcccatcctttggatgacttcgacgttccttttgaaatgctacaagatgataatacttcagctggattgcatttcatggcctctgtaaaaaagaaagctataggaagtcaagatgcaagtacaaatacagacccagaacatgagcctttgactgctcctcagctcttggtcccagatgtctatctaaatctgaagctttccagtgaaatgtcagagaaaccttggtcaccctcaatacctcatacagtaacaaacttggttggacatacttatataaatgtgattgacattgaagctaatgatcttctacaggaattacctgtgagagaagagccttcaaatgataatgttatcaaacagcaaagcgatcatctagcagttccatcgtctgcagagttacattatatggcagcttcagttactaatgctgttcccccacataattttaagagtcaaggtctgccaaaaccagagttccgattcaaaggacagagcacaaagtcagactctgcagaagattatctattgtggaaacggctgcaaggtgtctctgcagcttgccctgcaccaagctctgcagctcaccaactagagcatctcagtgctaagcttcagaaaattgacgagcagttgctagcaatacagaacattgctgaaaacatagaacaggatttccccaagcctgaaatgctagatctacattgtgataagattggaccagtggatcacattgaattctcttctggccctgaattcaaaaaaacattagcttcaaaaaccattagcatttctgaagaagtgcgttttttgacccatatggatgaagaagatcaaagtgacaaaaaggagacttcagaacctgaattttcaataacagaaaattattctggtcagaaaacctgtgtgtttcctactgccgattcagctgtcagcctttccagttccagtgatcagaatactacttctcctggtatgaatagcagtgatgaattgtgtgagagtgtttcagtacatccgctccagatgactggattgactgatattgcagacattattgatgaccttataattaaagacggagtttccagtgaagaacttggcttaacagaacaagctatgggcacctccagaattcagcattattctggcagacattcacaaagaactgacaaggaaagaagagagattcaagcctggatgaaaagaaaacgaaaagaaagaatggcaaagtacttaaatgagctggcagaaaagagagggcaagaacatgatcctttctgtcccagaagcaatccactttacatgacttcaagggaaataaggctgagacaaaagatgaagcatgaaaaagacagattgctgctctctgaacactatagtcgtcgaatctcacaagcgtacggtctgatgaatgaactgttatctgagtcagtacagctaccaactctaccacagaaaccattgcctaacaaacccagccctactcagtcttccagttgtcaacactgcccttctccaagaggagagaatcaacatggtcacagttttctaataaatcgacctggaaaagtcaaatatatgtccaaaccgagttatatccataagaggaagtcttttgggcaacctcaaggctcaccttggccacatggaactgccactttcaccatacagaaaaaagctggtggagccaaagcagcagtaagaaaggctacgcagtctccagttaccttccaaaaaggctctaatgctccgtgtcatagtctgcagcatacaaaaaaacatggaagtgctgggcttgcacctcaaaccaagcaggtgtgtgtagagtatgaaagagaggagactgtggtgagtccctggacgataccttcagaaatccataagattcttcatgagagtcacaattcccttctacaagacttgtctccaactgaagaggaagagccagagcatccttttggggtgggcggtgtggacagcgtgtctgagagcactggcagcatcctcagcaagctggactggaatgccatcgaagacatggtggccagcgtggaggaccagggcctgtctgtccactgggccctggacctgtaagacctggatatcattgggtttccatgcacaggccagcacctcagtaatgtggttctgaaagattaacaggtttaagggacagaagcaatgaaagaagcaatgtgaattttccatttgctttcatattattacctggattagccattaccagaggaaaaataaacatttctcagtaactttgcctttatggggaaagggttgactattgatgtattatatgtttttgtatttgatgcatcattaggcataatttttaaaatgataagtacctttcaagccaagtttgcataacctactttcaataaaaaccctctatcttgcctcctcctttattaccctctgagttttgagaaacaaccatatacagatgaatctaataggaaaaaaaaaaatcttttcattgagaagaaaatcagtctcacctgagaactcaattatgaaccctattttaaaacacctatgcagggtttagcctaggagtgaaaagaaaaaccaactaccttttaccaaccctgaatctctaaataagcaaagtttcatggaggccaggagatcttctgtcttctgccctgtagcctgaagccttggaggaagaaacaggaatggatgctttgggcaggaaagtaagggaatatgactccggcctctagaaggctcatcttaaatttgtaagaaccatggtacagagacctgattagtttttggtattgtgctccaataatgtcatagttttaagagataatttttatgagaattgactaagaaccagtatccttcaactacttcatcaatgtttggtataatataaaagcacactatcatctgaaaaagctattaaatacccctctttttccaaatatctacctgtgtgaagccaggttttacaacatgtattgcagcaagttgaatgcagaagcaggtatggtaattcagctgccttctatcaagctaaacattaaagagatttgtagaactataaaacaatgctactctccttaccaaattgttttagaaaatagctttataggctaacattattgttaattgtcatttaattgttttgtcatttaaaatattttaaattgttttctgttagtttcttttttgtatattctatgggtattttattgatacatgatagttgtacatttttatggggtgcatgtgatattttgatatgtgcatacaatgtgtagcaatcaaatcagggtaattgggatattcatcacctcaaacatttatcatttatttgtgttggaaacattcaaaccttttcttctagctatttatccattgttggatacttatatcaattctatatcttagctgttgtgaatagagctgcaataaatgtaggagtgcagatatctctttaaaaaaaaaaaaaaaaaa

SEQ ID NO: 510 - protein, 2095 aa, Homo sapiens
MADADILSETFQLLIDSAKDFSKRLWGLVPFGLYLPAPPLYCPQPAILSEEDGDDLLLKAEKNNRQKVSGILQRVLLLFRAAQCSFPVAQWYILQLRWARKVMQKIRMKGSLPSLSPFPQSLLNYCKGGIAFFRPGAAGDHKLDEVSIRAIGCFRELCALCWMLHVRDKLSYSCRQYQKARENVKGEKDLEVEFDSCMIEHCLSAVEWAYRMLPFSRFFNMEELIQDIILSLIGELPPIRKVAEIFVKAFPYPEDVRVPLRDKYHSLHQRLRHCVVKGPQTEEMMSVVMHSIQKVRVKALKRVRRNIGSFEVNIWEPIEEEKPDEAPGVDRYSLGTSLSRSTLTELGDSVVHSDADTFSEALSVEEKSRINIYQRNAPNHMELTSIHKPTDKRKMCNQKENPTKKEDHEKLSQNTLPVIGVWEFERDDDEYIKFLDLFLSYILERDLPYSRDADIPFLTSFSGKLREHELNSLLFDVHTTLKRHQSKTKSQNVFRAGSCFVVAPESYESEKSSSLNDEYGMHLENQKLSSSVLVNQGIKPFLQYPSNEVNKNEGMSGLFGLKQRSIYKIQDDTREKCLIQRSSNHIFWTPKSIKTRRCIFKAIQCNDINPQEDLPLALNTFGSIGRLLEWMIRWSNRRLLCDSGITESSSEYSPVIRVKTSTAAILTSLWLLEQPYFATYKAKNAIIKMVENRDTGCQIGPNIERESKSDAGGSVAVATPGGTEERNGQNKSCQNILKMPTEAKNPDIKEINDDIISITHNTKKEFIDIDENLLEVEAFTEEEMDMHISDYEEDIEESVGGFRSPSLAICMMTLPQQLEEEFTEEVQCQREEPLETIMEEKSTEQKGMIEAFSHPGHTTPQSMQVDTSSEISSAQISTYKEKSSSVPLLISNGVNVASQPPAPTPQKTQRNEFTAQLPDCSESVRQMLQDEMFKLVQLQQINFMSLMQIVGSSFANLPDTQQLVQQSQSVHLGESQESNLRGCGDVEDSNKNLKERFFIKPQSMGENAREPRKNSPHCHEGTIPSGQNSTGNVQNVPHGSIPLCQLNGQPRKKGPIPSSQNLPSTSFYPAPAGNTHLYLLSTPSVVQKAPRLIPHAKTFSPGDGFPLLQFKSKQEFQPLFLHTGSIPQVPFRPLPQPREAWGLSDSFQPALPQRAAQTTPASHLNVSQYNTEARKKEVEQKTWAETVITEIPNHVNLDQYVGQENLTPQQDSSVFIKPEKLFDVKPGTLEISPHHSFGLPLLYLPLKPPNMFPSTSRASITVPSTPIQPIAEERKYPRLSLLHSHLSPENRCKKTQLIPLENLIAFKQSQQKLTHNLFEQGDAGHLQLLKVKIEPPEVRQGKDSKKRQRRRAEKELQEKRCEKLRRKPNVTFRPENSIINNDDSEIIKKPKEQQEHCGSHPLDDFDVPFEMLQDDNTSAGLHFMASVKKKAIGSQDASTNTDPEHEPLTAPQLLVPDVYLNLKLSSEMSEKPWSPSIPHTVTNLVGHTYINVIDIEANDLLQELPVREEPSNDNVIKQQSDHLAVPSSAELHYMAASVTNAVPPHNFKSQGLPKPEFRFKGQSTKSDSAEDYLLWKRLQGVSAACPAPSSAAHQLEHLSAKLQKIDEQLLAIQNIAENIEQDFPKPEMLDLHCDKIGPVDHIEFSSGPEFKKTLASKTISISEEVRFLTHMDEEDQSDKKETSEPEFSITENYSGQKTCVFPTADSAVSLSSSSDQNTTSPGMNSSDELCESVSVHPLQMTGLTDIADIIDDLIIKDGVSSEELGLTEQAMGTSRIQHYSGRHSQRTDKERREIQAWMKRKRKERMAKYLNELAEKRGQEHDPFCPRSNPLYMTSREIRLRQKMKHEKDRLLLSEHYSRRISQAYGLMNELLSESVQLPTLPQKPLPNKPSPTQSSSCQHCPSPRGENQHGHSFLINRPGKVKYMSKPSYIHKRKSFGQPQGSPWPHGTATFTIQKKAGGAKAAVRKATQSPVTFQKGSNAPCHSLQHTKKHGSAGLAPQTKQVCVEYEREETVVSPWTIPSEIHKILHESHNSLLQDLSPTEEEEPEHPFGVGGVDSVSESTGSILSKLDWNAIEDMVASVEDQGLSVHWALDL

SEQ ID NO: 511 - DNA, 4200 bp, Homo sapiens
gactctcgcctgacttcctaatttgctacttatccccagcgttggtcccggcgaggatatgctgagatttatggcactgttggctgcatttttggagaacagcaagcagcttcttttcagataatcccaccgtttctggcatgtcagatatggattatcctttacaaggacctggtttgctgtccgtacccaaccttccagagatcagttccatccgaagagttcctctcccacctgaacttgttgagcagtttggacatatgcagtgtaattgcatgatgggtgtgttccctcctatcagcagagcttggctcacaattgacagtgatatattcatgtggaactatgaggatggaggagaccttgcctattttgatggacttagtgagactattcttgctgtggggcttgtgaagccaaaagcaggcatctttcaacctcatgtgcgacacctcctggttttggcgacccctgtagacatagtaattcttggactcagctatgctaatttgcaaacaggttctggagttcttaatgatagtttgtctggtggaatgcagttgcttccagatcctttatattctcttcctactgataatacttaccttttaacaataacttccactgataatggcagaattttcttggctggaaaggatggctgtttatatgaagtagcctaccaggctgaagcagggtggtttagccaaagatgtaggaaaataaaccactcaaagagctcactttctttccttgttccttccttgctacaattcacgttctcagaagatgatcctattcttcaaattgcaattgataattctagaaatattttatatacacgatctgagaaaggagtaatacaggtgtatgatttgggacaagatggacaaggaatgagcagagttgcctctgtgtcacagaatgccattgtctctgctgctggtaacattgctaggaccatcgatcgttctgtttttaaaccaattgtccaaatagcagtgattgaaaattctgaatcactggactgtcagttattggctgtcacacatgcaggtgttaggttatattttagcacttgtccattcagacagccattagcacggcctaatacactgacgctggttcatgtccgcttacctcctggattctcagcatcttcaaccgtggaaaagccttcaaaagtacatagagctctttatagtaaaggtattctattgatggcagcctcagaaaatgaggataatgatattttatggtgtgtcaaccatgatacttttcctttccaaaagccaatgatggaaacccagatgacagctggtgttgatggtcattcctgggctctttctgcgatagatgaattgaaagtagataaaataattacacctttaaacaaggatcatattccaataactgattcaccagttgttgtacagcagcacatgttacctccgaagaaatttgttctcctctcagcacaggggagccttatgtttcataaacttagacctgtagatcaactgaggcatctacttgtgagtaatgtgggaggagatggagaagagattgaaagattctttaaattacatcaggaagaccaggcttgtgcaacttgccttattcttgcttgctccactgctgcctgtgatagagaagtatctgcctgggctactcgggctttctttaggtatggtggtgaagcacagatgagatttccaaccactcttccgcctccaagtaatgttggtcccatcttggggtctcctgtctattctagttctcctgttcctagtggtagtccctatccaaatccatcctttttgggaacaccgtctcatggtatacagcctcctgccatgtcaactccagtgtgtgctctgggaaacccagcaactcaggccacaaatatgagttgtgtgactggaccagagattgtgtactctggaaaacacaatggtatttgcatttacttttctcggatcatgggaaacatttgggatgcaagcttagttgtggagagaatattcaagagtggcaacagagagatcactgcaattgaaagtagtgttccctgccaactgctagagtcagtgctacaagaactaaagggtttgcaggaatttctagacagaaactcccagtttgcaggaggaccattaggaaatccaaatactactgctaaagtgcagcagaggctgataggattcatgcgtcctgaaaacggaaatccccagcaaatgcaacaggaactgcagaggaagtttcatgaggctcaactaagtgaaaagatttcacttcaggcaattcagcagttggttcgaaaatcatatcaggctctggctttatggaaacttctttgtgaacatcaattcactatcattgtggcagaacttcagaaggaacttcaagagcagctgaagatcaccacctttaaagatcttgtaatcagggacaaagaactcacaggggcattaattgcttctcttatcaactgctacatcagagataatgccgctgttgatggcattagtttacatttacaggatatctgcccacttctatatagcactgatgatgcaatttgttctaaggcaaatgagcttctccagcgttcccgacaagttcaaaataagactgaaaaagaaagaatgttaagggaatcattaaaggaatatcaaaaaattagcaatcaagtggacctttccaatgtttgtgctcagtatagacaagtgagattttatgagggtgtggtggaactttctcttacggctgcagagaaaaaagatcctcaaggtcttgggcttcatttctataaacatggagaaccagaagaagacatagttggacttcaggccttccaagaaagattaaacagttacaaatgcattacagacacacttcaagaactggtaaatcaaagtaaggccgctcctcagtctcccagtgtacccaaaaaacctggtcctccagtgttgtcatctgatccaaatatgctgagtaatgaagaagcaggacatcattttgaacaaatgcttaaattgtcacagcgatccaaggatgagctctttagtattgccctttataattggctaatacaagtcgaccttgcagataagctgctacaggttgcttctccatttctggagccacatctagtccgaatggccaaagttgatcaaaacagagttcgttatatggatttactctggcggtattacgagaagaacagaagtttcagtaatgctgctcgtgtactgtccagactggctgacatgcatagcacagaaatttcacttcagcagcgactagagtacattgctcgagccattcttagtgccaaaagttccactgccatttcatcaatagctgccgatggtgaatttcttcatgaattagaagaaaaaatggaggttgctaggatccaacttcagatacaggagacactacaaaggcagtattcccatcattcttctgtacaggatgcagtttctcagctggattctgagctgatggacataactaagctttatggggaatttgctgacccatttaaacttgcagagtgcaaacttgcaataattcattgtgccggttattcagaccctatattggtgcagacactttggcaagatatcatagagaaagaattgagtgacagtgtgacattgagctcctcggatagaatgcatgctcttagtctcaagattgttctccttggcaaaatttatgctggcacaccacgcttctttcctttagattttattgtacagtttttagaacagcaggtttgtactttgaactgggatgtgggcttcgtaatacagacaatgaatgaaattggagtaccattacctagactactagaagtttatgatcagttgttcaaatcacgggatccattctggaacagaatgaagaagccactgcaccttttggattgtatacatgtattattgataagatatgttgagaatcccagccaagttttaaattgtgaaaggagaagatttacaaatctctgcctggatgctgtttgtggttaccttgttgagctccagtctatgagctcgtcagtagcagtacaagccatcactgggaattttaaatctcttcaagctaaattagaacggcttcattaattactgtgatatactttcatccgttttatgatctgtaaaataaaaactcagctgggtccag

SEQ ID NO: 512 - protein, 1332 aa, Homo sapiens
MSDMDYPLQGPGLLSVPNLPEISSIRRVPLPPELVEQFGHMQCNCMMGVFPPISRAWLTIDSDIFMWNYEDGGDLAYFDGLSETILAVGLVKPKAGIFQPHVRHLLVLATPVDIVILGLSYANLQTGSGVLNDSLSGGMQLLPDPLYSLPTDNTYLLTITSTDNGRIFLAGKDGCLYEVAYQAEAGWFSQRCRKINHSKSSLSFLVPSLLQFTFSEDDPILQIAIDNSRNILYTRSEKGVIQVYDLGQDGQGMSRVASVSQNAIVSAAGNIARTIDRSVFKPIVQIAVIENSESLDCQLLAVTHAGVRLYFSTCPFRQPLARPNTLTLVHVRLPPGFSASSTVEKPSKVHRALYSKGILLMAASENEDNDILWCVNHDTFPFQKPMMETQMTAGVDGHSWALSAIDELKVDKIITPLNKDHIPITDSPVVVQQHMLPPKKFVLLSAQGSLMFHKLRPVDQLRHLLVSNVGGDGEEIERFFKLHQEDQACATCLILACSTAACDREVSAWATRAFFRYGGEAQMRFPTTLPPPSNVGPILGSPVYSSSPVPSGSPYPNPSFLGTPSHGIQPPAMSTPVCALGNPATQATNMSCVTGPEIVYSGKHNGICIYFSRIMGNIWDASLVVERIFKSGNREITAIESSVPCQLLESVLQELKGLQEFLDRNSQFAGGPLGNPNTTAKVQQRLIGFMRPENGNPQQMQQELQRKFHEAQLSEKISLQAIQQLVRKSYQALALWKLLCEHQFTIIVAELQKELQEQLKITTFKDLVIRDKELTGALIASLINCYIRDNAAVDGISLHLQDICPLLYSTDDAICSKANELLQRSRQVQNKTEKERMLRESLKEYQKISNQVDLSNVCAQYRQVRFYEGVVELSLTAAEKKDPQGLGLHFYKHGEPEEDIVGLQAFQERLNSYKCITDTLQELVNQSKAAPQSPSVPKKPGPPVLSSDPNMLSNEEAGHHFEQMLKLSQRSKDELFSIALYNWLIQVDLADKLLQVASPFLEPHLVRMAKVDQNRVRYMDLLWRYYEKNRSFSNAARVLSRLADMHSTEISLQQRLEYIARAILSAKSSTAISSIAADGEFLHELEEKMEVARIQLQIQETLQRQYSHHSSVQDAVSQLDSELMDITKLYGEFADPFKLAECKLAIIHCAGYSDPILVQTLWQDIIEKELSDSVTLSSSDRMHALSLKIVLLGKIYAGTPRFFPLDFIVQFLEQQVCTLNWDVGFVIQTMNEIGVPLPRLLEVYDQLFKSRDPFWNRMKKPLHLLDCIHVLLIRYVENPSQVLNCERRRFTNLCLDAVCGYLVELQSMSSSVAVQAITGNFKSLQAKLERLH

SEQ ID NO: 513 - DNA, 4355 bp, Homo sapiens
aaggcgctcgtttggcgcgcgcgccctaggcggcggatctaagctaacttcttggatcttttcttgtttctccttggtttttgactttttctggaccctggtgtctacgatttccgagatgccgtcttctttgttgggcgcggcgatgccggcctctacatctgccgcagccctgcaggaagctctggaaaatgctggacggctcatcgaccgtcagttgcaagaggaccgcatgtacccggacctttccgagctgcttatggtgtctgccccaaataatcccaccgtttctggcatgtcagatatggattatcctttacaaggacctggtttgctgtccgtacccaaccttccagagatcagttccatccgaagagttcctctcccacctgaacttgttgagcagtttggacatatgcagtgtaattgcatgatgggtgtgttccctcctatcagcagagcttggctcacaattgacagtgatatattcatgtggaactatgaggatggaggagaccttgcctattttgatggacttagtgagactattcttgctgtggggcttgtgaagccaaaagcaggcatctttcaacctcatgtgcgacacctcctggttttggcgacccctgtagacatagtaattcttggactcagctatgctaatttgcaaacaggttctggagttcttaatgatagtttgtctggtggaatgcagttgcttccagatcctttatattctcttcctactgataatacttaccttttaacaataacttccactgataatggcagaattttcttggctggaaaggatggctgtttatatgaagtagcctaccaggctgaagcagggtggtttagccaaagatgtaggaaaataaaccactcaaagagctcactttctttccttgttccttccttgctacaattcacgttctcagaagatgatcctattcttcaaattgcaattgataattctagaaatattttatatacacgatctgagaaaggagtaatacaggtgtatgatttgggacaagatggacaaggaatgagcagagttgcctctgtgtcacagaatgccattgtctctgctgctggtaacattgctaggaccatcgatcgttctgtttttaaaccaattgtccaaatagcagtgattgaaaattctgaatcactggactgtcagttattggctgtcacacatgcaggtgttaggttatattttagcacttgtccattcagacagccattagcacggcctaatacactgacgctggttcatgtccgcttacctcctggattctcagcatcttcaaccgtggaaaagccttcaaaagtacatagagctctttatagtaaaggtattctattgatggcagcctcagaaaatgaggataatgatattttatggtgtgtcaaccatgatacttttcctttccaaaagccaatgatggaaacccagatgacagctggtgttgatggtcattcctgggctctttctgcgatagatgaattgaaagtagataaaataattacacctttaaacaaggatcatattccaataactgattcaccagttgttgtacagcagcacatgttacctccgaagaaatttgttctcctctcagcacaggggagccttatgtttcataaacttagacctgtagatcaactgaggcatctacttgtgagtaatgtgggaggagatggagaagagattgaaagattctttaaattacatcaggaagaccaggcttgtgcaacttgccttattcttgcttgctccactgctgcctgtgatagagaagtatctgcctgggctactcgggctttctttaggtatggtggtgaagcacagatgagatttccaaccactcttccgcctccaagtaatgttggtcccatcttggggtctcctgtctattctagttctcctgttcctagtggtagtccctatccaaatccatcctttttgggaacaccgtctcatggtatacagcctcctgccatgtcaactccagtgtgtgctctgggaaacccagcaactcaggccacaaatatgagttgtgtgactggaccagagattgtgtactctggaaaacacaatggtatttgcatttacttttctcggatcatgggaaacatttgggatgcaagcttagttgtggagagaatattcaagagtggcaacagagagatcactgcaattgaaagtagtgttccctgccaactgctagagtcagtgctacaagaactaaagggtttgcaggaatttctagacagaaactcccagtttgcaggaggaccattaggaaatccaaatactactgctaaagtgcagcagaggctgataggattcatgcgtcctgaaaacggaaatccccagcaaatgcaacaggaactgcagaggaagtttcatgaggctcaactaagtgaaaagatttcacttcaggcaattcagcagttggttcgaaaatcatatcaggctctggctttatggaaacttctttgtgaacatcaattcactatcattgtggcagaacttcagaaggaacttcaagagcagctgaagatcaccacctttaaagatcttgtaatcagggacaaagaactcacaggggcattaattgcttctcttatcaactgctacatcagagataatgccgctgttgatggcattagtttacatttacaggatatctgcccacttctatatagcactgatgatgcaatttgttctaaggcaaatgagcttctccagcgttcccgacaagttcaaaataagactgaaaaagaaagaatgttaagggaatcattaaaggaatatcaaaaaattagcaatcaagtggacctttccaatgtttgtgctcagtatagacaagtgagattttatgagggtgtggtggaactttctcttacggctgcagagaaaaaagatcctcaaggtcttgggcttcatttctataaacatggagaaccagaagaagacatagttggacttcaggccttccaagaaagattaaacagttacaaatgcattacagacacacttcaagaactggtaaatcaaagtaaggccgctcctcagtctcccagtgtacccaaaaaacctggtcctccagtgttgtcatctgatccaaatatgctgagtaatgaagaagcaggacatcattttgaacaaatgcttaaattgtcacagcgatccaaggatgagctctttagtattgccctttataattggctaatacaagtcgaccttgcagataagctgctacaggttgcttctccatttctggagccacatctagtccgaatggccaaagttgatcaaaacagagttcgttatatggatttactctggcggtattacgagaagaacagaagtttcagtaatgctgctcgtgtactgtccagactggctgacatgcatagcacagaaatttcacttcagcagcgactagagtacattgctcgagccattcttagtgccaaaagttccactgccatttcatcaatagctgccgatggtgaatttcttcatgaattagaagaaaaaatggaggttgctaggatccaacttcagatacaggagacactacaaaggcagtattcccatcattcttctgtacaggatgcagtttctcagctggattctgagctgatggacataactaagctttatggggaatttgctgacccatttaaacttgcagagtgcaaacttgcaataattcattgtgccggttattcagaccctatattggtgcagacactttggcaagatatcatagagaaagaattgagtgacagtgtgacattgagctcctcggatagaatgcatgctcttagtctcaagattgttctccttggcaaaatttatgctggcacaccacgcttctttcctttagattttattgtacagtttttagaacagcaggtttgtactttgaactgggatgtgggcttcgtaatacagacaatgaatgaaattggagtaccattacctagactactagaagtttatgatcagttgttcaaatcacgggatccattctggaacagaatgaagaagccactgcaccttttggattgtatacatgtattattgataagatatgttgagaatcccagccaagttttaaattgtgaaaggagaagatttacaaatctctgcctggatgctgtttgtggttaccttgttgagctccagtctatgagctcgtcagtagcagtacaagccatcactgggaattttaaatctcttcaagctaaattagaacggcttcattaattactgtgatatactttcatccgttttatgatctgtaaaataaaaactcagctgggtccag

SEQ ID NO: 514 - protein, 1391 aa, Homo sapiens
MPSSLLGAAMPASTSAAALQEALENAGRLIDRQLQEDRMYPDLSELLMVSAPNNPTVSGMSDMDYPLQGPGLLSVPNLPEISSIRRVPLPPELVEQFGHMQCNCMMGVFPPISRAWLTIDSDIFMWNYEDGGDLAYFDGLSETILAVGLVKPKAGIFQPHVRHLLVLATPVDIVILGLSYANLQTGSGVLNDSLSGGMQLLPDPLYSLPTDNTYLLTITSTDNGRIFLAGKDGCLYEVAYQAEAGWFSQRCRKINHSKSSLSFLVPSLLQFTFSEDDPILQIAIDNSRNILYTRSEKGVIQVYDLGQDGQGMSRVASVSQNAIVSAAGNIARTIDRSVFKPIVQIAVIENSESLDCQLLAVTHAGVRLYFSTCPFRQPLARPNTLTLVHVRLPPGFSASSTVEKPSKVHRALYSKGILLMAASENEDNDILWCVNHDTFPFQKPMMETQMTAGVDGHSWALSAIDELKVDKIITPLNKDHIPITDSPVVVQQHMLPPKKFVLLSAQGSLMFHKLRPVDQLRHLLVSNVGGDGEEIERFFKLHQEDQACATCLILACSTAACDREVSAWATRAFFRYGGEAQMRFPTTLPPPSNVGPILGSPVYSSSPVPSGSPYPNPSFLGTPSHGIQPPAMSTPVCALGNPATQATNMSCVTGPEIVYSGKHNGICIYFSRIMGNIWDASLVVERIFKSGNREITAIESSVPCQLLESVLQELKGLQEFLDRNSQFAGGPLGNPNTTAKVQQRLIGFMRPENGNPQQMQQELQRKFHEAQLSEKISLQAIQQLVRKSYQALALWKLLCEHQFTIIVAELQKELQEQLKITTFKDLVIRDKELTGALIASLINCYIRDNAAVDGISLHLQDICPLLYSTDDAICSKANELLQRSRQVQNKTEKERMLRESLKEYQKISNQVDLSNVCAQYRQVRFYEGVVELSLTAAEKKDPQGLGLHFYKHGEPEEDIVGLQAFQERLNSYKCITDTLQELVNQSKAAPQSPSVPKKPGPPVLSSDPNMLSNEEAGHHFEQMLKLSQRSKDELFSIALYNWLIQVDLADKLLQVASPFLEPHLVRMAKVDQNRVRYMDLLWRYYEKNRSFSNAARVLSRLADMHSTEISLQQRLEYIARAILSAKSSTAISSIAADGEFLHELEEKMEVARIQLQIQETLQRQYSHHSSVQDAVSQLDSELMDITKLYGEFADPFKLAECKLAIIHCAGYSDPILVQTLWQDIIEKELSDSVTLSSSDRMHALSLKIVLLGKIYAGTPRFFPLDFIVQFLEQQVCTLNWDVGFVIQTMNEIGVPLPRLLEVYDQLFKSRDPFWNRMKKPLHLLDCIHVLLIRYVENPSQVLNCERRRFTNLCLDAVCGYLVELQSMSSSVAVQAITGNFKSLQAKLERLH

SEQ ID NO: 515 - DNA, 2247 bp, Homo sapiens
gttcccctgcagttgtttgggctgtccctgtggctggttctggggtgtgcggccagccatggagcgctctgggcccagcgaagtgacaggctcagacgcgtcgggaccggacccgcagcttgcggtcaccatgggcttcacggggttcggtaaaaaagctcgcacatttgacttggaagcaatgtttgaacaaactcgaaggacagctgtggaaagaagtcgcaaaacactggaagcaagagaaaaagaggaagaaatgaacagagagaaagaattaagaagacaaaatgaagatattgagccaacatcctcaagatcaaatgtggtcagagattgctccaaatcatcttccagggatacgagcagcagtgaaagtgaacagagttctgactcttctgatgatgagttaattggccctcctttaccccctaaaatggtaggaaaaccagttaattttatggaggaagatatcctcggtcctttacctccacctcttaatgaagaagaagaagaagcagaggaagaagaagaggaagaggaggaagaggaaaatcctgttcacaagattcctgactcgcatgagataacgctgaagcatggcactaaaacagtgtctgctttgggtctggatccctcaggtgcccgtttggtgacaggaggatatgactatgatgttaagttttgggattttgctggaatggatgcttcttttaaggcatttcgatcccttcagccctgtgagtgccatcagatcaagtcattacagtatagtaacacaggagacatgattcttgttgtatctggaagctctcaggccaaggtgattgacagagatggttttgaagtaatggaatgtataaaaggagaccagtatattgtggacatggccaacaccaagggtcatacagcaatgcttcatactggctcatggcatcccaaaataaagggagaatttatgacttgctcaaatgatgcgactgtgaggacgtgggaagttgaaaatccaaagaagcaaaaaagtgtgtttaaaccacggacgatgcaaggcaaaaaagtcattcccactacgtgcacatatagtagagatggaaacctcatagcagctgcctgccagaatggaagcatacagatctgggaccgaaatttgactgttcatcctaagttccactataaacaggctcatgactcgggcacagacacttcttgcgtgactttttcctatgatggtaatgtccttgcctctcgtggaggtgacgattcattaaaattatgggacatccgacaatttaataaaccacttttttcagcctcgggtcttcccaccatgttcccaatgactgactgctgtttcagtccagatgataagctcatagtcactggtacatctattcaaagaggatgtggcagcggcaaacttgttttctttgagcgtaggactttccaaagggtgtatgaaatagacatcacagatgcgagtgttgttcgctgcctgtggcatccaaagctgaaccagatcatggttggaactggaaatggattggctaaagtctattacgaccccaacaagagtcagaggggagcaaaattatgtgtggttaaaacccagcggaaggcaaaacaagctgagactctaactcaggactacatcatcacccctcatgccttgcctatgttccgtgagccccgccaacggagtacaaggaaacagctggagaaggacagactggatcccctgaagtcgcataaacctgaacctcctgtagcaggcccaggtcgtggtggccgagttggaacccacgggggcactctctcttcctatattgtgaagaacattgctttggacaagaccgatgacagtaatcctcgggaagccattttgcgtcatgccaaagcagcagaagacagcccatattgggtttctccagcatattccaagactcagcccaaaaccatgtttgcccaagttgaatctgatgatgaggaagcaaagaatgagccagaatggaaaaaacgtaaaatttgaagaatctcatttgagagctgtttgcatgagtgggaggggtatgggacaggtttgggttttttttttatgctcatgaaattaaaaattcatttttatgaaaaaaaaaaaaaaaaaaaaaaaaaaaaaaaaaaaaaaaaaaaaaaaaaaaaaaaaaaaaaaaaaaaaaaaaaaaaaaaaaaaaaaaaaaaaaaaaaaaaaaaaaaaaaaaaaaaaaaaaaaaaaaa

SEQ ID NO: 516 - protein, 654 aa, Homo sapiens
MERSGPSEVTGSDASGPDPQLAVTMGFTGFGKKARTFDLEAMFEQTRRTAVERSRKTLEAREKEEEMNREKELRRQNEDIEPTSSRSNVVRDCSKSSSRDTSSSESEQSSDSSDDELIGPPLPPKMVGKPVNFMEEDILGPLPPPLNEEEEEAEEEEEEEEEEENPVHKIPDSHEITLKHGTKTVSALGLDPSGARLVTGGYDYDVKFWDFAGMDASFKAFRSLQPCECHQIKSLQYSNTGDMILVVSGSSQAKVIDRDGFEVMECIKGDQYIVDMANTKGHTAMLHTGSWHPKIKGEFMTCSNDATVRTWEVENPKKQKSVFKPRTMQGKKVIPTTCTYSRDGNLIAAACQNGSIQIWDRNLTVHPKFHYKQAHDSGTDTSCVTFSYDGNVLASRGGDDSLKLWDIRQFNKPLFSASGLPTMFPMTDCCFSPDDKLIVTGTSIQRGCGSGKLVFFERRTFQRVYEIDITDASVVRCLWHPKLNQIMVGTGNGLAKVYYDPNKSQRGAKLCVVKTQRKAKQAETLTQDYIITPHALPMFREPRQRSTRKQLEKDRLDPLKSHKPEPPVAGPGRGGRVGTHGGTLSSYIVKNIALDKTDDSNPREAILRHAKAAEDSPYWVSPAYSKTQPKTMFAQVESDDEEAKNEPEWKKRKI

SEQ ID NO: 517 - DNA, 1361 bp, Homo sapiens
gaaaaaggtgggaggaggaccaagtgggagggtggtggctcactcaggacccaccgggggcagcgcaatgaggcgggtgaccctgttcctgaacagcagcccccaagaacggaaaggtggttgctgtatatggaactttatctgatttgctttctgtggccagcagtaaactcagcataaaagccaccagtgtgtataatgagaaaggtggactgactgatgatattgctttgatcagggatgatgatgttttatttgtgtgtgagggagagccatttattgatcttcagacagattctaagcctcctgaaggattgttaggattccacacagagtggctaacattaaatgttggagggaggtactttacaactacacggagcactttagcgaataaagaacctgacagtatgctggcccacatgcttaagaacagaggtgtctggggaaataagcaagatcatagaggagccttcttaattgaccaaagtcctgagtactttgaacccactttgaactacttgtgtcatggacagctcattgtaaatgatggcattaatttattgggtgtgttagaagaagcaagattttttggtattgactcactgattgaacacctagaagtggcaataaagaattctcaatcaccagaggatcattcaccaatatctcgaaaggaatttgtccgatttttgatagcaactccaaccaagtcagaactgtgataccagagtttgaacttcagtggtgctgatgtttctcgttaggaccttcgatacattaacttcaaaatggccaatttaagccgctgcaatcttgcacatgcaaatctttactgtgcaaatcttgaatgaggtgatctctctggatcagtgcttgactgtgcaaatctccagggagtcaagatgctctgttctaatgcagaaggagcatccctgaaactgtgtaattttgaggatctttctggtcttaaagccaatttagaaggtgctaatctgaaaggtgtggatatggaaggaagtcagatgacaggaattaacttgagagtggctaccttaaaaaatgcaaagttgaagaattgtaacctcagaggagcaactctggcaggaaccaatttagagaactgtgatctgtctgggtgtgatcttcaagaagccaacttgagagggtccaacgtgtagggagctatatttgaagagatgctgacaccactatacatgtcgcaaaatgtcagatgagaattttaggggctagaggaagatgtacaagatgaaaacattttccttatcacttttctttctccacccactcagttgtctagaagaagtaacactgtaaggaaatttttaaaaaacattgag

SEQ ID NO: 518 - DNA, 660 bp, Homo sapiens
ggtcacacagagagtacgtgtcaaaggaaactcaaaagaacacattttctcagtgattacaggttttagagaagaggaacaatgcttcctctgagcctgaagaaaagaatgaaataagggctgcaagggaacatgcaggtttcacactacaggagcttgtctgtcttggtgcaagtgggagcattccagttggcttttgagtggatacgtgcagtgagatcattgacactggaaacactagttcccattttaattacttaaaacaccacgatgaaaagaaatacctgtgatttgctttctcggagcaaaagtgcctctgaggaaacactacattccagtaatgaagaggaagaccctttccgcggaatggaaccctatcttgtccggagactttcatgtcgcaatattcagcttccccctctcgccttcagacagttggaacaagctgacttgaaaagtgaatcagagaacattcaacgaccaaccagcctccccctgaagattctgccgctgattgctatcacttctgcagaatccagtgggagaagacattttagtgaaattgttttacatggaagagctgaaaatgtattggtgaatgctaataaacatttgccaaagggcagttgtacttggaaaattaatattggccatatgtga

SEQ ID NO: 519 - protein, 129 aa, Homo sapiens
MKRNTCDLLSRSKSASEETLHSSNEEEDPFRGMEPYLVRRLSCRNIQLPPLAFRQLEQADLKSESENIQRPTSLPLKILPLIAITSAESSGRRHFSEIVLHGRAENVLVNANKHLPKGSCTWKINIGHM

SEQ ID NO: 520 - DNA, 6574 bp, Homo sapiens
aaaccttggcttcagcccggccgccgccaggcgttggcatcgccggggagagccttccggactccgggcggcggctggctgggggcgcgttccgaggcgccctcaggcagggcgcgggggcagagcctcgcctgggttctggaggctgcggggccatcgctccagatgcgaaagccatggagttgagctgcagcgaagcacctctttacgggcagatgatgatctatgcgaagtttgacaaaaatgtgtatcttcctgaagatgctgagttttactttacttatgacggatctcatcagcgacatgtcatgattgcagagcgcatcgaggataacgttctccagtccagcgtcccaggccatgggcttcaggagacggtgacggtatctgtgtgcctctgctcggaaggttactctccggtgaccatgggctctggctcagtgacctacgtggacaacatggcttgcaggctggctcgtctgctggtgacgcaggccaatcgcctcacagcctgcagccaccagaccctgctgaccccatttgccttgacggcaggagcactgcctgccttggatgaggagctcgtgctggctctgacccatctggaattgcctctagagtggactgtgttgggaagttcttcacttgaagtatcttctcacagagaatctcttctacacctggctatgagatggggcctggctaaactttcccagttcttcttgtgtctcccggggggagtccaggccttggctttacccaacgaagagggtgccacaccattagacttagctttacgtgaaggacactccaagctggtggaagacgtcacaaattttcagggcagatggtccccaagcttctcccgagtgcagctcagtgaagaagcctccttgcattacattcactcatcggaaacgctgaccctgaccctgaaccacacagccgagcatttgttggaggcagatattaaactcttccggaaatacttttgggatagagcctttcttgtcaaggcctttgagccagaagccaggccagaggaaagaacagctatgccctccagcggtgcagaaactgaagaagagattaagaattcagtgtccagcagatcagcagctgaaaaggaagatataaagcgtgtcaaaagcctggtggttcaacacaatgaacatgaagaccagcacagcctagatttggatcgctccttcgatatcctaaaaaaatccaagccgccctcgacattgcttgctgcaggccggctttcagacatgctgaatggaggtgatgaagtctacgctaactgtatggtgattgatcaggttggtgatttggatatcagctatattaatatagagggaatcactgccactaccagccctgaatccagaggttgcactctgtggcctcagagcagcaaacacacccttcctacagaaaccagtcccagtgtgtacccacttagtgaaaatgtcgaagggacagcacacactgaagcccagcagtccttcatgtcaccatcaagttcgtgtgcttccaacttgaatctttcttttggttggcatggatttgaaaaggaacaaagtcatctaaagaaaagaagttctagccttgatgccttggacgccgacagtgaaggggaagggcattctgagccatcccacatctgttacactccagggtctcagagctcctcaagaactgggattcctagtggggatgaattggactcttttgagactaacactgaaccggattttaatatctccagggctgaatcccttcctctatcaagtaatctacagtcgaaggaatcactgctttctggagttcgctcacgttcttattcttgctcatcacccaaaatttctttaggaaaaactcgtttggtgcgtgaattaacagtatgcagttcaagtgaagagcaaagagcttacagcttatcggagccaccaagagaaaacagaattcaggaagaagaatgggataaatacatcatacctgccaaatcagagtctgaaaaatataaagtgagtcgaactttcagtttcctcatgaataggatgactagccctcggaataaatcaaagacaaaaagcaaggatgccaaagataaagagaagctgaatcgacatcagtttgccccaggaacattctctggggttctgcagtgtttggtttgtgataaaacactcctggggaaagagtcactgcagtgttctaactgtaatgcaaatgtgcacaaaggttgtaaagatgctgcgcctgcatgcaccaagaaattccaagagaaatataacaagaacaaaccacagaccatccttggaaattcttcatttagagacatcccacagcctggtctctccttgcacccttcttcctccgtgcctgttggattgccgactggaaggagggagactgtgggacaggtccatccattgtccagaagtgttccaggcaccaccttggaaagcttcaggaggtcagccacatccttggagtctgagagtgaccataacagctgcagaagcaggtctcattctgatgagctgctacagtccatgggctcttctccctctacagagtctttcataatggaagatgttgtggattcttctctgtggagtgacctcagcagtgatgcccaggagtttgaagcagaatcttggagtcttgtggtggatccctcattttgtaataggcaggagaaggatgtcatcaaaagacaggatgtcatttttgagctaatgcaaacagagatgcatcacatccagaccctgttcatcatgtctgagatcttcaggaaaggcatgaaagaggagctgcagctggaccacagcaccgtggataaaattttcccctgtttagatgagttgcttgaaatccacaggcatttcttctacagtatgaaggaacgaaggcaggaatcctgtgctggcagcgacaggaattttgtgatcgaccgaattggagatattttggtacaacagttttcagaagaaaatgcaagtaaaatgaagaaaatatatggagaattctgttgccatcataaagaagctgttaacctctttaaagaactccagcagaataaaaagtttcagaattttattaagctccgaaatagtaatcttttggctcgacgccgaggaattccagaatgcattctgttggtcactcagcgtattacaaaataccctgtcttggtggaaaggatattgcagtacacaaaggaaagaactgaggaacataaagacttacgcaaagcgctttgcttaattaaagacatgattgcaacagtggatttaaaagtcaatgaatatgagaaaaaccaaaaatggcttgagatcctaaataagattgaaaacaaaacatacacgaagctcaaaaatggacatgtgtttaggaagcaggcactgatgagtgaagaaaggactctgttatatgatggccttgtttactggaaaactgctacaggtcgtttcaaagatatcctagctctacttctaactgatgtgctgctctttttacaagaaaaagaccagaaatacatctttgcagccgttgatcagaagccatcagttatttcccttcaaaagcttattgctagagaagttgctaatgaggagagaggaatgtttctgatcagtgcttcatctgctggtcctgagatgtatgaaattcacaccaattccaaggaggaacgcaataactggatgagacggatccagcaggctgtagaaagttgtcctgaagaaaaagggggaaggacaagtgaatctgatgaagacaagaggaaagctgaagccagagtggccaaaattcagcaatgtcaagaaatactcactaaccaagaccaacaaatttgtgcgtatttggaggagaagctgcatatctatgctgaacttggagaactgagcggatttgaggacgtccatctagagccccacctccttattaaacctgacccaggcgagcctccccaggcagcctcattactggcagcagcactgaaagaagcattagtcacaggagggagagaaggaagaggctgttcggatgtggatcccgggatccagggtgtggtaaccgacttggccgtctctgatgcaggggagaaggtggaatgtagaaattttccaggttcttcacaatcagagattatacaagccatacagaatttaacccgtctcttatacagccttcaggccgccttgaccattcaggacagccacattgagatccacaggctggttctccagcagcaggagggcctgtctctcggccactctatcctccgaggcggccccttgcaggaccagaagtctcgcgacgcggacaggcagcatgaggagctggccaatgtgcaccagcttcagcaccagctccagcaggagcagcggcgctggctgcgcaggtgtgagcagcagcagcgggcgcaggcgaccagggagagctggctgcaggagcgggagcgggagtgccagtcgcaggaggagctgctgctgcggagccggggcgagctggacctccagctccaggagtaccagcacagcctggagcggctgagggagggccagcgcctggtggagagggagcaggcgaggatgcgggcccagcagagcctgctgggccactggaagcacggccggcagaggagcctgcccgcggtgctccttccgggtggccccgaggtaatggaacttaatcgatctgagagtttatgtcatgaaaactcattcttcatcaatgaagctttagtacaaatgtcatttaacactttcaacaaactgaatccatcagttatccatcaggatgccacttaccctacaactcaatctcattctgacttggtgaggactagtgaacatcaagtagacctcaaggtggacccttctcagccttcgaatgtcagtcacaaactgtggacagccgctggttccggccatcagatacttcctttccatgaaagcagcaaggattcttgtaaaaatggctccagtatgacaaagtgcagttgtacgttgacatctcccccgggactgtggactggaaccacatctactttgaaagatttggacacctcccacactgagtccccaaccccccatgactcaaattcacaccgccctcaactgcaggcgtttataacagaagcaaagctaaatctaccgacaaggacaatgaccagacaagatggggaaactggagatggagccaaagaaaatattgtttacctctaattgtgttgtcatttttccaaacaaaacaaaacactggcacttttgggagaaactttttgtctccattccttatgtatgtgtgattgtctgtgtccaaattgctttaagaataatatttaatatttcctggaagctcatttttttggcatgagtctaattaaattattgaaagccaccctgtttgtataatctttaacttatcaaatctaatttcagatttctggaggagaaactaacttgaataagcaggactattttaaaagttgttttgacgctagagtaaaattccatgtcacattttctacccaatcatctggatttcaagattccttttaagatctcaatgaagcaatttggatttaaagagtggtattcacaaggggtgaactttcacagtcagggcagttgcctcagtgcccacataggcagaggaggatgtgggaaagggtttttctcagctagtttttgtgtgctcatttcttctgggagcattaaaagtggtgatctgttacagtcactattcaactgggcacgtgttgtgattggtcagtcactgagccagggatacagtccggacttgcttagtacctaagcctaatgctggtggggtttcaagacatggttcagcatcatcttttaacaaggcccagaggcccagagcccccatcaagtcattttgatgtaaatagtgaactttgttagagccctcacttctatcaatcagctgtcctgtccctgccagcacctggagcaccaactaccactccctggaaagaacccttccctgcagttttttaaggacaaaactgcccactcctcattaagtttgctgcctggatacacttttccacaaaggaaaactggcatatcctgccttccgagtagtatgggtctctgtgtgagaaaccaggagatattttcatcttgttcggaaatacttgtatgtattttggtgtcaataaatatcttgtacctcattattttactttgtaattttaacattatgtgtaggaccatagtaaaacattcatttcacacagacatctaatctcacctcgtgaaaagtgaaaataaaggaaaactattagattcatccaaaaatgcaacacctactgggagtgagatgtgataggaacagaaaaaaaaaaaaaaaaatcacccggatctcaatagttttttctccctacttaaagttgttaagttggatatctacattgtgtttttacttaggcaagtccaatcctaatttttttaaaagccccttttgggggcagtctttttctgactttagctggctatttttgtaacaattacattaaaaattcggtgactga

SEQ ID NO: 521 - protein, 1687 aa, Homo sapiens
MELSCSEAPLYGQMMIYAKFDKNVYLPEDAEFYFTYDGSHQRHVMIAERIEDNVLQSSVPGHGLQETVTVSVCLCSEGYSPVTMGSGSVTYVDNMACRLARLLVTQANRLTACSHQTLLTPFALTAGALPALDEELVLALTHLELPLEWTVLGSSSLEVSSHRESLLHLAMRWGLAKLSQFFLCLPGGVQALALPNEEGATPLDLALREGHSKLVEDVTNFQGRWSPSFSRVQLSEEASLHYIHSSETLTLTLNHTAEHLLEADIKLFRKYFWDRAFLVKAFEPEARPEERTAMPSSGAETEEEIKNSVSSRSAAEKEDIKRVKSLVVQHNEHEDQHSLDLDRSFDILKKSKPPSTLLAAGRLSDMLNGGDEVYANCMVIDQVGDLDISYINIEGITATTSPESRGCTLWPQSSKHTLPTETSPSVYPLSENVEGTAHTEAQQSFMSPSSSCASNLNLSFGWHGFEKEQSHLKKRSSSLDALDADSEGEGHSEPSHICYTPGSQSSSRTGIPSGDELDSFETNTEPDFNISRAESLPLSSNLQSKESLLSGVRSRSYSCSSPKISLGKTRLVRELTVCSSSEEQRAYSLSEPPRENRIQEEEWDKYIIPAKSESEKYKVSRTFSFLMNRMTSPRNKSKTKSKDAKDKEKLNRHQFAPGTFSGVLQCLVCDKTLLGKESLQCSNCNANVHKGCKDAAPACTKKFQEKYNKNKPQTILGNSSFRDIPQPGLSLHPSSSVPVGLPTGRRETVGQVHPLSRSVPGTTLESFRRSATSLESESDHNSCRSRSHSDELLQSMGSSPSTESFIMEDVVDSSLWSDLSSDAQEFEAESWSLVVDPSFCNRQEKDVIKRQDVIFELMQTEMHHIQTLFIMSEIFRKGMKEELQLDHSTVDKIFPCLDELLEIHRHFFYSMKERRQESCAGSDRNFVIDRIGDILVQQFSEENASKMKKIYGEFCCHHKEAVNLFKELQQNKKFQNFIKLRNSNLLARRRGIPECILLVTQRITKYPVLVERILQYTKERTEEHKDLRKALCLIKDMIATVDLKVNEYEKNQKWLEILNKIENKTYTKLKNGHVFRKQALMSEERTLLYDGLVYWKTATGRFKDILALLLTDVLLFLQEKDQKYIFAAVDQKPSVISLQKLIAREVANEERGMFLISASSAGPEMYEIHTNSKEERNNWMRRIQQAVESCPEEKGGRTSESDEDKRKAEARVAKIQQCQEILTNQDQQICAYLEEKLHIYAELGELSGFEDVHLEPHLLIKPDPGEPPQAASLLAAALKEALVTGGREGRGCSDVDPGIQGVVTDLAVSDAGEKVECRNFPGSSQSEIIQAIQNLTRLLYSLQAALTIQDSHIEIHRLVLQQQEGLSLGHSILRGGPLQDQKSRDADRQHEELANVHQLQHQLQQEQRRWLRRCEQQQRAQATRESWLQERERECQSQEELLLRSRGELDLQLQEYQHSLERLREGQRLVEREQARMRAQQSLLGHWKHGRQRSLPAVLLPGGPEVMELNRSESLCHENSFFINEALVQMSFNTFNKLNPSVIHQDATYPTTQSHSDLVRTSEHQVDLKVDPSQPSNVSHKLWTAAGSGHQILPFHESSKDSCKNGSSMTKCSCTLTSPPGLWTGTTSTLKDLDTSHTESPTPHDSNSHRPQLQAFITEAKLNLPTRTMTRQDGETGDGAKENIVYL

SEQ ID NO: 522 - DNA, 1482 bp, Homo sapiens
gcttcgccgaggctgatcttcgttcaagtgtgagctgcggctgagcccagcgctcgaggcgcgaggcagccaggagggcccgtgcggcgcggggagccagcgagcgcgccttcggcattggccgccgcgatgtcagctcagtgctgtgcgggccagctggcctgctgctgtgggtctgcaggctgctctctctgctgtgattgctgccccaggattcggcagtccctcagcacccgcttcatgtacgccctctacttcattctggtcgtcgtcctctgctgcatcatgatgtcaacaaccgtggctcacaagatgaaagagcacattcctttttttgaagatatgtgtaaaggcattaaagctggtgacacctgtgagaagctggtgggatattctgccgtgtatagagtctgttttggaatggcttgtttcttctttatcttctgtctactgaccttgaaaatcaacaacagcaaaagttgtagagctcatattcacaatggcttttggttctttaaacttctgctgttgggggccatgtgctcaggagctttcttcattccagatcaggacacctttctgaacgcctggcgctatgtgggagccgtcggaggcttcctcttcattggcatccagctcctcctgctcgtggagtttgcacataagtggaacaagaactggacagcaggcacagccagtaacaagctgtggtacgcctccctggccctggtgacgctcatcatgtattccattgccactggaggcttggttttgatggcagtgttttatacacagaaagacagctgcatggaaaacaaaattctgctgggagtaaatggaggcctgtgcctgcttatatcattggtagccatctcaccctgggtccaaaatcgacagccacactcggggctcttacaatcaggggtcataagctgctatgtcacctacctcaccttctcagctctgtccagcaaacctgcagaagtagttctagatgaacatgggaaaaatgttacaatctgtgtgcctgactttggtcaagacctgtacagagatgaaaacttggtgactatactggggaccagcctcttaatcggatgtatcttgtattcatgtttgacatcaacaacaagatcgagttctgacgctctgcaggggcgatacgcagctcctgaattggagatagctcgctgttgtttttgcttcagtcctggtggagaggacactgaagagcagcagccggggaaggagggaccacgggtcatttatgacgagaagaaaggcaccgtctacatctactcctacttccacttcgtgttcttcctagcttccctgtatgtgatgatgaccgtcaccaactggttcaaccatgtaagaagtgcctttcacctcctgccatgattctgaggcctccccagccatgtggaactctgagaaacctgaacggactccatttggctccttcatttgcaagacatcaag

SEQ ID NO: 523 - protein, 423 aa, Homo sapiens
MSAQCCAGQLACCCGSAGCSLCCDCCPRIRQSLSTRFMYALYFILVVVLCCIMMSTTVAHKMKEHIPFFEDMCKGIKAGDTCEKLVGYSAVYRVCFGMACFFFIFCLLTLKINNSKSCRAHIHNGFWFFKLLLLGAMCSGAFFIPDQDTFLNAWRYVGAVGGFLFIGIQLLLLVEFAHKWNKNWTAGTASNKLWYASLALVTLIMYSIATGGLVLMAVFYTQKDSCMENKILLGVNGGLCLLISLVAISPWVQNRQPHSGLLQSGVISCYVTYLTFSALSSKPAEVVLDEHGKNVTICVPDFGQDLYRDENLVTILGTSLLIGCILYSCLTSTTRSSSDALQGRYAAPELEIARCCFCFSPGGEDTEEQQPGKEGPRVIYDEKKGTVYIYSYFHFVFFLASLYVMMTVTNWFNHVRSAFHLLP

SEQ ID NO: 524 - DNA, 1234 bp, Homo sapiens
atgagctttaccactcactccaccacctcctccaccaactactgttccctgggctctgtccagctgcccagctacgtggcccagctggtcagcagtgtggccagtgtctatgcaggtgctgggggctcaggcttccagatctccgtgtcccactccacaagcttctggggtggcttgggggacctggtgggaataggggatatccagaacgagaaggagaccatgcaaggcctgaatgactgtctggcctcctacctggacagagtgaggagcctgagagaccgagaaatggaggctggagagcaaagtctgggagcatctggagaagaagggaccccaggtcagagactaggggcattacttcaagaccattgaggacctgagggttcagatcttcgcaagtactatggacagtgcctgcatcattctgcagactgacaaggcccatatagctgctgatgactttagagtcaagtgtgagacagaactggccatgtgccagtctgtggagagtgacatccatgggctccgcaagaccactgatgacaccaatgtcactcagctgcagctggagacagagattgaggctctcaaggaggagctactcttcatgaagaagacccacgaagaggaagtaaaaggcctccaagcccagattgccagctctgggttgaccatgcaggtagatgccctcaaatctcaggacctggccaagatcatggcagacatccgtgcccaatatgacaagttggctcagaagaaccgagaggagctgaacaagtactggtcctagcagactgaggagagcaccaagcagtccgctgagatcggagcttctgagataatgctcatggagctgagacatacactccagtccttggagatcaacctgaactcaatgagaaatctgaaagccaggttggagaacagcctgagggaggtggagacccgctatgccatgcagatggagcagctcaacagggttctgctgcacttgaagttggagctggcacagacctgggcagaggggcaacaccaggtccaggaatttgaggctctgctgaacataaagatcaagctggaggcggagatcactacctaccaccacctgctggaagatgaggagggcttcaatcctggtgatgccctggatagcagcaactccatccaaagcatccagaagaccaccacccacaggatagtggatggcataggaggtcccctagctgtttga

SEQ ID NO: 525 - DNA, 1112 bp, Homo sapiens
atgcatgacgatatcactgctctcgtattcaacaatggctctggcatatgcaaggctagctttgcgagcgatggtgtcccccgggctgccttccccttcatcatggcaccagggcatgatggtgggcatgggtcagaaggactcctatgtggatgaggcccagagcaagagaggcatcctgaccctgaagtaccccattgagcatagcatcatcaccaactgggatgacatggagagagagggacaccacaccttctacaacgagccgggtgtggctcttgaggagcacgctgtgttgctgactgaggcccctctgaaccccaaggacaactgcgagaagatgacttagatcatgtttgagaccttcacaccccagccatatacgtggccatccaggccgtgctgtccctgtacgcctctggccatagctggcattgtgatggactccggtgatggggtcaccaacactgtgcccatctatgaagggtacacccctcccccacaccatcctgtgtctggacctgactggccggaacctgactgactacctcatgaagatcctcacccagtgtggctacagcttcaccaccacagtcatgcaggaaattgtgtgtgacatcaagaaaaggctgtgctacatccccctggactttgagcaggagatggccatggtgggctccagctcctccctggagaagagctacaagctgcccaatggccaggtcatcaccattagcaacaagtggttctgctgccccgaggcactcttccaaacttccttcgtgggcatggaatcctgtggcatccacgaaactaccttcaactccatcatgaagtcggatgtggacatctacaaagacctgtatgccaacacagtgctgtctggcagcaccaccatgtaccctagcatcaccaacaggatgcagaaggagattaccgccctggcgcccagcgcaatgaagatcaagatcattgctcctcctgagtgcaagtactctgtgtggatcagaggctccatcctggcctcgctgtccaccttccagcagatgtggatcagcaagcaggagtacagtgagtccagcccctccatcgtccaccgcaaatgcttctag

SEQ ID NO: 526 - DNA, 1880 bp, Homo sapiens
ctttcccacccttcctccccacaaggctgtctgagatgccaccttccacctaaacatcatctcccaaattttaatccttaactttggtctctgacttctgcttgattccacagtctccacccacatttgcacaaaggaccatcacctgtccttcctggaatctctaaagttttctgctttccttctgtcctgatggccagctctgctaagtcagctgagatgcccaccatctccaaaacccttaaccctactcctgatcctcatcaagaatatctggaccctaggattaccattgccttattcgaaattggatcacattccccttcctcctggggctctctccctttcctaaagaatagcagccatcaagttacagaacaacagactgcacagaagtttaacaatctcttaaaagaaattaaagatattcttaaaaatatggcaggttttgaagagaagatcacagaagcaaaagaactttttgaggaaaccaatattactgaggatgtgtcagcccacaaagaaaatatcagaggacttgacaaaatcaatgaaatgttatcaacaaacctgcctgttagtttagccccagagaaagaagacaatgaaaagaaacaggagatgatattggaaaccaatattactgaggatgtgtcagcccacaaagaaaatatcagaggacttgacaaaatcaatgaaatgttatcaacaaacctgcctgttagtttagccccagagaaagaagacaatgaaaagaaacagcagatgataatggaaaaccagaactctgagaacaccgcacaagtttttgcaagagatttggtaaatcgtttagaagaaaaaaaagtccttaacgaaactcaacaaagtcaggaaaaagcaaaaaacagacttaatgttcaagaagaaactatgaaaattaggaacaacatggagcagttactacaggaagcagaacactggagtaaacaacatactgagctcagtaaactgataaaatcctatcagaaatctcagaaagacataagtgaaactcttggaaataatggagtcggtttccaaacccagccaaataatgaagtgtcggctaagcatgagctggaggaacaggtgaagaaactgagccatgacacctattcattgcagttgatggcagctttgctagagaatgaatgccaaatcttacagcagagagtagagattctcaaggaactccatcatcagaaacagggaactctgcaagagaagccaattcagataaactataaacaggacaagaaaaatcagaagccatcagaagcaaagaaagtagaaatgtataagcagaacaagcaagcaatgaagggtacattttggaaaaaagacagatcctgtagaagcctggatgtttgtcttaataagaaagcttgcaatacccagttcaatattcatgttgcaagaaaagctcttaggggaaaaatgaggtcagctagcagcctaagatagaaaataccaaaagcagatgaaaaggtgaatccttaaaaaactacatctgttacctccaacttgtcagtcatgatcaatcatcaaaccttgggcagatctgctggttcaaccaagaaagagctatagaataaggagattgacacttatattactcattacttcagcagttatgtaagtctggtctttaatgaccattgtgtctacatcaagttcataacttttcacctttacaatctgcttgttttttttgtaattattagatagacagcctagagtgagaagttaaaggtccaattaagttaagatctaaataaaaaccagaatacaagggaaaaaaaaaaaaaaaaaaaaaaaaaaaaaaaaaaaaaaaaaaaaaaaaaaaaaaaaaaaaaaaa

SEQ ID NO: 527 - protein, 430 aa, Homo sapiens
MASSAKSAEMPTISKTLNPTPDPHQEYLDPRITIALFEIGSHSPSSWGSLPFLKNSSHQVTEQQTAQKFNNLLKEIKDILKNMAGFEEKITEAKELFEETNITEDVSAHKENIRGLDKINEMLSTNLPVSLAPEKEDNEKKQEMILETNITEDVSAHKENIRGLDKINEMLSTNLPVSLAPEKEDNEKKQQMIMENQNSENTAQVFARDLVNRLEEKKVLNETQQSQEKAKNRLNVQEETMKIRNNMEQLLQEAEHWSKQHTELSKLIKSYQKSQKDISETLGNNGVGFQTQPNNEVSAKHELEEQVKKLSHDTYSLQLMAALLENECQILQQRVEILKELHHQKQGTLQEKPIQINYKQDKKNQKPSEAKKVEMYKQNKQAMKGTFWKKDRSCRSLDVCLNKKACNTQFNIHVARKALRGKMRSASSLR

SEQ ID NO: 528 - DNA, 4078 bp, Homo sapiens
atgcagaagagcgtgcgctacaacgaggggcacgccctgtacctggcctttctggcgcgcaaggagggcaccaagcgcggcttcctgagtaagaagacggccgaggcgagccgctggcacgagaagtggttcgccctctaccagaatgtgctcttctacttcgagggcgagcagagctgccgcccggcgggcatgtacctcctggagggctgcagctgcgaacgaacgcccgcgccacccagggccggcgccgggcagggaggcgtccgagacgcgctggacaagcagtattactttactgttctttttggccatgaaggtcagaagccactggagctgcgctgtgaggaggagcaggatggtaaagagtggatggaggccattcaccaagccagttatgcagacattttgattgagagggaagtattaatgcagaagtacattcatctagttcagatcgtagagacagaaaaaattgcagctaaccaactccgacatcaacttgaagatcaagacacagaaatcgaaaggcttaaatcagagattattgctcttaataaaaccaaagaacgaatgcgaccttaccaaagcaaccaagaagacgaagatccagacatcaagaagattaaaaaggttcagagcttcatgcgaggatggttgtgcagaaggaaatggaagaccatcgtgcaggattacatttgttctcctcatgctgaaagtatgaggaagagaaaccagattgtgttcaccatggtggaggcagagtcagagtacgttcaccagctctacatcctggtcaatggctttctccggcccctgcgtatggccgccagctccaagaagccccccatcagccacgacgacgtcagcagtatttttcttaacagtgaaacaatcatgtttcttcatgaaatatttcatcaaggactaaaggcaaggatagcaaactggcccactttaattttagctgatctgtttgatattttgctccccatgctgaacatttatcaagaatttgtgcgtaatcaccagtacagcctgcaagttctcgccaattgtaagcaaaacagagattttgacaaactcttaaaacagtatgaagccaatccagcctgtgaggggaggatgctggagacattcttgacctatcccatgtttcagatccccagatatatcatcacactccatgagctccttgctcacacaccccatgagcatgtggaaaggaaaagcctggagtttgccaaatcaaagctagaggaactatccagagtaatgcacgatgaagtcagcgacactgaaaacataaggaaaaaccttgccatcgaaagaatgatcgtggagggctgtgacatcttgctggacaccagccaaacgttcatccgccaaggttctcttattcaagtaccttccgttgagagggggaaacttagtaaagttcgcctgggttcgttgtctttgaaaaaggaaggagagagacaatgcttcttatttacaaaacactttttaatatgtacaagaagttcaggagggaagcttcatctgctcaagacaggtggggttctgtctctaatagactgcacattgattgaggagccagatgcaagcgatgatgactctaaaggttctgggcaagtgtttgggcacctggattttaaaatagtggtggagcctcctgacgctgccgccttcactgttgtcttgttagcaccctcacgccaggagaaagctgcctggatgagtgacatcagtcagtgtgtggacaatatacgatgtaatggtttaatgactatagtgtttgaagagaattccaaagtcactgtgccacatatgattaagtctgatgcccgtcttcataaagacgacactgacatttgcttcagtaaaacactcaactcctgcaaagtgccccagatccgttatgccagcgtggagcgcctcttggaacgactgacagacttgcggtttcttagtattgatttcctcaacacctttctgcacacctatcgtattttcactactgccgctgtggtgctggggaaactctccgacatatacaagaggcctttcacctccatccctgtcaggtcattggaattgttttttgctaccagccagaacaacagaggtgaacatttggtggatggcaaatccccacgtctgtgtcgcaaattctcttccccgccaccactggctgtgtccagaacatcttccccagtgagggccagaaagctgtctttgacttctcccttgaactcaaagataggagcattggacctgacaacttccagcagtcccaccaccaccacccagagtcccgctgcgtctccaccaccacacactggtcagataccactggatctcagcagaggcctctcttctccagagcaaagcccgggaacggtagaagagaatgtcgataacccacgcgtggatctgtgtaacaagctaaaacgaagtattcaaaaagcagtcctagagtctgcaccagcggaccgagcaggagtggaaagctcccctgcagcggacaccacagaactttcaccttgcagatccccctcaactcctcggcacctccgctatcgacagcctggaggacagacggcggacaatgcccactgctctgtttcaccggcttctgcttttgcaatagccacagctgcagcaggacatgggagtccaccaggctttaacaacaccgagagaacatgtgataaagagtttattatacggagaacggctaccaatcgagttctgaacgtcctccgtcactgggtctcaaagcacgcacaggatttcgaactcaacaatgaactaaagatgaatgtcctaaatttgctagaagaagttttgcgagacccagaccttcttccccaagaaaggaaagccgccgcgaatatcctcagggccctttcacaagatgaccaagatgacatccacctaaaattagaggatataattcaaatgactgactgcatgaaggccgaatgctttgagtccttgtcggccatggagctggcagaacagatcaccctcctggaccatgtcattttcagaagcattccctacgaggagtttcttgggcaggggtggatgaagctggataaaaacgaaagaactccttacattatgaaaaccagccaacacttcaatgacatgagtaacctggtggcctcccagataatgaactatgctgatgtcagctcccgtgccaacgccatcgagaaatgggtggcagtggcggacatctgccgatgcctgcacaactacaacggcgtgctggagatcacctcggccttaaacagaagtgccatctacaggctgaagaaaacctgggccaaggtctctaagcagacaaaagctctaatggacaaacttcaaaagactgtttcctctgaaggaagatttaaaaatcttagagaaacccttaaaaattgtaaccctcctgcagttccttatcttgggatgtacttgacagacctggcatttattgaagaaggaacaccaaactttactgaggaaggccttgtcaatttctccaaaatgagaatgatatcacacatcatcagagagatacgccagttccagcagacttcctacagaatagatcatcagccaaaggtcgcacagtacttgcttgacaaagaccttatcatagatgaagatacgctatatgagctgtcactaaaaattgaacctcgactccctgcttgaagatctggccttgcccctgagtccacgggatgttcatggaaagcaggacagacagaattgtgtatgccttgcctatcacggtacagcacgaagccaggctcctttctccaccaaagaagatggaaccagactggaattctgtctccagagagaaacccagctgtttgggtcaaagacagatgcttcagacttgggtgggaaggtgaaagatggctatttagaaagctggtggcacgttttacataagggaatgtcagatgggagatgctagttgccattttaacaaagcaggtaaatcggtaaattttaaactctgtccatgttctgttagaactcagggacaaggatccatgaaaaagacctg

SEQ ID NO: 529 - protein, 1237 aa, Homo sapiens
MQKSVRYNEGHALYLAFLARKEGTKRGFLSKKTAEASRWHEKWFALYQNVLFYFEGEQSCRPAGMYLLEGCSCERTPAPPRAGAGQGGVRDALDKQYYFTVLFGHEGQKPLELRCEEEQDGKEWMEAIHQASYADILIEREVLMQKYIHLVQIVETEKIAANQLRHQLEDQDTEIERLKSEIIALNKTKERMRPYQSNQEDEDPDIKKIKKVQSFMRGWLCRRKWKTIVQDYICSPHAESMRKRNQIVFTMVEAESEYVHQLYILVNGFLRPLRMAASSKKPPISHDDVSSIFLNSETIMFLHEIFHQGLKARIANWPTLILADLFDILLPMLNIYQEFVRNHQYSLQVLANCKQNRDFDKLLKQYEANPACEGRMLETFLTYPMFQIPRYIITLHELLAHTPHEHVERKSLEFAKSKLEELSRVMHDEVSDTENIRKNLAIERMIVEGCDILLDTSQTFIRQGSLIQVPSVERGKLSKVRLGSLSLKKEGERQCFLFTKHFLICTRSSGGKLHLLKTGGVLSLIDCTLIEEPDASDDDSKGSGQVFGHLDFKIVVEPPDAAAFTVVLLAPSRQEKAAWMSDISQCVDNIRCNGLMTIVFEENSKVTVPHMIKSDARLHKDDTDICFSKTLNSCKVPQIRYASVERLLERLTDLRFLSIDFLNTFLHTYRIFTTAAVVLGKLSDIYKRPFTSIPVRSLELFFATSQNNRGEHLVDGKSPRLCRKFSSPPPLAVSRTSSPVRARKLSLTSPLNSKIGALDLTTSSSPTTTTQSPAASPPPHTGQIPLDLSRGLSSPEQSPGTVEENVDNPRVDLCNKLKRSIQKAVLESAPADRAGVESSPAADTTELSPCRSPSTPRHLRYRQPGGQTADNAHCSVSPASAFAIATAAAGHGSPPGFNNTERTCDKEFIIRRTATNRVLNVLRHWVSKHAQDFELNNELKMNVLNLLEEVLRDPDLLPQERKAAANILRALSQDDQDDIHLKLEDIIQMTDCMKAECFESLSAMELAEQITLLDHVIFRSIPYEEFLGQGWMKLDKNERTPYIMKTSQHFNDMSNLVASQIMNYADVSSRANAIEKWVAVADICRCLHNYNGVLEITSALNRSAIYRLKKTWAKVSKQTKALMDKLQKTVSSEGRFKNLRETLKNCNPPAVPYLGMYLTDLAFIEEGTPNFTEEGLVNFSKMRMISHIIREIRQFQQTSYRIDHQPKVAQYLLDKDLIIDEDTLYELSLKIEPRLPA

SEQ ID NO: 530 - DNA, 1820 bp, Homo sapiens
ggcttagcgctctcgccctggccatggagcggccggcgcccggcgaggtggtcatgagccaagccatccagccggcgcacgccactgcgcgcggcgagctgagcgcggggcagctgctcaagtggatcgacaccaccgcctgcctggcggctgagaaacatgctggagtttcctgcgttacagcctcagtggatgacatacagtttgaggagacagctagagttggacaagttataaccatcaaagcaaaagttactagagcattcagcacaagcatggagatcagtatcaaggtcatggtacaggatatgctcactggcattgagaagcttgttagtgtggctttctccacatttgtagccaaaccagttggaaaagaaaagattcatttaaaaccagtcacacttctaactgaacaagatcatgtggaacataatctggctgctgagagaaggaaagttcgattacaacatgaagatacctttaacaatttaatgaaggaaagtagcaaatttgatgatctcatttttgatgaagaggaaggagcggtttccacaaggggcacctccgttcagagcattgaactggtcctcccaccccatgcaaaccatcacggaaatacatttggtggccagattatggcgtggatggagacagtggctactatttctgcaagccgcctgtgttgggctcatccctttctgaagtccgtagatatgtttaagttccggggaccatctacagttggagatcgtcttgtcttcactgccattgtcaacaatacatttcagacctgtgttgaagttggagttcgcgtggaggcctttgactgtcaggaatgggccgagggccgagggcgtcacatcaacagtgcttttctcatttacaatgctgctgatgataaggaaaatctcatcacgtttcccagaatccaacccatttcaaaggatgatttcagacgctatcggggagctattgcacgcaagcgaattcgcctaggcagaaaatatgttatttcccacaaagaagaggttccactttgcatacactgggatatcagcaagcaggcatccctgagtgacagcaatgtggaggccctcaaaaaactggcagccaaaaggggttgggaggttaccagcactgtggaaaagataaaaatatatactctggaagagcatgatgttttatctgtttgggttgaaaagcacgtgggaagtccagcacatttggcttatcgtctcttgtctgactttacaaagcgacctttgtgggacccccattttgtgtcctgtgaagtcatagactgggtgagtgaagatgatcagctgtatcacatcacctgtcctatactgaatgatgacaaacccaaagacttggtagtactcgtatcacgaagaaaacccctcaaagatggtaacacttacacagtggcagtgaagtcggtcattttgccatcggtccccccgtctccacagtacatcagaagtgaaatcatatgtgccggatttctcatccatgctattgacagcaattcatgcatcgtatcttactttaaccatatgtctgctagcatccttccttactttgctggaaatcttggtggctggtcaaaatccattgaagaaacagcagcctcttgtatacagttcttagagaatcctcctgatgatgggtttgtaagcacattttaaaggtcaactttcaattactggtaatttaatttcccacttttaattccaagcacccttagccctgacatctgtcaagctttggggccacaaaataatttaatataacctaagcaaaatgcagtgacggag

SEQ ID NO: 531 - protein, 555 aa, Homo sapiens
MERPAPGEVVMSQAIQPAHATARGELSAGQLLKWIDTTACLAAEKHAGVSCVTASVDDIQFEETARVGQVITIKAKVTRAFSTSMEISIKVMVQDMLTGIEKLVSVAFSTFVAKPVGKEKIHLKPVTLLTEQDHVEHNLAAERRKVRLQHEDTFNNLMKESSKFDDLIFDEEEGAVSTRGTSVQSIELVLPPHANHHGNTFGGQIMAWMETVATISASRLCWAHPFLKSVDMFKFRGPSTVGDRLVFTAIVNNTFQTCVEVGVRVEAFDCQEWAEGRGRHINSAFLIYNAADDKENLITFPRIQPISKDDFRRYRGAIARKRIRLGRKYVISHKEEVPLCIHWDISKQASLSDSNVEALKKLAAKRGWEVTSTVEKIKIYTLEEHDVLSVWVEKHVGSPAHLAYRLLSDFTKRPLWDPHFVSCEVIDWVSEDDQLYHITCPILNDDKPKDLVVLVSRRKPLKDGNTYTVAVKSVILPSVPPSPQYIRSEIICAGFLIHAIDSNSCIVSYFNHMSASILPYFAGNLGGWSKSIEETAASCIQFLENPPDDGFVSTF

SEQ ID NO: 532 - DNA, 1948 bp, Homo sapiens
ggcttagccgccaccgcgcgcttcggaaggccagagggagggggaggcctgtcagtctcgcgcgttgcctgggcgaagggggcggagctttggcgtggggcggccaatagtgggggtggctgcgtgggtcgccatggggacggggctgttcccggggaggctgtgatgggttgacaggtgcgtgacagtgggagctgctctcggcacaagcatgtacggcaaaggcaagagtaacagcagcgccgtcccgtccgacagccaggcccgggagaagttagcactctacgtatatgaatatctgctccatgtaggagctcagaaatcagctcaaacatttttatcagagataagatgggaaaaaaacatcacattgggggaaccaccaggattcttacattcttggtggtgtgtattttgggatctctactgtgcagctccagagagacgtgaaacatgtgaacactcaagtgaagcaaaagccttccatgattacagtgctgcagcagctcccagtccagtgctaggaaacattcccccaggagatggcatgccagtaggtcctgtaccaccagggttctttcagccttttatgtcacctcggtaccctggaggtccaaggcccccattgaggatacctaatcaggcacttggaggtgtcccaggaagtcagccattactccccagtggaatggatccaactcgacaacaaggacatccaaatatgggtgggccaatgcagagaatgactcctccaagaggaatggtgcccttaggaccacagaactatggaggtgcaatgagacccccactgaatgctttaggtggccctggaatgcctggaatgaacatgggtccaggtggtggtagaccttggccaaacccaacaaatgccaattcaataccatactcctcagcatctcctgggaattatgtaggtcctccaggaggtggagggccaccaggaacacccatcatgcctagtccagcagattcaaccaactctggtgataacatgtatactttaatgaatgcagtacctcctggacctaacagacctaattttccaatgggtcctgggtcagatggtcccatgggtggattaggaggaatggagtcacatcacatgaatggctctttaggctcaggagatatggacagtatttccaagaattctcccaataatatgagcctgagtaatcaaccgggcactccaagggatgatggcgaaatggggggaaatttcttaaatccttttcagagtgagagttactcccctagcatgacaatgagcgtgtgatccattaccaagtctcctcatgaaaaccacagtgagtcagcccttcacagaactactacggaagaaaattattcatcacagtgtacagttaaacaaaggaatctcagtcacaccaaaccaacctttttatttcctgctctctcccctcttttgtgaagaaagcgggtccaaatgtgattcaaacaactgtacggagtggcatattagaattgccctaaactgaactgcaaataattatgtgtgtatgtatatgtgtgggaaagagaatgtactgtatatgtgtatgttatacagacatatacacatacatacattgacccacaggacattgtaaaatattatcacatgacatcttaagtagaaataagtagggacttttattccatcctttttttcacgtttacattttaattattacaagttgctcctgccccctccctgaactattttgtgctgtgtatatcactgctttatataagttattttttaaggtgaactcagatgttatggttttgtaaatgtctgcaatcatggataggaataaaatcgcttatttgagagctttcattaaattgcgtctgatgcaagttatcctgtgaatcacaaagtgtactgtctcaaaaaatagaagaaaatgtgtcttcgtcttta

SEQ ID NO: 533 - protein, 361 aa, Homo sapiens
MYGKGKSNSSAVPSDSQAREKLALYVYEYLLHVGAQKSAQTFLSEIRWEKNITLGEPPGFLHSWWCVFWDLYCAAPERRETCEHSSEAKAFHDYSAAAAPSPVLGNIPPGDGMPVGPVPPGFFQPFMSPRYPGGPRPPLRIPNQALGGVPGSQPLLPSGMDPTRQQGHPNMGGPMQRMTPPRGMVPLGPQNYGGAMRPPLNALGGPGMPGMNMGPGGGRPWPNPTNANSIPYSSASPGNYVGPPGGGGPPGTPIMPSPADSTNSGDNMYTLMNAVPPGPNRPNFPMGPGSDGPMGGLGGMESHHMNGSLGSGDMDSISKNSPNNMSLSNQPGTPRDDGEMGGNFLNPFQSESYSPSMTMSV

SEQ ID NO: 534 - DNA, 4470 bp, Homo sapiens
aattcgcagcggggcactgactttacactcgtgtgtcttctgtgtttatttatggtctgtttctggaatgtccgctcctgggactgggaccatgattttctggcgcagtgcgggtgtctcggcgtccgggatcgggcgggtcgcagtagggctccacatttgttgagtgactgaacaccgttcccggccggggagagcgccgcagccgggtccacttcaggtaggggctgggctttcccggccccgcctaggccccgcccccagcgcgaacccgctcccacctcgcctgtccacggagcagcagggggtttgactgtgcttttccctcttgcttccctcgctctttctgcagctgccacgaaaacccggaacggcggagcggcgccgcccctcgcggcacctccctggcagcccttggaggccgcgctgggcatgctcagtcagctgggccgcctcagctctcggagtaggaagctcgggcgctccggctgtaaggagccgcggcggggggaaaatggagcccttcaccaatgatcggcttcagctccccaggaatatgattgaaaacagcatgtttgaggaagaaccagatgtggtggatttagccaaagagccttgtttacatcctctagagcctgatgaggtggaatatgagccccggggttcccgactgctggtgcggggtcttggtgagcatgagatggaggaggatgaagaggattatgagtcatcagcaaagctgctgggcatgtccttcatgaatagaagctcaggccttcggaacagtgcaactggttacaggcagagcccagatggggcttgttcagtaccctctgcaaggaccatggtggtctgtgcttttgtcatcgtggttgctgtttctgtaatcatggtgatttacttactgcccagatgtacctttaccaaagaaggctgccataaaaaaaaccagtcaattggactaattcagccatttgcaacaaatgggaaattgtttccatgggcacagatcaggcttcccactgccgttgtgccactacgctatgaactcagcctacacccgaacctaacctcgatgacattcaggggttctgtgacaatttcagttcaggctcttcaggtcacatggaatatcattcttcatagcacaggtcataatatttcaagagtgacctttatgtcagcagtttcaagccaagaaaaacaagctgagatcctggaatatgcatatcatggacagatcgccattgttgcccccgaagcccttctagcagggcacaattatacgttgaagatagagtactcggcaaatatatctagttcttattatgggttttatggcttctcctacacagatgaaagtaatgagaaaaagtactttgcagcaactcagtttgaacccctggcagcaagatctgcttttccttgttttgatgaaccagcatttaaagccacttttatcatcaagatcataagggatgagcaatacaccgctttatcaaatatgcctaagaagtcatcagtcgttctagatgatggacttgttcaggatgagttttctgagagtgtgaagatgagcacttacttggttgctttcattgtgggagagatgaagaacctgagtcaggacgtaaatggaaccctggtttctatatatgctgtaccagaaaagattggtcaagttcattatgccttggaaacaactgtgaagcttcttgagttttttcaaaactactttgaaattcagtacccacttaagaaattggatttggtggctattcctgactttgaagcaggagcaatggaaaattggggtttgctcaccttccgagaggagacacttctgtatgacagtaacacttcttcaatggcggatagaaagctggtgactaaaatcattgctcatgagctggcccaccagtggtttggcaatctggtaacaatgaagtggtggaatgacctatggctaaatgaaggttttgccactttcatggagtatttctctttggaaaaaatattcaaagagctttctagttatgaagatttcttagatgctcgatttaaaaccatgaagaaagattccttaaattcatctcatccaatatcatcatctgttcagtcttcagaacaaattgaagaaatgtttgattctctttcctattttaagggatcttctctcttgttgatgttgaaaacttaccttagtgaagatgtgtttcaacatgctgttgtcctttacctgcataatcacagctatgcatctattcaaagtgatgatctgtgggatagttttaatgaggtcacaaaccaaacactagatgtaaagagaatgatgaaaacctggaccctgcagaaaggatttcctttagtgactgttcaaaagaaaggaaaggaactttttatacaacaagagagattctttttaaatatgaagcctgaaattcagccttcagatacaagctacctgtggcatattccactatcctatgtcactgaaggaagaaattattcaaaatatcaatcggtatcattactggataagaaatcaggtgtcatcaatcttacagaagaagtgctgtgggtcaaagtgaatataaacatgaatggttattatattgtacactatgcagatgatgattgggaagcactaatccatcagttgaaaataaatccttatgttctgagtgacaaagaccgagccaaccttatcaacaacatctttgaacttgcaggcctaggcaaggtacctctcaagagggcctttgatttgattaattatcttggaaatgagaaccatactgcacccatcaccgaagccctgtttcagacagacctcatctataacctccttgaaaaactgggatacatggatctggcctcaagactggtgactagggtatttaaattacttcaaaaccaaattcaacaacaaacttggactgatgagggcactccatctatgcgagagcttcggtcagccctgctagagtttgcttgcacccacaacctggggaactgctctactactgccatgaaactgtttgatgactggatggcatccaatggaactcaaagcctacctactgatgtcatgacaactgtgttcaaagttggagcaaaaactgacaaaggctggtcattccttttgggcaaatacatttctataggctctgaagcagagaagaacaaaatactagaagcacttgccagctcagaggatgtgcggaagctttactggttaatgaaaagtagcctgaatggagataacttccgaacacagaagctgtcttttatcattagaacagtgggtcgacattttcctggacacttactggcatgggattttgtcaaagagaactggaataagcttgtacagaagttccctctggggtcctataccatacaaaatattgttgctggatcaacttacctgttttcaacaaagacacatttatctgaggttcaggcattctttgaaaatcagtcagaggcaaccttccggcttcgttgtgtccaggaggctttggaagtcattcagttgaatatccagtggatggagaagaacctcaaaagtctcacatggtggctgtagcatgcacaaccgcacctcattttgttgcccattcagagagcttgtaagcttgggctctgccgcttttgcaaaagccaaggtaaagccaggatcgctgccaagttgtttgcactctttggagttctagttagctcagggcctgactgtatttttcatccatcttttctgaagtgtctttgggcagtatgtagttatttattacaaaattatattcacctaaatgccaaccatctacaaaaacaatgagtaatttttctactttgaagatacacagatggggacaaaaaccctgttttggaattctgttctattcctcagtatccagaaagttactgacacagtaaaacaaggaaagttctaccctaagagccgccatcacttcaggccgctggtttgtcagccatctgttgcttcttattgatagatggcattggaatgtggtacaaagttagctctgaagaatatggtaacgaagacaataaagcatgcactgtaagaactgacctcaggtgtgcagatctactttgatttggggttttgattaattctttatttttctgaaaaaaagtttaaataatgtctgtaactattgtgtttttttcctgccgaatagccaggtgctacagatttttaaaatttttgttgtattgaaaagctaaacaaggccaaaaggttaaattttttgaatatttaagactttctttttcatcttttatagcgttaccataggaaactgttccaaactgagttagctttaattataattattttattcataaatggtgatagtccccagatctgtacacctttatcactccctgccgtagatatactttaggttagtatttctacattcgtggcaagcattttggtaacac

SEQ ID NO: 535 - protein, 1025 aa, Homo sapiens
MEPFTNDRLQLPRNMIENSMFEEEPDVVDLAKEPCLHPLEPDEVEYEPRGSRLLVRGLGEHEMEEDEEDYESSAKLLGMSFMNRSSGLRNSATGYRQSPDGACSVPSARTMVVCAFVIVVAVSVIMVIYLLPRCTFTKEGCHKKNQSIGLIQPFATNGKLFPWAQIRLPTAVVPLRYELSLHPNLTSMTFRGSVTISVQALQVTWNIILHSTGHNISRVTFMSAVSSQEKQAEILEYAYHGQIAIVAPEALLAGHNYTLKIEYSANISSSYYGFYGFSYTDESNEKKYFAATQFEPLAARSAFPCFDEPAFKATFIIKIIRDEQYTALSNMPKKSSVVLDDGLVQDEFSESVKMSTYLVAFIVGEMKNLSQDVNGTLVSIYAVPEKIGQVHYALETTVKLLEFFQNYFEIQYPLKKLDLVAIPDFEAGAMENWGLLTFREETLLYDSNTSSMADRKLVTKIIAHELAHQWFGNLVTMKWWNDLWLNEGFATFMEYFSLEKIFKELSSYEDFLDARFKTMKKDSLNSSHPISSSVQSSEQIEEMFDSLSYFKGSSLLLMLKTYLSEDVFQHAVVLYLHNHSYASIQSDDLWDSFNEVTNQTLDVKRMMKTWTLQKGFPLVTVQKKGKELFIQQERFFLNMKPEIQPSDTSYLWHIPLSYVTEGRNYSKYQSVSLLDKKSGVINLTEEVLWVKVNINMNGYYIVHYADDDWEALIHQLKINPYVLSDKDRANLINNIFELAGLGKVPLKRAFDLINYLGNENHTAPITEALFQTDLIYNLLEKLGYMDLASRLVTRVFKLLQNQIQQQTWTDEGTPSMRELRSALLEFACTHNLGNCSTTAMKLFDDWMASNGTQSLPTDVMTTVFKVGAKTDKGWSFLLGKYISIGSEAEKNKILEALASSEDVRKLYWLMKSSLNGDNFRTQKLSFIIRTVGRHFPGHLLAWDFVKENWNKLVQKFPLGSYTIQNIVAGSTYLFSTKTHLSEVQAFFENQSEATFRLRCVQEALEVIQLNIQWMEKNLKSLTWWL

SEQ ID NO: 536 - DNA, 4262 bp, Homo sapiens
ctcctaactccactaagtacagaagtggagccgtacagccatgaatgtcaggcatgttgtggggactagttgtattagttttctattgccaccataacaaattaccacaaacttaagcaatatagtacaaatttatcttaaagttattggcaggtcagaagcctgatacggatctcattgggctaaaacgaaggagttggcagggctgtgtgttcctttctgtaggctctgggcaggatccatttcctgcacttttttggcttttggaggtcgtccacattccttggctcctggccctgctccttcatcttcaaagctaccaaagatcggcttcagctccccaggaatatgattgaaaacagcatgtttgaggaagaaccagatgtggtggatttagccaaagagccttgtttacatcctctagagcctgatgaggtggaatatgagccccggggttcccgactgctggtgcggggtcttggtgagcatgagatggaggaggatgaagaggattatgagtcatcagcaaagctgctgggcatgtccttcatgaatagaagctcaggccttcggaacagtgcaactggttacaggcagagcccagatggggcttgttcagtaccctctgcaaggaccatggtggtctgtgcttttgtcatcgtggttgctgtttctgtaatcatggtgatttacttactgcccagatgtacctttaccaaagaaggctgccataaaaaaaaccagtcaattggactaattcagccatttgcaacaaatgggaaattgtttccatgggcacagatcaggcttcccactgccgttgtgccactacgctatgaactcagcctacacccgaacctaacctcgatgacattcaggggttctgtgacaatttcagttcaggctcttcaggtcacatggaatatcattcttcatagcacaggtcataatatttcaagagtgacctttatgtcagcagtttcaagccaagaaaaacaagctgagatcctggaatatgcatatcatggacagatcgccattgttgcccccgaagcccttctagcagggcacaattatacgttgaagatagagtactcggcaaatatatctagttcttattatgggttttatggcttctcctacacagatgaaagtaatgagaaaaagtactttgcagcaactcagtttgaacccctggcagcaagatctgcttttccttgttttgatgaaccagcatttaaagccacttttatcatcaagatcataagggatgagcaatacaccgctttatcaaatatgcctaagaagtcatcagtcgttctagatgatggacttgttcaggatgagttttctgagagtgtgaagatgagcacttacttggttgctttcattgtgggagagatgaagaacctgagtcaggacgtaaatggaaccctggtttctatatatgctgtaccagaaaagattggtcaagttcattatgccttggaaacaactgtgaagcttcttgagttttttcaaaactactttgaaattcagtacccacttaagaaattggatttggtggctattcctgactttgaagcaggagcaatggaaaattggggtttgctcaccttccgagaggagacacttctgtatgacagtaacacttcttcaatggcggatagaaagctggtgactaaaatcattgctcatgagctggcccaccagtggtttggcaatctggtaacaatgaagtggtggaatgacctatggctaaatgaaggttttgccactttcatggagtatttctctttggaaaaaatattcaaagagctttctagttatgaagatttcttagatgctcgatttaaaaccatgaagaaagattccttaaattcatctcatccaatatcatcatctgttcagtcttcagaacaaattgaagaaatgtttgattctctttcctattttaagggatcttctctcttgttgatgttgaaaacttaccttagtgaagatgtgtttcaacatgctgttgtcctttacctgcataatcacagctatgcatctattcaaagtgatgatctgtgggatagttttaatgaggtcacaaaccaaacactagatgtaaagagaatgatgaaaacctggaccctgcagaaaggatttcctttagtgactgttcaaaagaaaggaaaggaactttttatacaacaagagagattctttttaaatatgaagcctgaaattcagccttcagatacaagctacctgtggcatattccactatcctatgtcactgaaggaagaaattattcaaaatatcaatcggtatcattactggataagaaatcaggtgtcatcaatcttacagaagaagtgctgtgggtcaaagtgaatataaacatgaatggttattatattgtacactatgcagatgatgattgggaagcactaatccatcagttgaaaataaatccttatgttctgagtgacaaagaccgagccaaccttatcaacaacatctttgaacttgcaggcctaggcaaggtacctctcaagagggcctttgatttgattaattatcttggaaatgagaaccatactgcacccatcaccgaagccctgtttcagacagacctcatctataacctccttgaaaaactgggatacatggatctggcctcaagactggtgactagggtatttaaattacttcaaaaccaaattcaacaacaaacttggactgatgagggcactccatctatgcgagagcttcggtcagccctgctagagtttgcttgcacccacaacctggggaactgctctactactgccatgaaactgtttgatgactggatggcatccaatggaactcaaagcctacctactgatgtcatgacaactgtgttcaaagttggagcaaaaactgacaaaggctggtcattccttttgggcaaatacatttctataggctctgaagcagagaagaacaaaatactagaagcacttgccagctcagaggatgtgcggaagctttactggttaatgaaaagtagcctgaatggagataacttccgaacacagaagctgtcttttatcattagaacagtgggtcgacattttcctggacacttactggcatgggattttgtcaaagagaactggaataagcttgtacagaagttccctctggggtcctataccatacaaaatattgttgctggatcaacttacctgttttcaacaaagacacatttatctgaggttcaggcattctttgaaaatcagtcagaggcaaccttccggcttcgttgtgtccaggaggctttggaagtcattcagttgaatatccagtggatggagaagaacctcaaaagtctcacatggtggctgtagcatgcacaaccgcacctcattttgttgcccattcagagagcttgtaagcttgggctctgccgcttttgcaaaagccaaggtaaagccaggatcgctgccaagttgtttgcactctttggagttctagttagctcagggcctgactgtatttttcatccatcttttctgaagtgtctttgggcagtatgtagttatttattacaaaattatattcacctaaatgccaaccatctacaaaaacaatgagtaatttttctactttgaagatacacagatggggacaaaaaccctgttttggaattctgttctattcctcagtatccagaaagttactgacacagtaaaacaaggaaagttctaccctaagagccgccatcacttcaggccgctggtttgtcagccatctgttgcttcttattgatagatggcattggaatgtggtacaaagttagctctgaagaatatggtaacgaagacaataaagcatgcactgtaagaactgacctcaggtgtgcagatctactttgatttggggttttgattaattctttatttttctgaaaaaaagtttaaataatgtctgtaactattgtgtttttttcctgccgaatagccaggtgctacagatttttaaaatttttgttgtattgaaaagctaaacaaggccaaaaggttaaattttttgaatatttaagactttctttttcatcttttatagcgttaccataggaaactgttccaaactgagttagctttaattataattattttattcataaatggtgatagtccccagatctgtacacctttatcactccctgccgtagatatactttaggttagtatttctacattcgtggcaagcattttggtaacac

SEQ ID NO: 537 - protein, 1011 aa, Homo sapiens
MIENSMFEEEPDVVDLAKEPCLHPLEPDEVEYEPRGSRLLVRGLGEHEMEEDEEDYESSAKLLGMSFMNRSSGLRNSATGYRQSPDGACSVPSARTMVVCAFVIVVAVSVIMVIYLLPRCTFTKEGCHKKNQSIGLIQPFATNGKLFPWAQIRLPTAVVPLRYELSLHPNLTSMTFRGSVTISVQALQVTWNIILHSTGHNISRVTFMSAVSSQEKQAEILEYAYHGQIAIVAPEALLAGHNYTLKIEYSANISSSYYGFYGFSYTDESNEKKYFAATQFEPLAARSAFPCFDEPAFKATFIIKIIRDEQYTALSNMPKKSSVVLDDGLVQDEFSESVKMSTYLVAFIVGEMKNLSQDVNGTLVSIYAVPEKIGQVHYALETTVKLLEFFQNYFEIQYPLKKLDLVAIPDFEAGAMENWGLLTFREETLLYDSNTSSMADRKLVTKIIAHELAHQWFGNLVTMKWWNDLWLNEGFATFMEYFSLEKIFKELSSYEDFLDARFKTMKKDSLNSSHPISSSVQSSEQIEEMFDSLSYFKGSSLLLMLKTYLSEDVFQHAVVLYLHNHSYASIQSDDLWDSFNEVTNQTLDVKRMMKTWTLQKGFPLVTVQKKGKELFIQQERFFLNMKPEIQPSDTSYLWHIPLSYVTEGRNYSKYQSVSLLDKKSGVINLTEEVLWVKVNINMNGYYIVHYADDDWEALIHQLKINPYVLSDKDRANLINNIFELAGLGKVPLKRAFDLINYLGNENHTAPITEALFQTDLIYNLLEKLGYMDLASRLVTRVFKLLQNQIQQQTWTDEGTPSMRELRSALLEFACTHNLGNCSTTAMKLFDDWMASNGTQSLPTDVMTTVFKVGAKTDKGWSFLLGKYISIGSEAEKNKILEALASSEDVRKLYWLMKSSLNGDNFRTQKLSFIIRTVGRHFPGHLLAWDFVKENWNKLVQKFPLGSYTIQNIVAGSTYLFSTKTHLSEVQAFFENQSEATFRLRCVQEALEVIQLNIQWMEKNLKSLTWWL

SEQ ID NO: 538 - DNA, 864 bp, Homo sapiens
atggcccccaaacgccagtctccactcctgcctcaaaagaagaaaccaagaccacctcctgctctgggactggagaagacatcagcctctgcaggcttgccgaagaagggagaaaaagaacagcaagaaacaattgaacacattcatgaagtacaaaatgaaatggacagacttaatgaacaagccagtgaggagatttgaaagtagaacagaaatataacaaactctgccaaccatttttttcagaagaggtcagaattgatctccaaaatcccagatttttgggtaacaatatttgtcaatcatccagaagtgtctgcactgcctggggaggaggacgaagaggcactgcattatttgaccagagttgaaatgacagactttgatgatattaaatcaggttacagaatagatttttattttgatgaaaatccttactttgaaaataacattctcgccaaagaatttcatctgaatgagagtggtgatccatcttcaaagcccaccgaaatcaaatggaaatatggaaaggatttgatgaaacgttcaagtcaaacgcagaataaagctcacaggaagaggcagcatgaggaaccagagagcttctttacctggtttactgaccattctgatgttggtgctgatgagttaggagaggtcatcaaagatatttggccaaatccattacagtactacttggttcctgatatggataatgaagaaggagaaggagaagaagatgacgatgatgatgaagaggaggaaggattagaagatattgatgaagaaggggatgaggatgaaggtgaagaagatgaagatgaaggggagaaaggagaggaggatgaaggagaaaatgactaa

SEQ ID NO: 539 - DNA, 3598 bp, Homo sapiens
atgcctgagcaggacaaggaccctagagtccaagagaatcctgatgatcagagaagggtccccaaggtcaccggggatgcacggtctgcatttcggcccctgcgggacaatggagtcctctctccctttgtgcccaggcccgggcctctgcagacatacctccatgcccagaggtcagaaatcagatataaccagacatcccagaatacctggacgagctcgtgcaccaaccaaaatgccatctccagctcctatagctccgtgggaggcttgctggggctaaagtggaggagggggccagcagggcaggagagcggggcagggatgcctgagcaggacgaggaccctagagtccaagaaaatcctgatgatcagagaacggtccccgaggtcaccagggatgcatggtctgcatttcggcccctgcgggacaatggaggcctctctccctttgtgcccaggcccgggcctctgcagacagaactgaatgcccagagctcagaaatcagatataaccagacatcccagacctcctgggcgagctcgtgcaccaaacgaaatgccatctccagctcctacagctccacgggagacttgccggggctaaagcagaggagggggccagcctcatcccactgccagctgaccctcagttactcaatgacagtgagtgaggacaggcttcaggctgtctctttgggtcaaacacggtgtgaacaggcggcagatacagcaccagggcagacactcgccccaaggggtggctcccccagatctcaggcctctaggccccatagacacaagattcccctgctgccacgcaggcgaggggagcctttgatgctgccacctcccttagagcgggggtaccgggtcactgatgaagacctgcacctggaaaaagaggcggcattacaccggatcaacagtgcactgcaggttgaggacaaggccatctcggattgcagaccctcacggccttcccacactttctcctcacttgcaacaggggcttctggtgggtctcccgtttctaaagcacccactatggatgcacagcaggacagacccaagtcccaagactgcctgggcctagtggcccccctagcatctgctgcacaggtcccctccacagctcctgtgtctgggaagaagcacagaccaccaggacccctgttctcctcctcagatccccttcctgccacatcttcccactcccgggactcagcccagtacacctcgctgattcctgcccccttcacagctgcaagcatggatgccggcatgagaagaacaaggcctggcacgtcggctcctgcagctgccgcagcagcccctcccccctccacattgaaccccatgttggggttactactcaatgcaatggatgcaggcccctcatatttctgggcctcagccacagctgcagcaggtgcccagaggtcagaagtgagatataaccagagatcccagacctcccggaccagatcgtgcaccaaacgaaatgccagctcgagctcctacagctctacggaaggcctcccggaactaaagcggaggaggggaccagcctcatcccactgccagctggccctcagttcctcaaacacagtgagtgaggacggacctcaggctgtctcttcgggtcacagccactgtgaaaacaacgcagatacagcaccagggcagacactcgcccccacgggtggctcccccagatcccaggcctctaggccctgcatcaacagtgcactgcaggttgaggacaaggccatctcgcactgcagaccctcatggccttcccacactttgtcctcacttgcaacaggggcttctggtgggtctagcgtttctaaagcacccactatggatgcacagcaggacagacccaagtcccaagactgcctgggcctagtggcccccctagcatctgctgcacaggtcccctctacagctcccgtgtctgggaagaagcacagaccaccaggacccctgttctcctcctcagatccccttcctgccacctcttcccactcccgggactcagcccaggtcacctcgctgattcctgccccctttacagctgcaagcatggatgccggcatgagaagaaggaggcctagaacgtcggctcctgcagctgccgcagcagcccctcccccctccacattgaaccccatgttggggttactactcaatgcaatggatgcaggcccctcatatttctgggcctcagccacagctgcagcaggtgcccagaggtcagaagtgagatataaccagagatcccagacctcccggaccagatcgtgcaccaaacgaaatgccagctcgagctcctacagctctacggaaggcctcccggaactaaagcggaggagggggccagcctcatcccactgccagctggccctcagttcctcaaacacagtgagtgaggatggacctcaggctgtctcttcgggtcacagccactgtgaaaacaacgcagatacagcaccagggcagacactcgcccccaggggtggctcccccagatcccaggcctctaggccccgcatcaacagtgcactgcaggttgaggacaaggccatctggcactgcagacactcacggccttcccacactttgtcctcacttgcaacaggggcttctggtgggtctagcgtttctaaagcacccactatggatgcacagcaggacagacccaagtcccaagactgcctgggcctagtggcccccctagcatctgctgcacaggtcccctctacagctcccgtgtctgggaagaagcacagaccaccaggacccctgttctcctcctcagatccccttcctgccacatattcccactcccgggactcagcccaggtcacctcgctgattcctgcccccttcacagctgcaagcatggatgccggcatgagaatgaatgccggcatgcgaagaatgttttgtgtttgaaattgtttgaggggtttgggtttatgtttgttggttttttttttttttttttttttttttgcttacatgggcatccttcagcttttaataatctgaaaaattctatttacccattgtcaatgtgtataaattaatctgagtgaattttatacaataaaaggcgaacttttatgcatgaaacaataatttacaaaaaatgtaccagaagaagtatgttcattacaaatataggaaacataaatattaccaaatattggcaagcactaaaatgttcagaaatataagtctattacagttatagctctctcaagcaaaaaaatagcagagaaaaacttagtttaccttaggggctatttattgacttagagatttgctaaaaggtcaaatggggtcacacagaatactaagagctgttcacccagacctcactaagaactcttcttcattcagtagctatatagtaatatgacaactgctcctaccacccagagaggaactacagcaactactctttagcacctgttgctcctaactctgctttgcaattatatgactcaagcattctggctccgttaactattacttctgttactcccaactgaatcccctctaaccctcccactctgcctatttc

SEQ ID NO: 540 - DNA, 695 bp, Homo sapiens
cgtggggtgtcgtgcaatagggctagtgaattaccagatctccgtcaagtgcagtaaccagttcaagttggaagtgtatcttttgaatgcagaaaacaaggtcgtggacaaccaggctgggacccagggccagctgaaggtgctgggtaccaacctctggtggccgtacctgatgcacgaacaccccgcctacctgtactcgtgggaggtgtggctgactgcacagaagtcactggggcctttgacttctacacactccctgtggggctccgcactgtggccgtcaccgagagccagttcctcatcagtgggaaacctttctatttccacggcgtcaacaagcatgaggatgcggacatccaagggaagggcttcaactgtccgctgctggtgaaggacttcaacctgctttgctggcttggcgccaacaccttctgcaccagccactatccctacacagaggagatgctgcagatatgttaccggtatgggattgtggtcatcgatgagtgtcctgctgtgggcctgatgctgccatgagtccctgctgtgcacccgctctgcctggccagccctcgggccacaccgtgaccctctgtcccttccctcctggcccgctggcaactcttcaacaacgtgtctatgcatcaccatatgtgggtggtggaggaaccggtgctcagagacaagaacca

SEQ ID NO: 541 - DNA, 754 bp, Homo sapiens
cttccactttagccttccctgtgtcctgcagttgagggcagctcaaggcaatgaggcaaatggctccaaaccaccccatggtggagccggtgcttgggctggagaggggacctcatggggtggttctccagggtcctggctctcagaggaagtgccgcttcgacagggacaggggtcactcggctctgctgtcccctagatccaagggaagggcttcaactgtccgctgctggtgaaggacttcaacctgctttgctggcttggcgccaacaccttctgcaccagccactatccctacacagaggagatgctgcagatatgttaccggtatgggattgtggtcatcgatgagtgtcctgctgtgggcctgatgctgccatgagtccctgctgtgcacccgctctgcctggccagccctcgggccacaccgtgaccctctgtcccttccctcctggcccgctggcaactcttcaacaacgtgtctatgcatcaccatatgtgggtggtggaggaaccggtgctcagagacaagaaccaccccgccatggtgatgtggtccttggccaaagagcctgcgtccttcctggaatctgccggctactccttcaaatttggagtccagccttccacacctgatcttatacaccagcctcgctttacatcatgctgcaaaatcctcagactgggaaagaataagtgtccccgcaaaactgcagcacaaaagaatttcagatccacccactcagaagtctga

SEQ ID NO: 542 - protein, 69 aa, Homo sapiens
MVMWSLAKEPASFLESAGYSFKFGVQPSTPDLIHQPRFTSCCKILRLGKNKCPRKTAAQKNFRSTHSEV

SEQ ID NO: 543 - DNA, 5645 bp, Homo sapiens
agaagaggaagattagaagattttttttttctttgagagaaagcccagcggagataaacgaatgtcccctcatctccaaagaaaagttcatcggatttttattctagagagctcatcttcaggatgtcagtgaacatttctactgcaggaaaaggtgtggatccaaatacagttgatacttatgacagtggcgatgattgggaaatcggggttggaaatttaataattgatttggacgctgatttggagaaggacagacagaaatttgagatgaataattccaccaccaccactagtagcagcaactccaaggattgtggaggtccggcctccagtggggctggtgctaccgcagccttagctgatggcctaaaatttgcttctgttcaggcctctgctccccaggggaattcacacaaagagaccagcaaatcaaaagtgaaaaggagtaaaacttctaaggatgctaataaatctctgccttctgctgccttgtatgggattcccgagatcagcagcactggcaagaggcaggaagtccaagggcgccctggagaggcaactggcatgaattcagcgctgggtcaaagtgtgagcagcggcggcagcggcaacccaaacagcaatagtaccagcaccagcacctctgccgccaccgcgggggcaggctcctgtgggaaaagcaaagaggagaagccaggtaaaagccagagcagccgaggcgccaagcgggataaggatgcggggaaatccaggaaggacaagcacgacctgcttcagggccaccagaatggcagtggcagccaggccccttccggggggcacctctatggctttggggccaagagcaatggaggtggcgcgagccccttccactgcgggggcactgggagtggcagcgtcgccgctgcaggggaagttagcaaaagtgccccggattcagggctcatgggaaactctatgttggtaaagaaggaagaggaggaggaggagagccacaggcgaatcaagaaactgaaaactgagaaggttgaccccctgtttacagtgccagcgccaccaccgccgatttccagcagtctcacgcctcagattctaccctcctacttttccccatcttcatccaatattgcagcaccggttgaacagcttttggttcggactcgttctgtgggtgtcaatacatgtgaagttggagtagtgacagagccagagtgtcttgggccctgtgaacctgggaccagtgtgaatttggaagggatcgtgtggcatgaaacagaagaaggtgtcctagtggtcaatgtcacgtggaggaacaaaacgtacgtgggaaccctactggactgcaccaagcacgactgggcccctcccaggttttgtgagtcaccgacaagtgacctggagatgagagggggccggggcagagggaagagagcgaggtctgctgctgctgccccgggctccgaggccagcttcacagagtccagagggctgcagaataagaacagagggggggccaatgggaaagggaggcggggcagcctcaatgccagcggacgaaggacacccccaaattgtgctgctgaggatatcaaagccagcccttcctccaccaacaaaaggaaaaacaagcctccaatggagctggacctgaactccagctctgaggacaataagcctggaaagcgtgtccgcacaaattccagaagcactcccactacccctcaagggaaaccagagactacttttttggaccaaggctgctcttctccagtgttaatcgactgtccccacccaaactgcaacaaaaagtacaagcacattaacggcctgaggtaccaccaggctcatgcacacttagacccagaaaacaagctggagttcgagcctgacagtgaggacaagatctcggactgtgaggaaggattgagtaatgtggcacttgaatgcagtgagccaagcacaagtgtatctgcttatgaccagttgaaggcaccggcatcccctggtgctggaaacccacctgggaccccaaagggaaagagagagctgatgagcaatggcccaggttccattattggtgctaaagctgggaagaattctggcaaaaagaagggccttaacaatgaactgaacaaccttccagtaatctccaacatgacggctgcgttagacagttgctcggcagcagacggcagtttggctgctgagatgcctaaactggaagcagaaggattaattgacaagaaaaatttaggagataaagaaaagggcaaaaaagctaccaactgcaaaacggacaaaaacctctctaaactgaaaagtgcccggcccattgcccctgccccagcccccactcccccgcagctaatcgctatacccactgcaacctttacaacgaccaccactgggacaatacccggactgccctccctcacaacaactgttgttcaggctacaccaaagagtcctccgttaaaacccattcaaccaaagcccacaattatgggagagcccatcaccgtgaacccagctctggtgtcactcaaagacaaaaagaaaaaggagaagcgaaagctaaaggacaaagaagggaaagagacgggaagcccaaaaatggatgccaagctggggaaactagaggactccaagggggccagcaaagatttacctgggcattttttaaaggatcatctcaacaagaatgaagggctggcaaatggactgtcggagtctcaggagagccgcatggccagtatcaaagctgaggccgataaggtttacactttcacagacaacgctcccagcccttccatagggagcgcctcgaggctggaatgcagcactttggtgaacgggcaggcaccaatggcacctctgcatgtgttgacccagaatggggcagagagttcagctgcaaagacaagcagcccggcctattcagacatatctgatgctgctgacgatggtggttctgacagcaggtcggagggtatgagatcaaaggccagttccccatcagatattatttctagtaaggacagtgttgtaaaagggcattcttcaactacagcacaatcatctcaactgaaagagtcccattctccctattaccacagctatgatccttattattctccaagttacatgcaccctgggcaggtcggtgcccctgcagctggaaatagtgggagcacgcagggaatgaagatcaagaaggagtctgaggaagatgctgaaaagaaagacaaggcagagcagttagattctaagaaagtggaccacaattctgcatccttacagcctcagcaccagtcggtgatcacacaaagacatcctgccctggctcagtcactttattatggccagtatgcatatgggctctatatggaccagaagtctctgatggccaccagccctgcctatagacagcagtatgagaagtactatgaggaccagaggctggcagagcagaaaatggcccagactgggagaggagactgtgaaaggaaaagtgagctccccttgaaagagctgggcaaggaggaaactaaacagaaaaatatgccatcggccacaatctcaaaagctccctctactccggagcctaacaaaaaccattctaaactagggccatcagtgcctaataaaactgaggagacaggtaaatcgcagcttctctccaatcaccagcagcagcttcaggccgacagcttcaaagctaagcagatggaaaaccaccagcttattaaggaggctgtagaaatgaagtctgtcatggactctatgaagcagacaggtgtagacccaacctcgagatttaaacaagacccagattcaagaacatggcatcattatgtataccagcccaaatatctggatcagcaaaagtcagaagaacttgatagagagaagaaattaaaagaggatagtccgaggaaaactcctaataaagagagtggtgtgcccagccttcctgtatcgttaacaagcattaaagaggagcccaaagaggccaagcatcctgattctcaatcaatggaggagagcaagctgaaaaatgatgatcgaaagactcctgtgaactggaaggactctcggggaacaagagtggctgtctcctcacccatgagtcagcatcagtcatacatacagtacttgcatgcttatccttacccacagatgtacgaccccagccatcctgcataccgggctgtttctcccgtcctaatgcacagttatcctggggcatatctctctccaggatttcattatcctgtttatgggaagatgtcagggagagaagagacagagaaagtcaataccagccctagcgtcaacacgaaaacaaccactgaatctaaagcactggatttgctccagcagcatgctaaccaataccgcagcaagtctcctgctcctgtggaaaaggctacagctgagcgggaacgggaggcagaaagggaaagggatcgccactcccccttcggccagcggcacctgcacacgcaccaccacacccacgttggcatgggttacccgctaatcccgggtcaatatgacccttttcaaggcttgacctctgctgcccttgttgcctctcagcaggtggctgcccaggcatctgcatctggaatgtttcctggacaaagaagagaataacaagattggacatgtacattgtcatgtgactggatcacatggggaagcgctttatacagacatcagttccatggtgttaatttgaaatgccttaatggcaggcaaaaaccagtcatttcatttttgtaaattacagattttatcacagagtaacaaatgttgctgtaattaaacttctgttttatatatatatacgtatacatatctgtatatatacatatatatatatataaatataaatatattctttactttttgtatcagtaaccaggctcgcacacacagggtctgctgccacgtcgcaaaccactcagtaaaggaaattaaaaatgtatttgtcatgttaaaaagtgttagccacaaaaggctacttactttcttttccttttcctttaaaattgtaaataaataatgttatgtatcagtgtgcctgaaccttgcatatccttcacatatttcccataagcccctcagaaaggctaactgtgatgatgacactttggtacaatttagatgtctatttggtggctcctgttaaagacgcaccagtgtaaaatgttcctgtagtcactgtttgtacttgtgtattgtggaaaaagtacttttggaaggcatggggttgccagtaccacaaaaactgtgttgtatataatgtaaagattaaaatggggaaataatgagcatctgtgaataatgaggtgtcattttttgataatcttgaatggcaaataacccaatagcctgcgtaccagagacatctgtgattgttctattacttgaatagttctacagtctttttttttttttaatgtttacaattatccagttttagaagagagagactttaacgccattgcctggttacttgttttatgctgtaatctagtttattttatgtaaaatgtatattgaatgctttccttttttatacctgccttaaataatttggcaatcagaattaaaaagtttttttttttttaaat

SEQ ID NO: 544 - protein, 1512 aa, Homo sapiens
MSVNISTAGKGVDPNTVDTYDSGDDWEIGVGNLIIDLDADLEKDRQKFEMNNSTTTTSSSNSKDCGGPASSGAGATAALADGLKFASVQASAPQGNSHKETSKSKVKRSKTSKDANKSLPSAALYGIPEISSTGKRQEVQGRPGEATGMNSALGQSVSSGGSGNPNSNSTSTSTSAATAGAGSCGKSKEEKPGKSQSSRGAKRDKDAGKSRKDKHDLLQGHQNGSGSQAPSGGHLYGFGAKSNGGGASPFHCGGTGSGSVAAAGEVSKSAPDSGLMGNSMLVKKEEEEEESHRRIKKLKTEKVDPLFTVPAPPPPISSSLTPQILPSYFSPSSSNIAAPVEQLLVRTRSVGVNTCEVGVVTEPECLGPCEPGTSVNLEGIVWHETEEGVLVVNVTWRNKTYVGTLLDCTKHDWAPPRFCESPTSDLEMRGGRGRGKRARSAAAAPGSEASFTESRGLQNKNRGGANGKGRRGSLNASGRRTPPNCAAEDIKASPSSTNKRKNKPPMELDLNSSSEDNKPGKRVRTNSRSTPTTPQGKPETTFLDQGCSSPVLIDCPHPNCNKKYKHINGLRYHQAHAHLDPENKLEFEPDSEDKISDCEEGLSNVALECSEPSTSVSAYDQLKAPASPGAGNPPGTPKGKRELMSNGPGSIIGAKAGKNSGKKKGLNNELNNLPVISNMTAALDSCSAADGSLAAEMPKLEAEGLIDKKNLGDKEKGKKATNCKTDKNLSKLKSARPIAPAPAPTPPQLIAIPTATFTTTTTGTIPGLPSLTTTVVQATPKSPPLKPIQPKPTIMGEPITVNPALVSLKDKKKKEKRKLKDKEGKETGSPKMDAKLGKLEDSKGASKDLPGHFLKDHLNKNEGLANGLSESQESRMASIKAEADKVYTFTDNAPSPSIGSASRLECSTLVNGQAPMAPLHVLTQNGAESSAAKTSSPAYSDISDAADDGGSDSRSEGMRSKASSPSDIISSKDSVVKGHSSTTAQSSQLKESHSPYYHSYDPYYSPSYMHPGQVGAPAAGNSGSTQGMKIKKESEEDAEKKDKAEQLDSKKVDHNSASLQPQHQSVITQRHPALAQSLYYGQYAYGLYMDQKSLMATSPAYRQQYEKYYEDQRLAEQKMAQTGRGDCERKSELPLKELGKEETKQKNMPSATISKAPSTPEPNKNHSKLGPSVPNKTEETGKSQLLSNHQQQLQADSFKAKQMENHQLIKEAVEMKSVMDSMKQTGVDPTSRFKQDPDSRTWHHYVYQPKYLDQQKSEELDREKKLKEDSPRKTPNKESGVPSLPVSLTSIKEEPKEAKHPDSQSMEESKLKNDDRKTPVNWKDSRGTRVAVSSPMSQHQSYIQYLHAYPYPQMYDPSHPAYRAVSPVLMHSYPGAYLSPGFHYPVYGKMSGREETEKVNTSPSVNTKTTTESKALDLLQQHANQYRSKSPAPVEKATAEREREAERERDRHSPFGQRHLHTHHHTHVGMGYPLIPGQYDPFQGLTSAALVASQQVAAQASASGMFPGQRRE

SEQ ID NO: 545 - DNA, 1896 bp, Homo sapiens
atttcagcagctctcagggccttgggctcatcccgagtcccgggctcagtatgtggcgccttcctcgcgcgctgtgtgtgcacgctgcaaagaccagcaagctctctggaccttggagcaggcctgccgccttcatgtccactctcctcatcaatcagccccagtatgcgtggctgaaagagctggggctccgcgaggaaaacgagggcgtgtataatggaagctggggaggccggggagaggttattacgacctattgccctgctaacaacgagccaatagcaagagtccgacaggccagtgtggcagactatgaagaaactgtaaagaaagcaagagaagcatggaaaatctgggcagatattcctgctccaaaacgaggagaaatagtaagacagattggcgatgccttgcgggagaagatccaagtactaggaagcttggtgtctttggagatggggaaaatcttagtggaaggtgtgggtgaagttcaggagtatgtggatatctgtgactatgctgttggtttatcaaggatgattggaggacctatcttgccttctgaaagatctggccatgcactgattgagcagtggaatcccgtaggcctggttggaatcatcacggcattcaatttccctgtggcagtgtatggttggaacaacgccatcgccatgatctgtggaaatgtctgcctctggaaaggagctccaaccacttccctcattagtgtggctgtcacaaagataatagccaaggttctggaggacaacaagctgcctggtgcaatttgttccttgacttgtggtggagcagatattggcacagcaatggccaaagatgaacgagtgaacctgctgtccttcactgggagcactcaggtgggaaaacaggtgggcctgatggtgcaggagaggtttgggagaagtctgttggaacttggaggaaacaatgccattattgcctttgaagatgcagacctcagcttagttgttccatcagctctcttcgctgctgtgggaacagctggccagaggtgtaccactgcgaggcgactgtttatacatgaaagcatccatgatgaggttgtaaacagacttaaaaaggcctatgcacagatccgagttgggaacccatgggaccctaatgttctctatgggccactccacaccaagcaggcagtgagcatgtttcttggagcagtggaagaagcaaagaaagaaggtggcacagtggtctatgggggcaaggttatggatcgccctggaaattatgtagaaccgacaattgtgacaggtcttggccacgatgcgtccattgcacacacagagacttttgctccgattctctatgtctttaaattcaagaatgaagaagaggtctttgcatggaataatgaagtaaaacagggactttcaagtagcatctttaccaaagatctgggcagaatctttcgctggcttggacctaaaggatcagactgtggcattgtaaatgtcaacattccaacaagtggggctgagattggaggtgcctttggaggagaaaagcacactggtggtggcagggagtctggcagtgatgcctggaaacagtacatgagaaggtctacttgtactatcaactacagtaaagaccttcctctggcccaaggaatcaagtttcagtaaaggtgttttagatgaacatcccttaatttgaggtgttccagcagctgtttttggagaagacaaagaaaattaaagttttccctgaataaatgcattattatgactgtgacagtgactaatccccctatgaccccaaagccctgattaaatcaagagattccttttttaaaaatcaaaataaaattgttacaacatagccatagttactaaaaaaaaaaaaaaaaaa

SEQ ID NO: 546 - protein, 511 aa, Homo sapiens
MSTLLINQPQYAWLKELGLREENEGVYNGSWGGRGEVITTYCPANNEPIARVRQASVADYEETVKKAREAWKIWADIPAPKRGEIVRQIGDALREKIQVLGSLVSLEMGKILVEGVGEVQEYVDICDYAVGLSRMIGGPILPSERSGHALIEQWNPVGLVGIITAFNFPVAVYGWNNAIAMICGNVCLWKGAPTTSLISVAVTKIIAKVLEDNKLPGAICSLTCGGADIGTAMAKDERVNLLSFTGSTQVGKQVGLMVQERFGRSLLELGGNNAIIAFEDADLSLVVPSALFAAVGTAGQRCTTARRLFIHESIHDEVVNRLKKAYAQIRVGNPWDPNVLYGPLHTKQAVSMFLGAVEEAKKEGGTVVYGGKVMDRPGNYVEPTIVTGLGHDASIAHTETFAPILYVFKFKNEEEVFAWNNEVKQGLSSSIFTKDLGRIFRWLGPKGSDCGIVNVNIPTSGAEIGGAFGGEKHTGGGRESGSDAWKQYMRRSTCTINYSKDLPLAQGIKFQ

SEQ ID NO: 547 - DNA, 1751 bp, Homo sapiens
cagcgcagcgcaccgcgggaagatggcgttggaggtcggcgatatggaagatgggcagctttccgactcggattccgacatgacggtcgcacccagcgacaggccgctgcaattgccaaaagtgctaggtggcgacagtgctatgagggccttccagaacacggcaactgcatgtgcaccagtatcacattatcgagctgttgaaagtgtggattcaagtgaagaaagtttttctgattcagatgatgatagctgtctttggaaacgcaaacgacagaaatgttttaaccctcctcccaaaccagagccttttcagtttggccagagcagtcagaaaccacctgttgctggaggaaagaagattaacaacatatggggtgctgtgctgcaggaacagaatcaagatgcagtggccactgaacttggtatcttgggaatggagggcactattgacagaagcagacaatccgagacctacaattatttgcttgccaagaaacttaggaaggaatctcaagagcatacaaaagatctagacaaggaactagatgaatatatgcatggtggcaaaaaaatgggatcaaaggaagaggaaaatgggcaaggtcatctcaaaaggaaacgacctgtcaaagacaggctagggaacagaccagaaatgaactataaaggtcgatacgagatcacagcggaagattctcaagagaaagtggctgatgaaatttcattcaggttacaggaaccaaagaaagacctgatagcccgagtagtgaggattattggtaacaaaaaggcaattgaacttctgatggaaaccgctgaagttgaacaaaatggtggtctctttataatgaatggtagtcgaagaagaacaccaggtggagtttttctgaatctcttgaaaaacactcctagtatcagcgaggaacaaattaaggacattttctacattgaaaaccaaaaggaatatgaaaataaaaaagctgctaggaagaggagaacacaagtgttggggaaaaagatgaaacaagctattaaaagtctaaattttcaagaagatgatgatacatcacgagaaacttttgcaagtgacacgaatgaggccttggcctctcttgatgagtcacaggaaggacatgcagaagccaagttggaggcagaggaagccattgaagttgatcattctcatgatttggacatcttttaagtacattttcaacagtttgaggactaagcctttctaaaataacattgtaataaaccatttttactgagattgcaacgttttgcactgataaacatgagaatctggaggaaagacaattgttttcttgtttaaaatatgtgtggaaaggaatgcaattgatagaacatttaaagatatatctgacaaaatacttaagagtatatagcacaggatttaatttctcaatctgttgcatgtgctaattatgagtattactagttgataatcagttttgtctaggtcataacataccatttgtaagtttgtttgctttttcaggtttatctttgcagtgaattatgctttgctttaaaacattccgctaaaatcataatgggacatataaattattaagctgttagaaatgcattcaaatttgttttttctgtgttctaagaactcaggcaattttaaggataaaaactaacattggccaggcacggtggctcacgcctgtaatcccaacactttaggagaccaaggcgggcagatcacttgaggtcag

SEQ ID NO: 548 - protein, 394 aa, Homo sapiens
MALEVGDMEDGQLSDSDSDMTVAPSDRPLQLPKVLGGDSAMRAFQNTATACAPVSHYRAVESVDSSEESFSDSDDDSCLWKRKRQKCFNPPPKPEPFQFGQSSQKPPVAGGKKINNIWGAVLQEQNQDAVATELGILGMEGTIDRSRQSETYNYLLAKKLRKESQEHTKDLDKELDEYMHGGKKMGSKEEENGQGHLKRKRPVKDRLGNRPEMNYKGRYEITAEDSQEKVADEISFRLQEPKKDLIARVVRIIGNKKAIELLMETAEVEQNGGLFIMNGSRRRTPGGVFLNLLKNTPSISEEQIKDIFYIENQKEYENKKAARKRRTQVLGKKMKQAIKSLNFQEDDDTSRETFASDTNEALASLDESQEGHAEAKLEAEEAIEVDHSHDLDIF

SEQ ID NO: 549 - DNA, 756 bp, Homo sapiens
atggagaaggtgcctcacgtgaactttccaggggccctcagtgcccagggaggccaaggtgcttcatgtcagggatgccccaaccagcggctgtgcacttctggagtgggggctaccccagacccggctatagaggaaatcaaagagaaaatgaaaaccataaaacacaaaatcttggtattgtttgggaaaggcagtgttgggaaaagcacattcagtgcccaccttgcccatggcctagcagaggatgaaaacacacagggccagactctggctatagtcgtaagtgtggtgcacacctggatcaaccccacaacagttacactgtctcttcacggggagatcctcgagtctgtcagtgtccatcagcaaccagccaataagagcccacgagagggaaacagtaatgactatagaggcaaaggaggaatacagcccaaacaggaaaggccctcactcgaggagctgggtggcgcaggggctcacgcctacctgagggggctccaaggagggcctgggcccagccagtgcttctgtgccaactggggcttccacatttgcttcaaaagcacccttccgggccctggcaacacagacccctcctgtgggtcccagcagctgtcttacctcagctgccctggacccaagaatgggtctgagtcaactgaatcactcaggatggaagagaacccttggagggaaatcccaccccatagtcaagagctccactgctacaatgagcaggagctggagtga

SEQ ID NO: 550 - protein, 251 aa, Homo sapiens [sequence omitted]

SEQ ID NO: 551 - DNA, 1881 bp, Homo sapiens
agcgcggcagcccgcgcagccggtgactgggggactgggtttggagtaggacctgcggcgtgctcgagactccgacttcggtcttgcggcgcgctcgcgcccgcgggccatgccccactgactctaagtgggcactgccccggctccgggagggcgagaccgagcgccggccatgggaagcttccagctggaagactttgcggcgggctggatcggaggtgcagccagtgtcatcgtcggccaccctctggacacagtcaagactcgcctgcaggctggcgttggctacggaaacaccctcagctgcatccgcgtggtgtacaggagggagagtatgttcggcttcttcaagggcatgtccttccccctcgccagcattgccgtctacaactccgtggtgtttggggtcttcagtaacacgcagcggttcctcagccagcaccgctgcggggagccagaggccagtcctccccgcacgctgtcagacctgctcctggccagcatggtggccggcgtggtctctgtcgggctgggagggcccgtggacctcatcaagatccggttgcagatgcagacacaaccgtttcgggacgccaacctcggtttgaagtccagggcagtggctcctgcggagcagccagcataccaggggccagtgcactgcattacaaccattgtgaggaatgagggcctggcggggctataccggggggccagtgccatgctgctgagggatgtcccaggctattgcctctacttcatcccctacgtgttcctgagtgagtggatcacacctgaggcctgcacaggccccagcccctgtgccgtgtggctggcgggcggcatggcaggtaagggcagcagcagctggagccgcacccctgtgcaggccacagcagtgggacagctggggaactgccatgcccttctcagcccagggggagggcaggacacatttaggtactcacccaacaattctttgttaggtacctactctgtccccggccctctcccacctcagtctcatcccttccctatgcagctatgagaatggcagttcccatttgactttcaggcaacagatatattttgaacacatactctgtgtcaggcattactaagctttggaaaggaaatccattatcatggttcagtttattaaatgcaatctttgtaatgtaaggatgccattagttctacaaggtaggaatcggtttccccatttcacagatgagaaaactcaggtccagaaatgttaagtagccaatcccaggtcatacagctggagctgacagtatagcagggactctgcagtcagaaagatttaagttcaaatccacacttcatcattttgtgaccatggacttgttgcttaacctccctgctcagaatcctgcaccacatccttctttcatttaaggtaaaagttgatatctttgcaatggttttccaggccctcagtgatctagctccctgttccccacccacctcacttctactcctctccccttcctcactttctccagtcacactggtctctgctgcaacttgaccatgcctggcccttccctgaccacagggcctttgtacctgctactcaccacctcctgaatttaacaacgtggagaccactggggattttggcaagggccatttgatggagagaagggtgtaaaaacctgatgaagtgggataaagaaagaatgggatgaaggatattggtgcacccaagtatacacaactcttctgagggttctgctatgctgtaatgaggaacagagaaacagagccatagccagaagggcctttggaagccaagagaggatactttttaagaaggctgacatcatgacatgtttgatgtgatgggaaagatctaac

SEQ ID NO: 552 - protein, 291 aa, Homo sapiens
MGSFQLEDFAAGWIGGAASVIVGHPLDTVKTRLQAGVGYGNTLSCIRVVYRRESMFGFFKGMSFPLASIAVYNSVVFGVFSNTQRFLSQHRCGEPEASPPRTLSDLLLASMVAGVVSVGLGGPVDLIKIRLQMQTQPFRDANLGLKSRAVAPAEQPAYQGPVHCITTIVRNEGLAGLYRGASAMLLRDVPGYCLYFIPYVFLSEWITPEACTGPSPCAVWLAGGMAGKGSSSWSRTPVQATAVGQLGNCHALLSPGGGQDTFRYSPNNSLLGTYSVPGPLPPQSHPFPMQL

SEQ ID NO: 553 - DNA, 5747 bp, Homo sapiens
atagagcttgctgcctgtgtgagtgtgagggggagagcgagagagagcaagggagggagagagaggcaggctgcgaggggagaggagagggagtgggggagccagcgctccagctagcatgaggacgggcttcttttcccgtgctcagttaatctggctgtcagttggtgttaacgctgcagtttaagtgttcggattccaagggaaacagacaaacctcacgaaaggaaggaagcaagcaagcaaggaaggaactgcaggaggaaaagaacaggcagaacagcgagaagaataaagggaaagggggggaaacaccaaatctatgattggacctgggcttctttttcgccaatgcaaaaaggaatatgcagcacatttttgccttcttctgcaccggtttcctaggcgcggtagtaggtgccaatttccccaacaatatccagatcgggggattatttccaaaccagcagtcacaggaacatgctgcttttagatttgctttgtcgcaactcacagagcccccgaagctgctcccccagattgatattgtgaacatcagcgacagctttgagatgacctatagattctgttcccagttctccaaaggagtctatgccatctttgggttttatgaacgtaggactgtcaacatgctgacctccttttgtggggccctccacgtctgcttcattacgccgagctttcccgttgatacatccaatcagtttgtccttcagctgcgccctgaactgcaggatgccctcatcagcatcattgaccattacaagtggcagaaatttgtctacatttatgatgccgaccggggcttatccgtcctgcagaaagtcctggatacagctgctgagaagaactggcaggtgacagcagtcaacattttgacaaccacagaggagggataccggatgctctttcaggacctggagaagaaaaaggagcggctggtggtggtggactgtgaatcagaacgcctcaatgctatcttgggccagattataaagctagagaagaatggcatcggctaccactacattcttgcaaatctgggcttcatggacattgacttaaacaaattcaaggagagtggcgccaatgtgacaggtttccagctggtgaactacacagacactattccggccaagatcatgcagcagtggaagaatagtgatgctcgagaccacacacgggtggactggaagagacccaagtacacctctgcgctcacctacgatggggtgaaggtgatggctgaggctttccagagcctgcggaggcagagaattgatatatctcgccgggggaatgctggggattgtctggctaacccagctgttccctggggccaagggatcgacatccagagagctctgcagcaggtgcgatttgaaggtttaacaggaaacgtgcagtttaatgagaaaggacgccggaccaactacacgctccacgtgattgaaatgaaacatgacggcatccgaaagattggttactggaatgaagatgataagtttgtccctgcagccaccgatgcccaagctgggggcgataattcaagtgttcagaacagaacatacatcgtcacaacaatcctagaagatccttatgtgatgctcaagaagaacgccaatcagtttgagggcaatgaccgttacgagggctactgtgtagagctggcggcagagattgccaagcacgtgggctactcctaccgtctggagattgtcagtgatggaaaatacggagcccgagaccctgacacgaaggcctggaatggcatggtgggagagctggtctatggaagagcagatgtggctgtggctcccttaactatcactttggtccgggaagaagttatagatttctccaaaccatttatgagtttggggatctccatcatgattaaaaaaccacagaaatccaagccgggtgtcttctccttccttgatcctttggcttatgagatttggatgtgcattgtttttgcctacattggagtgagtgttgtcctcttcctggtcagccgcttcagtccctatgaatggcacagtgaagagtttgaggaaggacgggaccagacaaccagtgaccagtccaatgagtttgggatattcaacagtttgtggttctccctgggagccttcatgcagcaaggatgtgacatttctcccaggtccctgtctggtcgcatcgttggtggcgtctggtggttcttcaccttaatcatcatctcctcatatacagccaatctggccgccttcctgaccgtggagaggatggtgtctcccattgagagtgcagaggacctagcgaagcagacagaaattgcctacgggacgctggaagcaggatctactaaggagttcttcaggaggtctaaaattgctgtgtttgagaagatgtggacatacatgaagtcagcagagccatcagtttttgtgcggaccacagaggaggggatgattcgagtgaggaaatccaaaggcaaatatgcctacctcctggagtccaccatgaatgagtacattgagcagcggaaaccctgtgacaccatgaaggtgggaggtaacttggattccaaaggctatggcattgcaacacccaaggggtctgccctgagaaatccagtaaacctggcagtgttaaaactgaacgagcaggggcttttggacaaattgaaaaacaaatggtggtacgacaagggcgagtgcggcagcgggggaggtgattccaaggacaagacaagcgctctgagcctcagcaatgtggcaggcgtgttctacatcctgatcggaggacttggactagccatgctggttgccttaatcgagttctgctacaaatcccgtagtgaatccaagcggatgaagggtttttgtttgatcccacagcaatccatcaacgaagccatacggacatcgaccctcccccgcaacagcggggcaggagccagcagcggcggcagtggagagaatggtcgggtggtcagccatgacttccccaagtccatgcaatcgattccttgcatgagccacagttcagggatgcccttgggagccacgggattgtaactggagcagatggagaccccttggggagcaggctcgggctccccagccccatcccaaacccttcagtgccaaaaacaacaacaaaatgaaacgcaaccaccaccaaccactgcgaccacaagaaggatgattcaacaggttttcctgaagaattgaaaaaccattttgctgtcccttttccttttttgatgttctttcacccttttctgtttgctaagtgaggatgaaaaaataacactgtactgcaataaggggagagtaaccctgtctaatgaaacctgtgtctctgagagtagagtcactggaacactaatgaggaaactgcactgttttattttaattcagttgttagtgtgtcttagtgtgtgcaattttttttcttactaatatccatggtttgcaggttctgttaggccctttccttctccttacttcttatccccaactccctacccacccctcttcagttttcagattggagattcaagatttgttccactttacaagcaagaggaaaaaaaagcaaccttcaaactaattctccatgggggctctccatgttaccctccactccttggcccaaacctctgatggagatagacattgttggagaagtgggctgccttccccaagtggggcactgcttaagcacttattcagtggagaacacaggtgaaaagcaactcaggatgagggtggtggagagggcaggggcagatgtgcagtcagagaaggactcctgaagttactgctgctcagaaaaacagttcctttaatgtggaagagccatttcataggtcataggtggtatggtatatttcttcagagtcaaccttggccctgagaagtatgtcctcctggtgtgctcaggctcaacggcagtctggtggctgaaggcacttggcctcctaaaccaagcagaattttgggaagagataacagccagggagatattgcccatgattctcactttttctttgcctggcatctaagcaggaacccattgtggagtagactctcttcttctatggagcctctgacatggggagcaatgctaagcaagctaagtgtaaaagaaaagtgacagaataattttggaagaggaagcctcatcaaaagctcacacaaaatagagcttcccatggtgtgccctatcctaggtttaagaaaacacgtatgaagtttatgctgatgcaaagaacttgggtttttatgttaatataaagtgttgttttagcatgtggccagatgatgctctgtcatctttagaaagtgagataaccaaggaaataattgaaggagtatagggagatggattaagttgataatgacatttagggcaacttaagacctttgatcccaggttctaactcaaagaggctgaccttcccccagctaagatagcatgaggacgttgtattccaatatacgtatgattggggctacaaagctgaactaaagcaagattggtgaagtggcagggtttatagagagaagcccaggctgagttcagcttttgttggaagtgagaatccctgacatatagctttcttggagatcccaactctcattcttggtgcaactggcttccagctctccagcagtcactctcctaggtgcatgattcagtgcgtgccatgtgtcattagcttttactgataaccatattctggcttgttcccttaccccctacttctatccaattttctctgctaggggttatcattagcaattgacatgctaaaggttttggagcccacctaggggtaggtgcagctttattggcttttctgtggattctctcagtggacccacaccatctctatgtctctccactctcctgccttcagccatagcaaagaatccttccaaaatcaaactcttcacttttttgactcaagtgttgttgttcagtctctcgcgtgtcaatgtggtcatggttcatgaaaccggaccctcaagatggatgattgcttttaactactgccagctgatgtctctcagcccctgccctcatacaagatttttctcagccttcagcctaccactgcagaatccgatgtgacccaccattagggagtctgcatcttggaagagttggaaataaccctttaacatcaacatgcttcaaagactttttgcctttggcctagtaagatgcctctccagctactgagcccacaagtaacatgagcggataaaaagagacttgtttgtgctagaaatgagggtctatgctatgagggggtccaagactctggcgaaatgtgctttttcatcaatggagaaatgaaaggaaaacacaagcaagaaaaaagttaacttgtattatgtatttttactacacttttcttaaaaatagagcattgggaaaactctgaaagagactgacatttttctcaacaggaatccatacttaacagttctggctttcattaaattttgctctttggtacctgggccttttatttaacatctatatttgttttaactctcttggcagatgtgtgaaaggattcttgcttgatcaaacactaagtatttttttggttcttgtttttctttcaaatagccaggtttttttcttttggtatttgcataaaatgaaaatatcaccgaatattaaatcactgtggatccattaaaaaaaaaaaaaaaaaa

SEQ ID NO: 554 - protein, 906 aa, Homo sapiens
MQHIFAFFCTGFLGAVVGANFPNNIQIGGLFPNQQSQEHAAFRFALSQLTEPPKLLPQIDIVNISDSFEMTYRFCSQFSKGVYAIFGFYERRTVNMLTSFCGALHVCFITPSFPVDTSNQFVLQLRPELQDALISIIDHYKWQKFVYIYDADRGLSVLQKVLDTAAEKNWQVTAVNILTTTEEGYRMLFQDLEKKKERLVVVDCESERLNAILGQIIKLEKNGIGYHYILANLGFMDIDLNKFKESGANVTGFQLVNYTDTIPAKIMQQWKNSDARDHTRVDWKRPKYTSALTYDGVKVMAEAFQSLRRQRIDISRRGNAGDCLANPAVPWGQGIDIQRALQQVRFEGLTGNVQFNEKGRRTNYTLHVIEMKHDGIRKIGYWNEDDKFVPAATDAQAGGDNSSVQNRTYIVTTILEDPYVMLKKNANQFEGNDRYEGYCVELAAEIAKHVGYSYRLEIVSDGKYGARDPDTKAWNGMVGELVYGRADVAVAPLTITLVREEVIDFSKPFMSLGISIMIKKPQKSKPGVFSFLDPLAYEIWMCIVFAYIGVSVVLFLVSRFSPYEWHSEEFEEGRDQTTSDQSNEFGIFNSLWFSLGAFMQQGCDISPRSLSGRIVGGVWWFFTLIIISSYTANLAAFLTVERMVSPIESAEDLAKQTEIAYGTLEAGSTKEFFRRSKIAVFEKMWTYMKSAEPSVFVRTTEEGMIRVRKSKGKYAYLLESTMNEYIEQRKPCDTMKVGGNLDSKGYGIATPKGSALRNPVNLAVLKLNEQGLLDKLKNKWWYDKGECGSGGGDSKDKTSALSLSNVAGVFYILIGGLGLAMLVALIEFCYKSRSESKRMKGFCLIPQQSINEAIRTSTLPRNSGAGASSGGSGENGRVVSHDFPKSMQSIPCMSHSSGMPLGATGL

SEQ ID NO: 555 - DNA, 2224 bp, Homo sapiens
tcccgtctccgcagcaaaaaagtttgagtcgccgctgccgggttgccagcggagtcgcgcgtcgggagctacgtagggcagagaagtcatggcttctccgtccaaaggcaatgacttgttttcgcccgacgaggagggcccagcagtggtggccggaccaggcccggggcctgggggcgccgagggggccgcggaggagcgccgcgtcaaggtctccagcctgcccttcagcgtggaggcgctcatgtccgacaagaagccgcccaaggaggcgtccccgctgccggccgaaagcgcctcggccggggccaccctgcggccactgctgctgtcggggcacggcgctcgggaagcgcacagccccgggccgctggtgaagcccttcgagaccgcctcggtcaagtcggaaaattcagaagatggagcggcgtggatgcaggaacccggccgatattcgccgccgccaagacatatgagccctaccacctgcaccctgaggaaacacaagaccaatcggaagccgcgcacgccctttaccacatcccagctcctcgccctggagcgcaagttccgtcagaaacagtacctctccattgcagagcgtgcagagttctccagctctctgaacctcacagagacccaggtcaaaatctggttccagaaccgaagggccaaggcgaaaagactgcaggaggcagaactggaaaagctgaaaatggctgcaaaacctatgctgccctccagcttcagtctccctttccccatcagctcgcccctgcaggcagcgtccatatatggagcatcctacccgttccatagacctgtgcttcccatcccgcctgtgggactctatgccacgccagtgggatatggcatgtaccacctgtcctaaggaagaccagatcaatagactccatgatggatgcttgtttcaaagggtttcctctccctctccacgaaggcagtaccagccagtactcctgctctgctaaccctgcgtgcaccaccctaagcggctaggctgacagggccacacgacatagctgaaatttgttctgtaggcggaggcaccaagccctgttttcttggtgtaatcttccagatgcccccttttcctttcacaaagattggctctgatggtttttatgtataaatatatatatataataaaatataatacatttttatacagcagacgtaaaaattcaaattattttaaaaggcaaaatttatatacatatgtgctttttttctatatctcaccttcccaaaagacactgtgtaagtccatttgttgtattttcttaaagagggagacaaattatttgcaaaatgtgctaaagtcaatgatttttacgggattattgacttctgcttatggaaaacaaagaaacagacacaatgcacacagaaaatattagatatggagagattattcaaagtgaaggggacacatcatatttctgcattttacttgcattaaaagaaacctctttatatactacagttgttcctatctctcccccgccccccaccgccccaccacacacatatttttaaagtttttccttttttaagaatatttttgtaagaccaatacctgggatgagaagaatcctgagactgcctggaggtgaggtagaaaattagaaatacttcctaattcttctcaaggctgttggtaactttatttcagataattggagagtaaaatgttaaaacctgttgagaggaattgatggtttctgagaaatactaggtacattcatcctcacagattgcaaaggtgatttgggtgggggtttagtaattttctgcttaaaaaatgagtatcttgtaaccattacctatatgctaaatattcttgaacaattagtagatccagaaagaaaaaaaaatatgctttctctgtgtgtgtacctgttgtatgtcctaaacttattagaaaattttatatacttttttacatgttggggggcagaaggtaaagccatgttttgacttggtgaaaatgggattgtcaaacagcccattaagttccctggtatttcaccttcctgtccatctgtcccctccctccggtatacctttatccctttgaaagggtgcttgtacaatttgatatattttattgaagagttatctcttattctgaattaaattaagcatttgttttattgcagtaaagtttgtccaaactcacaattaaaaaaaaaaaaaaaaa

SEQ ID NO: 556 - protein, 267 aa, Homo sapiens
MASPSKGNDLFSPDEEGPAVVAGPGPGPGGAEGAAEERRVKVSSLPFSVEALMSDKKPPKEASPLPAESASAGATLRPLLLSGHGAREAHSPGPLVKPFETASVKSENSEDGAAWMQEPGRYSPPPRHMSPTTCTLRKHKTNRKPRTPFTTSQLLALERKFRQKQYLSIAERAEFSSSLNLTETQVKIWFQNRRAKAKRLQEAELEKLKMAAKPMLPSSFSLPFPISSPLQAASIYGASYPFHRPVLPIPPVGLYATPVGYGMYHLS

SEQ ID NO: 557 - DNA, 5760 bp, Homo sapiens
agagagaagatacttcctctcgtagtggacacttgtcttttcagaagatttatacgactgagagtcaaaacttttaccagagactttcatagtcagtttgaattctgcaaaatttctctttatcttctggaatgtatgctctagacttggagtggctcaagctcttcgatgtgatcctatcaatgtcaagagaaagaagcactgaagagtcataattgtgtcctgatttataaatcggagacagagggagacgaaaaccacactccagaaagtagcttaatcggactcactactaagatgttaaaagtgaagaggctggaagaattcaacacgtgttataacagcaaccagctggagaaaatggccttttttcagtgcagggaagaggtggagaaagtgaagtgttttctggaaaaaaattctggggaccaggattcaagatctggacataatgaggcgaaggaggtgtggtcaaacgccgacctgacggaaaggatgcccgtcaaaagcaaaaggacatcagccctcgcagttgacatcccggctcctccggccccatttgatcatcgtattgtgacagccaagcaaggagcggtcaacagcttctatactgtgagcaagacagaaatcctaggaggagggcgtttcggccaggttcacaagtgtgaggagacggccacaggtctgaagctggcagccaaaatcatcaagaccagaggcatgaaggacaaggaggaggtgaagaacgagatcagcgtcatgaaccagctggaccacgcgaacctcatccagctgtacgatgccttcgagtctaagaacgacattgtcctggtcatggagtatgtggatggtggggagctgtttgaccgcatcatcgatgagagctacaatttgacggagcttgataccatcctgttcatgaagcagatatgtgaggggataaggcacatgcatcagatgtacattctccacttggacctgaagcctgagaatatcctgtgtgtgaatcgggatgctaagcaaataaaaattattgattttggattggccagaagatacaaacccagagagaagctgaaggtgaactttggaaccccagaatttctcgcccctgaagttgtgaactatgattttgtttcatttcccactgacatgtggagtgtgggggtcatcgcctatatgctacttagcggtttgtcgcctttcctgggtgacaatgatgctgagacgctgaacaacatcctggcctgcaggtgggacttagaggatgaagaatttcaggacatctcggaggaggccaaggagttcatctctaagcttctgattaaggagaagagttggcgaataagtgcaagcgaagctctcaagcacccctggttgtcagaccacaagctccactccagactcaatgcccagaagaagaagaatcgtggctctgatgcccaggactttgtgaccaaatagtctacaggaggcagccatttggaaggaaaactgctgtggttgctgctgcttcgagaaaattttttgaaaaatcagcagttctgatgccttgacccctgtgatgacctggtagtcttagcagggggagccctcgaccctgaatgtgaacttgaactggagtgcctctgctgcgctcagaggaacacccagcgctgcggtctggtctcagggcgcaaacacatccctgcacccggtggtggtgatgttgggaagatgtttccctgccatcttgagattttttacttttttaaaaaaattttttgatcttagtcactggggcagggggtgcattatgtctgccatttctcaaatgactacagctgtgacacttaagattgattggagattttaaaactggaggatgcatttagagggagaaagctacttccagccattagactatgcctttggaaggggcaattagatggccagaaagaattctgactcccatgcacccttggagacttagtttcacagactctgtcattttgatttggtctgtggtcacgtgactacaatggataaataatttgtttgctggaacagaagccgtctttgaattctccaacaagaggcatcagccactgtgtctttcatttattctgaattgtccccagcgtgcgttttcttccatgtagctgattctgtttttcacatctatactccctgcacccttctgactgacagttcatccccacaaaacacattggttttgagaggtgatgcaaaaagtatctgtttatggttggactttgaaattctgacctttgaaataatgtcaacagtcacaacaggtttcctcaagccccatttgtcaactaaaagagacggatctgcacctcctggagcaagatagcactgagctttcaacattgaagtgacttgggaaataacattcaagcttctgggtaaacacatacaaacagtggcaaagaccaagtacagtctctcgcctgtgctgtctcatgggactcaatggtggtgaagaaatctcaatcggacaccagaggtgggggcaactctgcaagctcacctgctggacgtgagaatgttggaacgttccagttggaaggttcctatgcctagcctgtgtgccatttcatggcagatatgtaagaaaggaaatggccctactgtagacagcttatggggcccagaaaggcactgggctttaaagagcgaaatgagtgtgtcatttccacatgaaggagaggcaaggaaaagccccacaaaattcctgttacccgctgaactccaagctcaccaaccagattcatgagctttctcacattttccatttccaaataactgttgtgttgaatcagctgtgttaatgcctttattctttgttttttttttttagacggagtctcgctctgtcacgaggctggagtgcagtggccccatctcggctcactgcaacctccgcctcccaggttcaagcgattctcctgcagcctcccgagtagctgggattacaggcgcacgccaccacgcacggctgatttttgcatttttagtagagatggggtttctccatgttggccagaatggtctcaattactgttgtcgcaatagcaatgaaaggcataagaattacttggtggcctcatgagggatggcagtttcactttgcatcagctttcccccattatctctcagatccacttaaggaatccttacagcatgccgtgaatgtgtgcaacatccttattctcatctttaaggtaaggaggaagtagagatagaaggaaatacgtgatttggtgaaggccacatgcgaattttgtggtcgtgttagttataaaactgactcctttccagcctttgctcttacattatgatgcgtttctttttctcctttggccttgcatttatccgaggttggtttcttatgttcctgtgatgtgactatgcttaagtgtttaatttagtttgcttaaaacacacacaccacacacacacacacacacaaaaccctgtgactggagtgttatattactatgctatctttagctgatgatattcattgagcctggaaaaatacaagccagtgcatgcattaatacttagttagaccgcagagagctggcattcactcaaatgctaaacaggacacaggggtctgatttgaagcccctcgtggcagggcgttttctgtcctgtggtgtgcattctctaccaaatcaagcaggagatcttttgcacgacgtgcaatttgcatccaccttcccttctgactcaggttggcagataaactgtccccagaccctgccacacatggaagagacagctcaggccaaatacaggcatgatttctttgccaagttaatgcactgatgaccctgcagtgagtgggtgtgatttttgttttgttttgaggtttagaaaggagactgtactttgaaaatggatcttgtttgattctgtagttaaatttccacatttggaatgggaaggcatctccatgccagcagggtgccttttatatgagtgctgagggtagtttgcattgcagagttcatgattacagtctagagttacttgaaatgggagattatcagtctagtgttcatcccgcccctgctccatgtccttgtgtggctgctccagcgagagctggtaactaggtagactgctgctctaatggggaaagggggctttgcaaagccgaggaatcaagccagatgcgagcatggactcagaaaagctgagtctggctagaccagggctatggagatcaatttttccaacaggtcattaggatttgggaggctgtatttctcctccaccctcttaatggatggtatggctttgctcactcactaggcagttcccactttctttagcaaatggaggaaattaagcaccgatgtagcacttcccactgcctggagagaaataaacctcgcaagttattaaggagaaggcatgcctcattggtaatttggaagacaccaacacttacccagaatctgttgctatttaaaaatcagggagaggagggcacatgtccccatttgctacattacaaactttggacgagactctcatctgaactaacttggggaaacaatttctaggttgaagctggtaacactcatgtctgttgagtgccataagtttgttttcagttatttcctctaacttgatattaatttgctttctttcctcaaaaatgtaagtaggcatgttgccattgttgtggcttgctttgatgtatgtttggaaagatgtgtgaatacttaatttttatccattttatggaaattagcttagcaatttttttttctcttttaagaatcaaaatatggatttgatactaggaacagaatctgctctttatttcattccttttttgtctcttctgcttcctctgcccctcccccagccacgcagcacgggtgccagtgtgcatgcgtgtgctgggggccaaatgacagaaccccggttgaaagtccgcttgtaaaagcacaagtgagaggcagcatcaggcccctggagggctgtggtcctcggactcggttctttcctgtcccctggccgtcctgtcatccctgtgtgctgcagcatcaccacggcctacttcccaatatccacaaagcttcgcctttgcttttgcactctcttttacatttttttacttctttcctttttcttaagttcggatccaagtttgtcttcttatccatcaccatgctccctgaaagcctttttgagattaagaaattttcttaccaggaggcaactttccgtctgtcctaaagggaagtgggtgctggatttattagatattgggttcctggattaagatgacttcctcacatagcttggagtctgcagtttctcagttagaagtgttctatatttctttttgctccattttagtgcgctgtgctttgtataagtggtctttctatgggcagtttcaccttccatgaaggcttataactcaaccactactacccattcagaagagcagaaagcatctgctgtgtgagcgttcatatgttacctaatgtgtattttgctgtcgtctcagctgatagatgtcagtgagtctttctgactaggtttattggtgttgataagaaattaaaaaaaggattcataacgtggtgattgtgtctatcatgtatattttaaatttctgaacgtactttcatttagctgtttttctttgctttctaaagatgtataacaatcatgtatatgtattatattgaagaataaacatggaccttatttatcttttga

SEQ ID NO: 558 - protein, 388 aa, Homo sapiens
MLKVKRLEEFNTCYNSNQLEKMAFFQCREEVEKVKCFLEKNSGDQDSRSGHNEAKEVWSNADLTERMPVKSKRTSALAVDIPAPPAPFDHRIVTAKQGAVNSFYTVSKTEILGGGRFGQVHKCEETATGLKLAAKIIKTRGMKDKEEVKNEISVMNQLDHANLIQLYDAFESKNDIVLVMEYVDGGELFDRIIDESYNLTELDTILFMKQICEGIRHMHQMYILHLDLKPENILCVNRDAKQIKIIDFGLARRYKPREKLKVNFGTPEFLAPEVVNYDFVSFPTDMWSVGVIAYMLLSGLSPFLGDNDAETLNNILACRWDLEDEEFQDISEEAKEFISKLLIKEKSWRISASEALKHPWLSDHKLHSRLNAQKKKNRGSDAQDFVTK

SEQ ID NO: 559 - DNA, 1880 bp, Homo sapiens
cgccgccccgctgccccgaacgcgggccatacgcagcctccttggagtgacgggccgaccccggacgaccccggccacggacagacccgggacgaccccggccggggcgcgcctcctgcgggcgggcgggcggcggggctggggagcccttggcgggggcatgcgtgcgacatggcctcggcggtgtttgagggcacgtcgctcgtgaacatgttcgtgcgcggctgctgggtgaacggcatccgcaggctcatcgtcagccggcgcggcgacgaagaggagttcttcgagatccgcacggagtggtcggaccgcagcgtgctctacctgcaccgcagcctggcggacctgggccgcctgtggcagcgcctgcgcgacgcctttcccgaggaccggtccgaactggcgcaggggccgctgcggcaaggactggttgccataaaggaagcccacgacatagagaccaggcttaatgaggtggagaagctgctgaagacgatcataagcatgccctgtaaatattctagatcggaagttgtgctcaccttcttcgaaagatctcctctggatcaggtgttaaaaaatgataatgtgcataaaattcaacccagctttcaaagtccagtcaaaatatcagaaatcatgaggtccaatggattttgtttagcaaataccgaaacaatagttattgaccacagtataccaaatggaagagaccagcacctgggcgtggacccaacagagcatttatttgagaatggcagtgagtttccctcagagctggaggacggggacgacccagcagcctacgtcaccaacctgtcatattaccacctggtccccttcgagacagacatttgggactgaacctctctatcaggcctcccccgcctcagctgttcactgccagctctgatgctgtccactgtgctggcccccatggtcacagctgctgacccagctctggaactcccagacgtcccaggccccactgacgccaggaggcctgggtgtcctgcaagtggagcagcaggggctcctagtgggccaggctgaccgcagagtctccagcaagctgaggtcacagccggaggccacagggcctgtgttctgagggtcttcactccctgcttggtgcccacagggctgcgcactgccagggcagggacagttcctgtggggctcgctctcactgctactgcttcctgggaggtgcatccctcttggtgaagtggcctagtgccccccagccaccctgactccccaccattccctcccacggcaaacgcacaaaacgtcttgagggagattttgacaagtcacccattccaggtgccacaggcaggggatgtttagtaatccaggatttctctgagaactgggatatgtggcctttttttttttctttttatcttttatctggaaactgggtttgggtcaaccccaggagtatttgcagaaggcccagcacagtggggggtattggctgcagggcagggaaggcattgccgactagataaccgtgtgagcttggactgagcgttggtggttcttcccaaaggaaaggaatttctcccggcctgccaggtctctgggccttcagcgcgggtcctggtgctgcggccacaccaccctggggtgctcattgacagagctgccataatgaacttgaaaggacgggaatcacgagggaagctggggctcccctgcccacaggagaggatccccgttcttcaagcttctctgctcagtgtctactaacgaccgacatttgctaatgtaaataatagtaaattattgagaattctaattcttttacacagtctgtttttaatctattttaattaaataaaatctatgactctaaaaaaaaaaaaaaa

SEQ ID NO: 560 - protein, 231 aa, Homo sapiens
MASAVFEGTSLVNMFVRGCWVNGIRRLIVSRRGDEEEFFEIRTEWSDRSVLYLHRSLADLGRLWQRLRDAFPEDRSELAQGPLRQGLVAIKEAHDIETRLNEVEKLLKTIISMPCKYSRSEVVLTFFERSPLDQVLKNDNVHKIQPSFQSPVKISEIMRSNGFCLANTETIVIDHSIPNGRDQHLGVDPTEHLFENGSEFPSELEDGDDPAAYVTNLSYYHLVPFETDIWD

SEQ ID NO: 561 - DNA, 882 bp, Homo sapiens
atggcccgcgttcggggcagcggggcggcgcggcggcgagtggctcgggccggccgggcgcggctttataaggcgcttcccatcgcgggcggcgcggtagtcgacgtcgaggttaggccgcgtccgcctcccgcccgcctcccgcggaacgggcgccgcgggccgctctggaaaggaagaggtccggctggccgcgcccccgccgcctccgcagagaccgcgctgccgcggccacgagaacccccggagccgggagccgggccgagtcccaagcgctcgcccccgcctcgcgccccccgcgcctcctccctcgcggccccggagccgcaggagctgcgcgccccacccggcccgcgaggggatggcaactacccggggtccggaggcggggctgcgagtgtcggggcggggggcgcgggccgggtcgagcaccgccccgacgagggcccaggccagtccggcccgccccgggttccctccgtgcctcaggtcccctccgtgccccgcgtcctcccgcgcattccggtcatgcctcagccgcgccaaggcctgggacacggccggacagaccgcggggcagccctcggagaagtgggaagaggggagaaaacagtggcgaaaagaaggtctcctgggaaggagcgccctgggaagctggacgcgcgctctggaaagcctcaaagcccagcgctgcgcggaaatgttagaggcccaaggcaggtggcctgtctggactcagacccgacccagatgtccccccaggtccctaccactcagtcccacctgcctcgactcagtcccgacccagatgaccaccccccccccgcccccaccacgaccaacttttattccgactgcgccagtgacttgcagatagcatag

SEQ ID NO: 562 - protein, 293 aa, Homo sapiens
MARVRGSGAARRRVARAGRARLYKALPIAGGAVVDVEVRPRPPPARLPRNGRRGPLWKGRGPAGRAPAASAETALPRPREPPEPGAGPSPKRSPPPRAPRASSLAAPEPQELRAPPGPRGDGNYPGSGGGAASVGAGGAGRVEHRPDEGPGQSGPPRVPSVPQVPSVPRVLPRIPVMPQPRQGLGHGRTDRGAALGEVGRGEKTVAKRRSPGKERPGKLDARSGKPQSPALRGNVRGPRQVACLDSDPTQMSPQVPTTQSHLPRLSPDPDDHPPPAPTTTNFYSDCASDLQIA

SEQ ID NO: 563 - DNA, 2408 bp, Homo sapiens
aaataaacgtggcgggacgtatgtgtcatggcgctctccatctaaagtctgtgcagcttccggagagtggcgggttgattttctcactttggactggtttttacttcccgacttctggactcatctttcaagaggactttagactaattgcagataattaaggtggtagagaatatgccttctgcatcctgtgatacactactggatgacatcgaagatatcgtgtctcaggaagattcaaaaccacaagataggcattttgtaagaaaggatgttgtcccgaaggtacgaaggcgaaatacccaaaaatatttgcaagaggaagaaaacagtccaccaagtgacagcactattccaggcatacagaaaatttggatacgaacatggggttgttctcataataattcagatggagaatatatggctggacagctagctgcttatggctataaaattacagaaaatgcatccgatgcagatttatggctcctgaacagttgcactgtaaaaaacccagctgaagaccactttagaaactcaattaaaaaagctcaagaggagaacaagaaaatcgtactggctggatgcgttcctcaagcccagcctcgccaggactaccttaagggactgagtatcattggggttcagcagatagatcgtgtggtagaagttgtggaggagacaattaaaggtcactctgtgagactgctgggtcagaaaaaggataatggaaggcggcttgggggagcacgattggatttgccgaagattaggaagaatccactgatagaaatcatttccatcaataccgggtgtctcaatgcttgtacctactgcaaaactaaacacgccagaggaaatttggccagttatccaattgatgaactagtagatagagccaaacaatcttttcaagagggtgtttgtgagatatggttgaccagtgaagacacgggggcttatggcagagatattggcaccaatctccccacactcctgtggaaactggttgaagtgattcctgagggagcaatgctgaggcttggcatgacaaatccgccctatattttagagcatctggaggaaatggcaaaaatccttaatcaccccagagtctacgcttttctgcacataccagtccagtctgcctccgacagcgtactcatggaaatgaaaagagaatactgtgtggctgacttcaaaagagtagtggattttctgaaagagaaagttcctggaataactattgctacagatattatctgtggttttcctggagaaacagatcaggattttcaagaaacagtgaaacttgttgaagagtacaaattcccaagcctgtttattaaccaattttacccaagaccaggaactcctgctgcaaaaatggaacaagttccagcacaagtgaaaaagcaaaggacaaaagatctttctcgggtgtttcattcttacagtccatatgatcacaagattggtgaaagacaacaagtgttagtaacagaagaatcttttgattccaagttttatgttgcacacaatcaattctatgagcaggttttagtgccaaagaaccctgcgttcatggggaagatggttgaagtggacatctatgaatcaggcaaacattttatgaaagggcagccagtatctgatgccaaagtgtacacgccctccatcagcaaaccgctagcaaagggagaagtctcgggtttgacaaaggacttcagaaatgggcttgggaaccagctgagttcaggatcccacacctctgctgcatctcagtgtgactcagcgagttccagaatggtgctgcccatgccaaggctacatcaagactgtgcgctgaggatgtccgtgggcttggctctgctgggtcttctttttgctttttttgtcaaggtctataattagaatacaactaatggaaacatctataaagaagaatacatttctaattaaaatcttcaatgaacaggaaagcgacatctccattctccaagggcaataatttgtactggtcatgctgcctccttctcagccactcttcttaatgaggctccccctgtctcacattgagttgggcccattggttatttgacctaaaacctaatcaccgctaccatagcacatccttcaaattaaactgcttttggtttacttttagcaagaaatgcaagcggttgcatttttttctgtttgtttcaatctctaatctttaagtcagaacctaattgtacagtggctctggccatcttttcctcatgtggaagaattttctatctttaataaactttttctttgttttttttttccagatggagtttcgctcttgtcccccaggctggagtggtgcagtggcacgatctcaggtcactgcaacctctgcctcctgggttcaaacgatt

SEQ ID NO: 564 - protein, 579 aa, Homo sapiens
MPSASCDTLLDDIEDIVSQEDSKPQDRHFVRKDVVPKVRRRNTQKYLQEEENSPPSDSTIPGIQKIWIRTWGCSHNNSDGEYMAGQLAAYGYKITENASDADLWLLNSCTVKNPAEDHFRNSIKKAQEENKKIVLAGCVPQAQPRQDYLKGLSIIGVQQIDRVVEVVEETIKGHSVRLLGQKKDNGRRLGGARLDLPKIRKNPLIEIISINTGCLNACTYCKTKHARGNLASYPIDELVDRAKQSFQEGVCEIWLTSEDTGAYGRDIGTNLPTLLWKLVEVIPEGAMLRLGMTNPPYILEHLEEMAKILNHPRVYAFLHIPVQSASDSVLMEMKREYCVADFKRVVDFLKEKVPGITIATDIICGFPGETDQDFQETVKLVEEYKFPSLFINQFYPRPGTPAAKMEQVPAQVKKQRTKDLSRVFHSYSPYDHKIGERQQVLVTEESFDSKFYVAHNQFYEQVLVPKNPAFMGKMVEVDIYESGKHFMKGQPVSDAKVYTPSISKPLAKGEVSGLTKDFRNGLGNQLSSGSHTSAASQCDSASSRMVLPMPRLHQDCALRMSVGLALLGLLFAFFVKVYN

SEQ ID NO: 565 - DNA, 1712 bp, Homo sapiens
aaaaggggctgaaatcctggggacctcagagtcgtctaaaactcctagccatgttccagcagttccaggcctcctgtcttgtcctgtttttcctggttggctttgctcagcagaccctaaagcctcaaaataggaaggtggattgcaacaaaggggtaacaggcaccatctatgagtatggagccctcaccctcaacggcgaggagtacatccaattcaagcagtttgcaggcaagcacgtcctgtttgtcaatgtggccgcctattgaggcttggcagctcagtatcctgaactgaatgcactacaggaggagctgaagaattttggtgtcattgtgttggcctttccctgcaaccagtttggaaaacaagaaccaggaacaaactcagaaatacttcttggtctcaagtatgtgtgtccaggtagtggctttgtccccagtttccagctctttgagaaaggggatgtgaatggagaaaaagaacagaaggtctttactttcctgaagaactcctgccctccgacctctgatcttttgggctcatcaagccaactcttctgggagcccatgaaggtccatgatatccgctggaactttgagaaatttctggtggggcccgatggagtccctgtcatgcattggttccaccaggctccagtcagcacagtcaagtcagacatcctggagtacctaaagcagttcaatacccactaggaagggctagcgactgacagaaataactaccctgtctcccacctgcaggaatgtctaacaaagcatccatcttcctccttctttgctccacactcgtgcctacccagcctcctgatgaccaaaccatcctgtactacccaagcacctgcttagcatgtgtgtgtagctgtgtgtgtgtgtgtgtgtgtgtgtatggatatgtagaattgtatttgttggtatatgcataggtgtatgtatggtgtgtgtgtgtgtgtgtgtgtgtgtgtttgaagattaaggaaaagaacacctatctctccaactctctgatcctgaaatatctattccaaaggaaaatcatattttagggtagatgaatcagactatcctgtgtccctaaaaaagcaatcccgagaagttgtgacatctatcccttccccttcctgaaagttttaaagaaagcaggagctggccgcaagactctaggcctccttcatagcctctctcctctaagataggcatgcattgttaaactcttttctccttaattctcctttattcccctgccacccagtagttctcatgtaggacctctgaaggcagagtgagagcagaaaccccacctcacatgaagggaagggcatctccatgatggtggatcccaaaacccctctgggtcgcaccctgccagagccttccttggtgcctgtcccttagtgcattcaggtcatggcacctgggcaggggtgtccctgtattctgaatgatgggctttctcctcaccctgagcctcctcaactttaagcttattttgatcactgtctcaaatttaaaaattctgcagcaacctggctctgtgtggtgttttcccagtcccatattatgtccagtcatacttcttctttctctgtcactttgtccctgctttcttgattcccttgtcttgttcttcagtattttgtttttctcaaaaatgctctagaactttccttggcacatataaaagcacggctg

SEQ ID NO: 566 - protein, 221 aa, Homo sapiens
  MISC_FEATURE 73: Xaa may be selenocysteine
MFQQFQASCLVLFFLVGFAQQTLKPQNRKVDCNKGVTGTIYEYGALTLNGEEYIQFKQFAGKHVLFVNVAAYXGLAAQYPELNALQEELKNFGVIVLAFPCNQFGKQEPGTNSEILLGLKYVCPGSGFVPSFQLFEKGDVNGEKEQKVFTFLKNSCPPTSDLLGSSSQLFWEPMKVHDIRWNFEKFLVGPDGVPVMHWFHQAPVSTVKSDILEYLKQFNTH

SEQ ID NO: 567 - DNA, 668 bp, Homo sapiens
tcatgactacacagttaagggtcgtccatctgcttccccttctcctagcctgctttgtgcaaacaagtcccaagcaggagaagatgaagatggattgccacaaagacgagaaaggcaccatctatgactatgaggccatcgcacttaataagaatgaatatgtttccttcaagcagtatgtgggcaagcacatcctcttcgtcaacgtggccacctactgtggtctgacagcgcaatatcctgaactaaatgcactccaggaggagctgaagccctatggtctagttgtgttgggctttccctgcaaccaatttggaaagcaagaaccaggagataacaaagagattcttcctgggctcaagtatgtccgtccagggggaggatttgtacctagtttccagctttttgagaaaggggatgtgaatggtgaaaaagaacagaaagtcttcagtttcttgaagcactcctgtcctcatccctctgagattttgggcacattcaaatctatatcctgggaccctgtaaaggtccatgacatccgttggaactttgaaaagttcctggtggggcctgatggaatccctgtcatgcgctggtcccaccgggctacggtcagctcagtcaagacagacatcctggcgtacttgaagcaattcaaaaccaaatag

SEQ ID NO: 568 - protein, 221 aa, Homo sapiens
MTTQLRVVHLLPLLLACFVQTSPKQEKMKMDCHKDEKGTIYDYEAIALNKNEYVSFKQYVGKHILFVNVATYCGLTAQYPELNALQEELKPYGLVVLGFPCNQFGKQEPGDNKEILPGLKYVRPGGGFVPSFQLFEKGDVNGEKEQKVFSFLKHSCPHPSEILGTFKSISWDPVKVHDIRWNFEKFLVGPDGIPVMRWSHRATVSSVKTDILAYLKQFKTK

SEQ ID NO: 569 - DNA, 550 bp, Homo sapiens
tcatgactacacagttaagggtcgtccatctgcttccccttctcctagcctgctttgtgcaaacaagtcccaagcaggagaagatgaagatggattgccacaaagacgagaaaggcaccatctatgactatgaggccatcgcacttaataagaatgaatatgtttccttcaagcagtatgtgggcaagcacatcctcttcgtcaacgtggccacctactgtggtctgacagcgcaatatcctggtatgtccgtccagggggaggatttgtacctagtttccagctttttgagaaaggggatgtgaatggtgaaaaagaacagaaagtcttcagtttcttgaagcactcctgtcctcatccctctgagattttgggcacattcaaatctatatcctgggaccctgtaaaggtccatgacatccgttggaactttgaaaagttcctggtggggcctgatggaatccctgtcatgcgctggtcccaccgggctacggtcagctcagtcaagacagacatcctggcgtacttgaagcaattcaaaaccaaatag

SEQ ID NO: 570 - protein, 100 aa, Homo sapiens
MTTQLRVVHLLPLLLACFVQTSPKQEKMKMDCHKDEKGTIYDYEAIALNKNEYVSFKQYVGKHILFVNVATYCGLTAQYPGMSVQGEDLYLVSSFLRKGM

SEQ ID NO: 571 - DNA, 4895 bp, Homo sapiens
gagcgtggctcaccgggcccggccggaacctacgggcacagctgcgggtgtgtctgcggaacctccacctgagctgtagagtgtttccctcgacccactagtctgggttccacagggtctgagctcctcagaggtgggagctgcggccgagggaagggtgcatgtgcgcggcgacaatcgggcctcttccccaggcagcttgtgagcccctctccctctccgccctcgcccaggctgctccgatcttcgtttccttgcctaggctcatacacccaggctttatttagggccaaagtatccgtcataacctcggttttctgtctcgcaagtatcttgccgctcaatttgtgaccctgaagctttagtgagtcgctctgtgctcactatttctggtcttttcagaggatggcttcactttcaatggaattgcccgagtaactgccctgtgttgtcacgtaaacaagtccttttaaactgagtctgtagttgtcctgtgttgagtgttttcttatatcaaaaactttcctgaccaagaacaaaaaaggagctcaagtaaaatcacccatttgcctagaccccaactggagagaacctttgcctgagctgtctaagctcgggatggaagcagtctctagggtcttcccagccttggctggccaggctccagaagaacaaggggagattatcaaagtaaaggttaaagaagaagaccacacttgggatcaggaatcagccctacgtaggaatttgtcttataccagggaactctctcgtcagcgcttcaggcagttctgctatcaggagacacctgggcccagggaggctctgagtcaactgcgggaactttgccgtcagtggctgaacccagagatacataccaaggagcagatcctggaattgttggtgctggagcagttcctgaccatcctgcctgaggagctccagtcttgggtgcgggagcataatcctgagagtggagaagaggtggtgactttgctggaagatttggagagggagcttgatgaacctagacagcaggtctcacagggcacatatgggcaggaagtttctatggaagaaatgatccctctggattctgcaaaggagtctttaggcacccagcttcagtctatggaagatagaatggaatgtgaatctccagagccacacccacttcaagataatgggtcatttttgtggttttccatgatgtctcaaagcatgggtggtgataacctcagtagcttagatactaatgaagcagaaattgaaccagaaaacatgagagaaaagttcttcagaagcttagcaaggttactggaaaacaaaagtaataatactaagatattttctaaagcaaagtactgtcagttgataaaggaagtgaaagaagctaaagctaaggcgaaaaaggaatcagttgactaccgtcgcttggctagatttgatgttatccttgtacaaggaaatgagaagctaattgaggctgtaaatggggaaacagataaaatacggtattacttacacagtgaggacttatttgacattctgcataatacacatctcagcattggacatggtggacgtactcgcatggagaaagagttacaagcgaaatacaagaacatcacaaaagaagttataatgctgtatctgaccctctgtaaaccatgccaacagaaaaattcaaaactcaagaaggttctaacatcaaaatcaattaaggaagttagttcaagatgccaagtagatcttatagacatgcagttgaatcctgatggggagtacagatttattttgcattatcaagatctctgtacaaagttaacttttttgcggtcattaaagtctaaaaggcctacggaagttgcacatgctcttttagatatatttacaattattggagcacccagtgtcctacaatctgacaatgggagggaattttcaagccaggttgtcagtgaactcagtaatatttggccagaattgaaaattgtccatgggaagtctcagacctgccaaagccagagttctgcagaacaaactgaggatatccgaaagaggattttctcctggatgcaaactaacaactcatcacactggactgaatttttgtggttcattcagatgtcccaaaatcagccctatcacagaagcatgcaacagactccatgtgaaagtgcatttagctctgaagctaaactgggcttgtcccattctcagctaactgaagaacttgttgccagcttgcatacagaaaatgaattagatcaggctgacaaagagttagaaaatactttaagagcccagtatgaagaaaacattgagactggaacagacagtagtgatattgaagagaatctttctgtcactcctaaggtggctgaaaaaagccctcctgagagcagactaagatttttatcctgtgtagtttgtgaaaaagaatgcacaggtgttaatagttgtatatcatgtgatggaaatatccatgcaatttgtggagtgccctctcaacatgggactgagggctgtggtcggcaaataacttgtagcctttgctatgaaaccagcacaatgaagaggaaacatgatgagattcaaagaagtttgcctgttaaaccttccaaaatgctaaagccatcagggacaccattttcaccagacaaagtaggagactggatggcgaaacaagcttcactggacttttttgtcaagaaaagacatgccttttctgaacacagtagtagtaataaaagaaatgttaacaatagaagttatcctgaagaagggaaaaccaaaagagttcatgctagtttcactcggaaatatgatccttcatatattgagtttggttttgtagctgtaattgatggtgaagtactaaaaccacagtgtattatttgtggagatgtactggctaatgaagcaatgaaaccatcaaaacttaagcgacatttatattcaaaacataaagaaataagttcacaaccaaaagaattctttgaaagaaagagtagtgaattgaaaagccaaccaaagcaggtgttcaacgtttctcatataaacattagtgctttgcgggcttcatataaagtagcacttccggttgccaagtctaaaacaccatacacaattgctgagacactagtgaaagactgcatcaaagaagtttgcttggaaatgttgggtgaatctgcagcaaagaaggtagctcaggtaccactttccaatgacaccatagctcgacgtattcaggaactggctaatgatatggaagatcaactcatagaacaaataaaactagcaaagtatttttcattgcaacttgatgaatgcagagatattgctaacatgataattcttttagtctatgtgaggtttgaacatgatgatgatataaaggaagagttctttttttcagcctctttgcctacaaacacaactagctcagaactgtatgaagctgtaaagaattatattgttaacaaatgtggtttggaatttaaattttgtgtaggagtatgttctgatggtgcagcttcaatgacaggaaaacattctgaagtggtaacccagattaaggaacttgcgccagaatgtaaaacaacacattgcttcattcatcgagaaagtcttgccatgaaaaaaatatcagctgaactaaatagtgtacttaatgatatagtaaaaattgtgaattatataaaatctaattcattgaattcaagattattctctttattatgtgataatatggaagctgatcataagcaactgttactgcatgctgagatacggtggttatcacggggaaaagttctgtcaagaatgtttgaaatacgaaatgaactcttagtgtttctgcaaggcaagaaacccatgtggtcccaactttttaaagatgtgaattggacagccagacttgcttatttgtctgatatcttcagtatttttaatgatcttaatgcttctatgcaagggaagaatgcaacttatttttcaatggcagataaagttgaaggacaaaaacagaagttagaagcttggaaaaacagaatttctacagattgttatgacatgtttcataatttaacaacaattatcaatgaagtaggtaatgatcttgatattgcacatctgcgaaaagttatcagtgaacatcttacaaatttgttagaatgttttgaattttattttccatcaaaagaagatccacgcataggaaatttgtggatccaaaatccatttctttcatcaaaagataacttaaatttaactgtaactctacaggataagttgttgaagctggctaccgacgaaggattgaaaatcagttttgaaaatacagcatcacttccttcattttggataaaagctaaaaatgactatcctgagcttgctgagattgctttaaaattgctgcttcttttcccctcaacatacctctgtgagaccggattctctactttaagtgttattaaaacaaaacatagaaacagtttaaatatacattatcccctgagggtagcattgtcatcaatccaacctagattagacaaattaacaagcaagaagcaagctcacttatcacattaaaagctttaaatattgatatgtaaggtattggttcaaagtatgcatataagcattgagtgtgaggaatttgctatttcactttaaactttctgtctagttacagttatggaagtatgagaagttatgagtgaaacagcaattttctatataaattgcctatatgtatattttcaattaagaatgtgtacagtttttataattctatttttcctcatatttgtcgtatttattaaaatataattttaaatctgttgattctaatattaaaacatttgatcttaaaaaaaaaaaaaaaaaaa

SEQ ID NO: 572 - protein, 1325 aa, Homo sapiens
MEAVSRVFPALAGQAPEEQGEIIKVKVKEEDHTWDQESALRRNLSYTRELSRQRFRQFCYQETPGPREALSQLRELCRQWLNPEIHTKEQILELLVLEQFLTILPEELQSWVREHNPESGEEVVTLLEDLERELDEPRQQVSQGTYGQEVSMEEMIPLDSAKESLGTQLQSMEDRMECESPEPHPLQDNGSFLWFSMMSQSMGGDNLSSLDTNEAEIEPENMREKFFRSLARLLENKSNNTKIFSKAKYCQLIKEVKEAKAKAKKESVDYRRLARFDVILVQGNEKLIEAVNGETDKIRYYLHSEDLFDILHNTHLSIGHGGRTRMEKELQAKYKNITKEVIMLYLTLCKPCQQKNSKLKKVLTSKSIKEVSSRCQVDLIDMQLNPDGEYRFILHYQDLCTKLTFLRSLKSKRPTEVAHALLDIFTIIGAPSVLQSDNGREFSSQVVSELSNIWPELKIVHGKSQTCQSQSSAEQTEDIRKRIFSWMQTNNSSHWTEFLWFIQMSQNQPYHRSMQQTPCESAFSSEAKLGLSHSQLTEELVASLHTENELDQADKELENTLRAQYEENIETGTDSSDIEENLSVTPKVAEKSPPESRLRFLSCVVCEKECTGVNSCISCDGNIHAICGVPSQHGTEGCGRQITCSLCYETSTMKRKHDEIQRSLPVKPSKMLKPSGTPFSPDKVGDWMAKQASLDFFVKKRHAFSEHSSSNKRNVNNRSYPEEGKTKRVHASFTRKYDPSYIEFGFVAVIDGEVLKPQCIICGDVLANEAMKPSKLKRHLYSKHKEISSQPKEFFERKSSELKSQPKQVFNVSHINISALRASYKVALPVAKSKTPYTIAETLVKDCIKEVCLEMLGESAAKKVAQVPLSNDTIARRIQELANDMEDQLIEQIKLAKYFSLQLDECRDIANMIILLVYVRFEHDDDIKEEFFFSASLPTNTTSSELYEAVKNYIVNKCGLEFKFCVGVCSDGAASMTGKHSEVVTQIKELAPECKTTHCFIHRESLAMKKISAELNSVLNDIVKIVNYIKSNSLNSRLFSLLCDNMEADHKQLLLHAEIRWLSRGKVLSRMFEIRNELLVFLQGKKPMWSQLFKDVNWTARLAYLSDIFSIFNDLNASMQGKNATYFSMADKVEGQKQKLEAWKNRISTDCYDMFHNLTTIINEVGNDLDIAHLRKVISEHLTNLLECFEFYFPSKEDPRIGNLWIQNPFLSSKDNLNLTVTLQDKLLKLATDEGLKISFENTASLPSFWIKAKNDYPELAEIALKLLLLFPSTYLCETGFSTLSVIKTKHRNSLNIHYPLRVALSSIQPRLDKLTSKKQAHLSH

SEQ ID NO: 573 - DNA, 216 bp, Homo sapiens
atgcctcgcctacccgggctctgtcctcaactctgccaccaccgctgcgtggccctgctcgccctgcagcccgacccctgccttgcccactctgagcctccgcgccagcccatgtatgccatggaaatatggctgttggaattctggtgttttacgaccttcttaacaccgtctgcgtatgtgctaagcagtctgagccagttcagaaaggagtaa

SEQ ID NO: 574 - protein, 71 aa, Homo sapiens
MPRLPGLCPQLCHHRCVALLALQPDPCLAHSEPPRQPMYAMEIWLLEFWCFTTFLTPSAYVLSSLSQFRKE

SEQ ID NO: 575 - DNA, 1101 bp, Homo sapiens
atgcactttgagttccgtttggcgagttgccaaatcagtgaaaaacagcttggaccaccttccattttgccaagcatggattctcagggcatcttttacctcttgctgtttataaccctacagtatttggtgtggagccctcaacacatctctcaggcagctatcaagaacgatgaaagacaaaacatccccatgaagcaggaaactttcacaatgttcggagcccttgatgtactgcagatgaatgaggaggatgtccttaagttccttgccgcaagaacccactcaggtggcaccaatctttacttccaaatggaacagtacatttataaaagtaaaagcgatggcatctacatcataaatctgaaaaggacctgagagaagcttctgctggcagctcgtgccattgctgccattgaaaaccttgctgatgtcagtgttatatcctccaggaatactggccagagggcagtgctgaaatttgctgctgccactggagccactccaattgctggctgcttcactcctggaaccttcactagccagatccaggcagccttccgagagccacggcttcctgtggttactgaccccagggttgaccaccagcctttaatggaggcatcttatgttaacctacctaccattgctctgtgtaacacagattctcctctgtgctatgtggatattgccattccatgcaacaacaaaggagctcactcagtgggtgtgatgtggtggatgttggtcccagaagttcggcgcataagttgcaccatttcccgtgaacacccgtgggaggtcatgactgatccctgcttctacagagatcccgaagagattgaaaaagaaaagcaagctgctgctgaaaaggctgtgaccaacgaggaatttcagggtgaatggactgcaccagctcctcagttcactgctacccagcctgaggttgcagacaggtctgaaggcctgcaggtgccgtctgtgcctatccagcagttacctactgaagactggagcgctcagcctgacacagaagactgatctgcagctcaaactgctcaggccactgaatgggtagaagcaaccactgaatggtcttaa

SEQ ID NO: 576 - DNA, 687 bp, Homo sapiens
atgagccctctcacctatcgtggacaccgaggaaacgcagcagagatgggcacccaggctgcccagatcctctggcagcctcgggtgctcgtccacttcgctcctcctccgcctttgctgccgcagccgcaggtgcgcaccccaccgcgtccctgcttccctcctcgagctcttgtggtcgagctcagactgggcgacagagcgtgtgaggagacgattgaaaaacccaaaaagaagaaaaagcaaaagccccaggagattcatcaggagaatggaatggaagacccatctatctctttctccaaacccaagaaaaagaaatctttttccaaggaggagttgatgagtagcgatcttgaagagaccgctggcagcaccagtcttcccaagaggaagaagtcttcacccaaggaggaaacagttaatgacaccgaagagtcaggccacagaagtggctccaagaaaacgaggaaattctccaaagaggagctggtcagcagtgggcctgaagaggcggctggcaagagcagctccaagaagaagaaaaagttccataaagcatcccaggaagattagaatgcaaatggacattctctgggaggtggggcataccatagcccaaggcgacatttcccaccctgtgccgtcttccccaataagaacaaattcacaaaaaagagagagaga

SEQ ID NO: 577 - protein, 191 aa, Homo sapiens
MSPLTYRGHRGNAAEMGTQAAQILWQPRVLVHFAPPPPLLPQPQVRTPPRPCFPPRALVVELRLGDRACEETIEKPKKKKKQKPQEIHQENGMEDPSISFSKPKKKKSFSKEELMSSDLEETAGSTSLPKRKKSSPKEETVNDTEESGHRSGSKKTRKFSKEELVSSGPEEAAGKSSSKKKKKFHKASQED

SEQ ID NO: 578 - DNA, 2785 bp, Homo sapiens
ttttctcccgccttttctcctagatgtgccttgtttgcaaaatcatgtctatcatgtccacgactcgcctcaattttttttcttttgtttttgtggcactttcattctctctcaattcttcaaattcacatggaaaccaaggaaaacaagctccgttttgctttcaatattgatgcatttctgctctaaggctttgacaccaccctgggtggctgtgtcaagagatgaaagacaaaatgaaagaggccgcggaagcacagactggcagaattccaaaacccgaaaaacaagcaaggcaccaaattaacaagcccaatcacattggttacatttcccagtattatcgaagatcaagcaagaaagaaaaagacagaaaacaaatgcgaaaccacagcttccttggctctttttgcccatatgccgaagagccgagcattgccgccaagcattggcaccggccatgcggagactagcgaaagctttgcaattcctctacttctcagtgatgactcgggctttctccttacattcttgatgggcatgaccggtcctgtcagctgggtggccaatttctgttcttcagcagaactgtctcccttcttgggggccgagggctttctggggaagaggatgagtttggagcaatactcattcagacgctgcacattggcctgcagggaatcggtggacttgttctgcctcctcggatccacagagatgccagtggtccgggtcaccttcttgtgaatgcccgccaccctgagctccaggctgaagcctctgccggcgcgcaccttgatgtgataacgcacagcagggcacagcacaatgggccagatgggtcccgactctccgggcgcggggcgatgcagcgccctttggcttgccgggccttgattctgcggatcttctggttgaaccacgtggccacacgctgctgccagtccttgtggaagtggggcttcaacatcatgccattcctgctgggcgccatggctgcctacggccctcctacgaaggaaacactttatagatttctatagcagtgttacatagtaaggttttatggcgagttttgtagcatggatcatactaccttaggactgatggtaaagttttagtctaaggaaagctctgaaaatttgaaaatgtgtaaccacccaatgagttcagcttgcccactgcctagacagaaccatttatcaagacgggcatgcaaagccggctgtgtgggagacccgttttattattattcaaatcagtctccccaagtggattgcagtttttaaggataatttggtgggtaggggaccagtgagttgggaaagttgattagtcgggtcggagatgaaatcagagggagtcgaagctgtcctcttgtgttggcttaatttctggatgggggccacaagaccagatgagccagtttatcgttatgggtggtgctagctgatccatagagtacaggggctgcaaaatatctcaagaactgatcttcggttttacaatagtgatgttatcctgaggagcaattgggggaggtttagaatcttgcagcctccagctgcatgactcctaaaccataatttataatcttgtggctaatttgttagtcctgcgaaagcagtctagtccccaggcaggaagcgggtttgttttggaaagggctgctattgtctttgtttcaaagctaaactataaactaagttcctcccaaagttaggtcagcctacgaccaggaatgaacaaggacagcttggaggttagaagcaagatggaattggttaggttagatctctcactgtctcagttgtaattttgcgatggtgttttcaaatgttgatttaaagaagaccataaatttgtgttgctttctcagattttgagaataaggacaaaaagtgtatgttttaatgggagaatcttaagaatttcactactgaagtggatttctctgtccattaacagtgctaaatgttttgtatttcccagttggaaaaacaaaatctgcaagctttgaatgatacttgttattaggttttggtaacagctgttgtactattcccatttcaatgctcaatagccacacgtggcatgtcatacctaccaggtggacagcacagatatagaacattttcatcattgtaaaaagccctatttgacaacactaacttaaagtattaatcttttagaagagaaagcttcagtccaacccaaattacacaattttacttttgaaaatattgttgaaacaacgttcaattttttaaaattttggaaaactgaatgaaatccatttgtaaatgcgcaaatggtactggaggtggaaaactgaagccttgctatagttttagttttttggagggttatgatcaacacagagaagaaaagattcatctacccatagagcttcttgagaaaaattttctaacaataattttgaaaatttgtagtgaatttgttcttgccattatttatgggtgctttcatgtgcgaggcacatcaaagttctggggaatgacttaggcacaaccaaatggctatcttgggaagaccaaagtcctttgctatatatgagagttttgagatggcgactacctttctgtatggtagattcttgtttttgaatatgccctctgggttttcaaaacaaattgtttttacaatacctatagtagttatctagggcatattctttagcttcaaaaattctatctttagaatgggcttcaatattcataactgagttattttcctctaataaatcattaacattttcccatgt

SEQ ID NO: 579 - DNA, 2969 bp, Homo sapiens
gggtttacgctgccgccggcatccgctcggacgcggccacgttgtcttgcgcgctttgcccgcctggccctgggactctgaccctcggctaccctttcctgccccactagcgtggccgcgagcctcggtgagccggccgtattcccgctctcgcttagggggcacaggcgcaggcatcggcccggccactccaagccttcggtgcgcgggcgcgtctgggatacgggcccgggaggcgccgccctccgtccgcccggtgcctctcaggaacagcgaaccggagagagcgccggagagttgggctcagtgcagagctcggcgccggggcccatgcccgtgcgcccccgcaggccggcgccatggcctccgggagtgtggccgagtgcctgcagcaggagaccacctgccccgtgtgcctgcagtacttcgcagagcccatgatgctcgactgcggccataacatctgttgcgcgtgcctcgcccgctgctggggcacggcagagactaacgtgtcgtgcccgcagtgccgggagaccttcccgcagaggcacatgcggcccaaccggcacctggccaacgtgacccaactggtaaagcagctgcgcaccgagcggccgtcggggcccggcggcgagatgggcgtgtgcgagaagcaccgcgagcccctgaagctgtactgcgaggaggaccagatgcccatctgcgtggtgtgcgaccgctcccgcgagcaccgcggccacagcgtgctgccgctcgaggaggcggtggagggcttcaaggagcaaatccagaaccagctcgaccatttaaaaagagtgaaagatttaaagaagagacgtcgggcccagggggaacaggcacgagctgaactcttgagcctaacccagatggagagggagaagattgtttgggagtttgagcagctgtatcactccttaaaggagcatgagtatcgcctcctggcccgccttgaggagctagacttggccatctacaatagcatcaatggtgccatcacccagttctcttgcaacatctcccacctcagcagcctgatcgctcagctagaagagaagcagcagcagcccaccagggagctcctgcaggacattggggacacattgagcagggctgaaagaatcaggattcctgaaccttggatcacacctccagatttgcaagagaaaatccacatttttgcccaaaaatgtctattcttgacggagagtctaaagcagttcacagaaaaaatgcagtcagatatggagaaaatccaagaattaagagaggctcagttatactcagtggacgtgactctggacccagacacggcctaccccagcctgatcctctctgataatctgcggcaagtgcggtacagttacctccaacaggacctgcctgacaaccccgagaggttcaatctgtttccctgtgtcttgggctctccatgcttcatcgccgggagacattattgggaggtagaggtgggagataaagccaagtggaccataggtgtctgtgaagactcagtgtgcagaaaaggtggagtaacctcagccccccagaatggattctgggcagtgtctttgtggtatgggaaagaatattgggctcttacctccccaatgactgccctacccctgcggaccccgctccagcgggtggggattttcttggactatgatgctggtgaggtctccttctacaacgtgacagagaggtgtcacaccttcactttctctcatgctaccttttgtgggcctgtccggccctacttcagtctgagttactcgggagggaaaagtgcagctcctctgatcatctgccccatgagtgggatagatgggttttctggccatgttgggaatcatggtcattccatggagacctccccttgaggaggtgaattcaggccaaaagggctgttggctgtaatcctacgccaggcacaaggcatcttgttgccttgccacgtcctgtcacagctgggtatccttaccatgttccacgcccttgcagtgggagacaggatgtccatgttctctaccatccttttccttcccatgcagattgtgaaatgtaatgagatgtatcaagatatcctagaaataaaaaccagatgtccacctccagtgtttcatactttctggttttacacatcgctggagggataaagagtatggataatctttggatttggagagccgttcaagatacttccagcttcttggctcagcctggcttcctctggttcagccccacataatgattatggctatttgctgtcatttctgggctagggctcctttctaacaacctagactggaataaggccctgtcagcatggctccctttatcccagttttccgtctgggaacagtacctctgcccctgattcccaatgtgccatagttttattaactccattaaagaagcctgtatgtgttttggttagttacagttattttacaataatggtgggtaatggccccacctctgttatgagataatgttctaatcaatgtctctgcctttgtatcttttctgagggctttgtctgttctcttcattctaatgaaaggtgtattctagtgctgggtgcatatcatccaggataatattctgcccaactccatcctctgttactagatcccttaccagtcacatttgtggactggtggccagtcgtataccatccctggaaggattctgggacaatattccagggattcattgacttcttggctccttttctccatttcctttgggggaagggggaattgaccatgcttaagtgcatcctatcaaggggcagctccgtccccatggccattggatcatgagacactctgaagtcagaaggctggggcagatcacttcaagcaagcccccatgatggttctcagtcctgcttctctgtgggtacgtgcccctctgtttaaaaataaactgaatatggatgttta

SEQ ID NO: 580 - protein, 513 aa, Homo sapiens
MASGSVAECLQQETTCPVCLQYFAEPMMLDCGHNICCACLARCWGTAETNVSCPQCRETFPQRHMRPNRHLANVTQLVKQLRTERPSGPGGEMGVCEKHREPLKLYCEEDQMPICVVCDRSREHRGHSVLPLEEAVEGFKEQIQNQLDHLKRVKDLKKRRRAQGEQARAELLSLTQMEREKIVWEFEQLYHSLKEHEYRLLARLEELDLAIYNSINGAITQFSCNISHLSSLIAQLEEKQQQPTRELLQDIGDTLSRAERIRIPEPWITPPDLQEKIHIFAQKCLFLTESLKQFTEKMQSDMEKIQELREAQLYSVDVTLDPDTAYPSLILSDNLRQVRYSYLQQDLPDNPERFNLFPCVLGSPCFIAGRHYWEVEVGDKAKWTIGVCEDSVCRKGGVTSAPQNGFWAVSLWYGKEYWALTSPMTALPLRTPLQRVGIFLDYDAGEVSFYNVTERCHTFTFSHATFCGPVRPYFSLSYSGGKSAAPLIICPMSGIDGFSGHVGNHGHSMETSP

SEQ ID NO: 581 - DNA, 466 bp, Homo sapiens
tcagctcccagatggatcctggacaggatgctgcaggtggtgcaggaggggaatcctgccccatttatcatcaacacagtaaaaaggggtcgaagagaccgagagcgccagaggacgccatgggctccacatccacttggattccagggaaggcggtacatctacgaaagccctaatcatagagggaaagactcctcgttcctggcccagaaatgagatgagaaatccagggccccgtacaggaaggcctttcgcaaagtccagactcaattgccttcgcagcccttaaagtttccttaggaaggtctgtgggagaacgaggttggtttaggaattggcccctgccttgtactacgtagttttgtcatccaaagtgttttagaagtgaattgaatcatagttacgccttattttgaaacactgtaattcagagaacgtaaaaccttattaaaatgcctcataatca

SEQ ID NO: 582 - protein, 62 aa, Homo sapiens
MLQVVQEGNPAPFIINTVKRGRRDRERQRTPWAPHPLGFQGRRYIYESPNHRGKDSSFLAQK

SEQ ID NO: 583 - DNA, 2698 bp, Homo sapiens
agcatccattcatatattcattcagtcagctaatttttaatccagcacatactattgcaagcgctgttttaggcgttgagaatacaactgtgaacaagacgacaaaaattcctgccctcatggagcctaagagcctagattttagcgaaggtagaaccaccgtaaacaatgtatatattaataagtaacttatgcaccatactggaaaattataaagtgctatagaggaaaagaagaattcatgtaaagcaagggaaacaagatgtgagatcacagcggtttagtgttgctaatgaaccccaaatccagggcagtgtttgacacattaagccaaacagtagcggcactgtgggtcaagaagggccctttggctggcaccaccaaaacatgtgttctccaaaggaggctggcatcaactggagccacttcacagcttgtttgagaactggatctgaccagtaggaagaaaccaggacagcagtggaagactgttaaagaaacctgagtaaaaagatgcaggaggttgtgctgttggatgagagttcaggaccaccaagccagctgctttggacccgccaggatacccagctccctcaggaaagcgctctattacctgctccatatcctgccttcactaaagatggaagccaaggaaacctgccgcaagcagatatcacactaatgagccaggcccaagagtcagtgacatttgaggatgtagctgtgaacttcactaacagggagtggcagtgtctgacctacgctcaaaggcatctctataaggatgtgatgttggaaaattatgggaacatggtatcacttggatttccatttcctaaacctcctttaatctctcatctggagcgagaagtagacccctgtgtgcaggatccacaggacagggagtccctaagctgctcctacccagtgtcagctgacaagatgtggcctgagaatgaaaaggcaagttcacaacaagagatttttgaaaatggagaagcctactggatgaaatttaacagtctcctaaaagttgattcccgggatcctaaggttagagaagtttgtgttcaggatgtcaaattagagaatcaatgggaaacatctataagggagaaactgagagaagagaaagaaggctctgaggaagtgacctgcaaaaaaggaaagaaccagaaagtgcttagtaaaaacttgaatccaaactcaaaacatagtcaatgtaataaagttcttatagcacagaaactccatgaatgtgccaggtgtggcaaaaacttcagttggcactcagatctaattctccatgagcaaattcattctggtgagaaaccccatgtgtgtaatgagtgtgggaaagcattcaagaccagaaatcagctttctatgcaccggataatccacacaggggagaaaccttttaattgcacccagtgtgggaaggctttcaacagtagatcagctctttgccgacataaaaaaacccacagtggggagaagcctcacgagtgcagggactgtgggaaggccttcaagaccaggaaccgtctctgtatgcatcagcttatccacaccggggagaagccttacaaatgtaactgctgtgggaaggccttccagtttaagcattcccttaccatccatggcagaatccacactggggagaagccatatgaatgtgaggagtgcgggaaggccttcagtgggagttcagacctcaccaaacacataagaatccacactggggaacgaccttatgagtgcagcaagtgtggaagggccttcagtcggagctcagacctaagcaaacacaaacgaatccatactcgggagaaacactatgggtgtccccagtgtggaaaagacttcagcatcaaggcagaactcaccaaacacagaaggatccacactgaagagaaacgttacaggtgtgaggagtgtgggaaagcctttcgtcataactgtaagcgcagggctcatgaacgagagcatacaggggagaagccctatcaatgcagggattgtgggaaaaccttccaagataagcactgccttaccatccatcagagaatccacactggagagaaaccttacaaatgtttagagtgtgggaaagctttcagtgggaagtcaaacttgaccaatcatcgaagaattcacactggagagaagcctcacaaatgtgaggtatgtggaatggccttccatcatagttcagtcctgaggcagcacaaaagaatccacactggtgagaagccatacacctgcagtgagtgtggcacgtccttccgtcagggctcagctctgattggacataagcgagttcatactggggagaaaccttatgaatgtgaggaatgtggaaaagcttttagagtgagctcaaatcttactggacataagaaaagaaaacatcaagtatggagtacccatgaacttgatgggagtaggaaatccctctctccagtgactgtttctcagacctcagtagtcagtattttgaccagtgcctgagtataacgattctggtgttactttctgtttttcctacctcttaggctggtccttctgtctcttatattagttattcctgatttcctgacccttaattgtgagattccccaaagacattgtcctttaccttcttattcactattttttcagtgagcacatttacttccaagagtttatcaatcac

SEQ ID NO: 584 - protein, 666 aa, Homo sapiens
MQEVVLLDESSGPPSQLLWTRQDTQLPQESALLPAPYPAFTKDGSQGNLPQADITLMSQAQESVTFEDVAVNFTNREWQCLTYAQRHLYKDVMLENYGNMVSLGFPFPKPPLISHLEREVDPCVQDPQDRESLSCSYPVSADKMWPENEKASSQQEIFENGEAYWMKFNSLLKVDSRDPKVREVCVQDVKLENQWETSIREKLREEKEGSEEVTCKKGKNQKVLSKNLNPNSKHSQCNKVLIAQKLHECARCGKNFSWHSDLILHEQIHSGEKPHVCNECGKAFKTRNQLSMHRIIHTGEKPFNCTQCGKAFNSRSALCRHKKTHSGEKPHECRDCGKAFKTRNRLCMHQLIHTGEKPYKCNCCGKAFQFKHSLTIHGRIHTGEKPYECEECGKAFSGSSDLTKHIRIHTGERPYECSKCGRAFSRSSDLSKHKRIHTREKHYGCPQCGKDFSIKAELTKHRRIHTEEKRYRCEECGKAFRHNCKRRAHEREHTGEKPYQCRDCGKTFQDKHCLTIHQRIHTGEKPYKCLECGKAFSGKSNLTNHRRIHTGEKPHKCEVCGMAFHHSSVLRQHKRIHTGEKPYTCSECGTSFRQGSALIGHKRVHTGEKPYECEECGKAFRVSSNLTGHKKRKHQVWSTHELDGSRKSLSPVTVSQTSVVSILTSA

SEQ ID NO: 585 - DNA, 5965 bp, Homo sapiens
gccgtccctgcggaccggacagtgcggccggcggccggcggccgggacggagcccccagcccgcgaggagggcgcggcgcaggcggcggcggcgcggcggggaggagcccgggccggaaccagggctgggccgggggcggggacgccggggtccgggagcccgggagccggagcgagctgacgagcgtcgcggaaggaccgggaaggaagagcggagccggagcgagccaagcagcccacaaagtgccatgccccggcggggttgaggcgcgcggcggtcggcccggcgcgctgggaggacgcccgggagctgcgcgacgcggggcggcgcggaagggcagccccggcgggcggcggcgggcccgggctgcgaccggagcgagccccatgccccgcgcgggctgacgggccggagcccgcacggagcggccgggcgggacaggtaccgctagagcgacatgatggtggaatctgcctcggagacaatcaggtcggctccatctggtcagaatggcgtgggcagcctctctgggcaagccgatggcagcagcggcggggccacagggacaactgcaagtggcacgggcagggaagtgaccacgggtgcagacagcaatggtgagatgagtcccgcagagctgctgcacttccagcagcaacaggctctccaagtggcccggcagttcctgctgcagcaggcctcaggcctgagctccccagggaacaatgacagcaaacagtctgcctctgctgtgcaggtgcctgtgtcggtggccatgatgtcgccgcagatgcttaccccgcaacagatgcagcagatcctgtcgcccccgcagctgcaggccttgctccagcagcagcaagccctcatgctccagcagctacaggagtactacaagaagcagcaggagcagctccacctgcagctcctcacccagcagcaggctgggaaaccgcagcccaaagaggcactggggaacaagcagctggccttccagcagcagctcctgcaaatgcaacagttgcagcagcagcacctgctcaacctgcagaggcaggggctggtcagcctgcagcccaaccaagcctcggggcccctccagacccttccgcaagcagctgtttgcccaacagacctgccccagctgtggaagggcgagggtgcccccgggcagcctgccgaggacagcgtcaagcaggaggggctggacctcactggcacggccgccaccgctacctcgtttgccgctccccccaaggtctcaccccccctctcccaccataccctgcccaacggacagcctactgtgctcacatctcggagagacagctcttcccacgaggagacccccggctcccaccccctgtacggacacggagagtgcaagtggccaggctgtgagaccctgtgtgaagacctgggccagtttatcaaacacctcaacacagagcacgccctggatgaccggagtacagcccagtgccgggtacagatgcaggtggtgcagcagctggagatccagctcgccaaggagagcgagcggctgcaggccatgatggcccacctgcacatgcggccctcggagcccaagcccttcagccagccactgaacccggtccccggctcctcctcattctccaaggtgaccgtctctgcagcagactcattcccagatggtctcgtgcaccccccgacctcggccgcagcccctgtcacccctctacggccccctggcctgggctctgcctccctgcatggtgggggcccagcccgtcggagaagcagtgacaagttctgctcccccatctcctcagagctggcccagaatcatgagttctacaagaacgccgacgtccggccccccttcacctacgcctccctcatccgccaggccatcctggaaacccctgacaggcagctgaccctgaatgagatctataactggttcaccaggatgttcgcctatttccgcagaaacactgccacctggaagaacgccgtgcgccacaacctcagcctgcacaagtgcttcgtccgcgtggagaacgtcaagggtgccgtgtggactgtggacgagcgggagtatcagaagcggagaccgccaaagatgacagggagccccaccctggtgaagaacatgatctctggcctcagctatggagcacttaatgccagctaccaggccgccctggccgagagcagcttccccctcctcaacagccctggcatgctgaaccctggctccgccagcagcctgctgcccctcagccacgatgacgtgggtgcccccgtggagccgctgcccagcaacggcagcagcagccctcctcgcctctccccgccccagtacagccaccaggtgcaggtgaaggaggagccagcagaggcagaggaagacaggcagcccgggcctcccctgggcgcccctaaccccagcgcctcggggcctccggaagacagggacctggaggaggagctgccgggagaagaactgtcctaagggcctgtagtgaccggcagggctggggtgagacccctcccttccagaatccaggccccatctcccccaactccacagcccctcccgagcctcaaggcaagtccaggactcagaccggggaggcccgggccagcagctcccagtgtgacctgacaaaaacacgtaggggcagggacggtccccacccccagggacacaacccctggtcttggaccagtagaggacacggagggttcagacccctcctcagaccctccccacatctgaaactgcctccccccaaccaccagcagcagcagggccctcctcccccaccagctctccccacagggcccctcagcatcatggagacccgcaggcggggcttagccacccctcaaacccagggccccctggcacctggctctggccgtgttttctggccagaggcccccactttcctaactcgtgctcccttccgccttcttttccgtactgtgaagaaagaactctccaccccagctcccaccctgccctggcctgggtggaggaactgtgcctccatccccagaagaaacagccccctctgctgctggggtgggactgtctgtgtgccctgtgggggtccgtgtgagcaggcccacctggctccagacccgcccccaacctgagacagaaccaggctgagccaggcctccacccccacccccgtttgctgggggctcctccagccgcccccatgggaagaggcctggtaccgcctcacccacagaggtctgtgccaggtgcgcttctgcaggtggagccaagctctccctgaggccagaggcggggcctgggccgggagcccaggggaaggccaggctggaccccggctccacacccacatccagcctgcaggcctctctgcagtcctctcaccctccctcagctccccttcctctgcagtcaccctcagctccccttccttgcccgcctctccccccgccgccccaccagttaaacggatgaccaaagacctttcttatgccggaagcaaaaaccaaaactttttgttggctttttcctttgtcgcctccccagcacctgccctcccagtctcccaccccggccccaggctggaagccctccctccacttaagttattgttttaaaccaaagtttacagtgtctgttggtggccaagaccttctctctccacccctcctccatccaccctgaggaccctggggctcagtggaggcagggccctgcccccctcccttccgctcctgcccagcctgggggaaggagaaaggaggggagaaagcgggctctcaccccctcaggagtgggcacgggagcccttctccctgaccctgggctgcttcctgggggctctccagacccctctctaggaccaagtcacccgtcgtgctgggagtgtggattctagcaaaagagctggaaaaaagtcagactctccacagaccccctatgggggacccccaactcaaggccaaggactgggcgtatcggatgctcataacacccctggcctggcccctttactgagaagactccttggatatttcccaagaaccccccacatacacccctcacaagccacccctcctgagaggcagggggccctccgccccctccccatgtattccccacctgtgttccgtttgaccagcacagaaatattaaacgtcctctattcaccgggccctgtgtgtgtcaccgaggtgcgggaggggaggagcattaaagctgaaagatcgctctgctcggggagcctgggcagagcagcagcaacgtgagggtcgctgtggtggtggtttctgtgagtggatggaatgagcagccctgcaggggcgctgggcatgtgccctcactgtggacagggcccacccacctccggttcccctgtgcctcctgtcccttccacgcttaaacagggttctctgtcattttcctgttttcttccagagtcccaatcctttgccctagttctttcactagtttgaaatccaagttcttgccagagtgttggagcaaggcagctgatttgctgcagggatggagaggaccaccgccgcagggttcttttacctgtgccaccagctctggagacatccacacccattcccaggtgtccttccaggcccattgtccacgtcttcaagggggctgcctggataggcgtgtgtgtgtgtagtgcccaggtgtggtggtggcatcctgaagcagtaggaccattagtgtgcgtgcacacccacgtggcacactgtgtggtgaccatggtcatcatagtgggctcacggcggaaacgggatcattcaacctatacaaaggggaccctggataggctgcaaggaaagaggccaagggccaagctgctaagccaaagatggcccctgacacctcccccagccccagcacaccagcctgcacctcttatcccgtgttaagtcctggttccccacctgctgcccctcctcaacacagagcccctcccgccgcctcagacccctgtgcacatccccagggcctcagccgtctcattggtctttattttttattttttttaagatggagtttcgctcttattgcccagactggagtgcagtgatgctatctcggctcactgcaacctttgcctcccaggttcaagtgattctcctgcctcagcctcccaagtagctgggattacaggcgtgcaccaccacgccgggctaaatttttttgtatttttagtagagacggggtttctctatgttggtcaggctgatctcgaactcccgacctcaggtgatccgccagcctcagcctcccaaagtgctgggattacaggcgtgagccactgcacccggctctcactggtcttacgccaccttctggacactccctccttgagggcagaaaggagtcccaggcctgtccctagggacaaggcccagggaagagtgtatttggggagcaggggaggggagggtgttgagaaagctgaactggagtcaatcacccttcccacaaatcaccaaactgctggaactctccagccaaatgctgggagaaggacctggagggtgagtctttgctgacctctctctactctcaggcatgtcttttgtccttttcgtccatctatttctgtctgtcgctcactcgccccgctttctctgtctcaccttcatccactctgcaggcctgctccaccacagccctaatcctctggacgcttgtgtagggcctggggtgaattccctgtcccccatggtacctcgagaggggctggggagctcagcttggtctcagagtctccccaccagatactgtttaaaaaagtagcactgatgtgttttgtaatctgcccctcccagccctccgtggaggctgccagggccttgtacggtaaacctagctgcatgtaatctgtggacaatggcattctctacaatgcaataaaaacaattacccatgaaaaaaaaaaaaaaaaa

SEQ ID NO: 586 - protein, 680 aa, Homo sapiens
MMVESASETIRSAPSGQNGVGSLSGQADGSSGGATGTTASGTGREVTTGADSNGEMSPAELLHFQQQQALQVARQFLLQQASGLSSPGNNDSKQSASAVQVPVSVAMMSPQMLTPQQMQQILSPPQLQALLQQQQALMLQQLQEYYKKQQEQLHLQLLTQQQAGKPQPKEALGNKQLAFQQQLLQMQQLQQQHLLNLQRQGLVSLQPNQASGPLQTLPQAAVCPTDLPQLWKGEGAPGQPAEDSVKQEGLDLTGTAATATSFAAPPKVSPPLSHHTLPNGQPTVLTSRRDSSSHEETPGSHPLYGHGECKWPGCETLCEDLGQFIKHLNTEHALDDRSTAQCRVQMQVVQQLEIQLAKESERLQAMMAHLHMRPSEPKPFSQPLNPVPGSSSFSKVTVSAADSFPDGLVHPPTSAAAPVTPLRPPGLGSASLHGGGPARRRSSDKFCSPISSELAQNHEFYKNADVRPPFTYASLIRQAILETPDRQLTLNEIYNWFTRMFAYFRRNTATWKNAVRHNLSLHKCFVRVENVKGAVWTVDEREYQKRRPPKMTGSPTLVKNMISGLSYGALNASYQAALAESSFPLLNSPGMLNPGSASSLLPLSHDDVGAPVEPLPSNGSSSPPRLSPPQYSHQVQVKEEPAEAEEDRQPGPPLGAPNPSASGPPEDRDLEEELPGEELS

SEQ ID NO: 587 - DNA, 5959 bp, Homo sapiens
gccgtccctgcggaccggacagtgcggccggcggccggcggccgggacggagcccccagcccgcgaggagggcgcggcgcaggcggcggcggcgcggcggggaggagcccgggccggaaccagggctgggccgggggcggggacgccggggtccgggagcccgggagccggagcgagctgacgagcgtcgcggaaggaccgggaaggaagagcggagccggagcgagccaagcagcccacaaagtgccatgccccggcggggttgaggcgcgcggcggtcggcccggcgcgctgggaggacgcccgggagctgcgcgacgcggggcggcgcggaagggcagccccggcgggcggcggcgggcccgggctgcgaccggagcgagccccatgccccgcgcgggctgacgggccggagcccgcacggagcggccgggcgggacaggtaccgctagagcgacatgatggtggaatctgcctcggagacaatcaggtcggctccatctggtcagaatggcgtgggcagcctctctgggcaagccgatggcagcagcggcggggccacagggacaactgcaagtggcacgggcagggaagtgaccacgggtgcagacagcaatggtgagatgagtcccgcagagctgctgcacttccagcagcaacaggctctccaagtggcccggcagttcctgctgcagcaggcctcaggcctgagctccccagggaacaatgacagcaaacagtctgcctctgctgtgcaggtgcctgtgtcggtggccatgatgtcgccgcagatgcttaccccgcaacagatgcagcagatcctgtcgcccccgcagctgcaggccttgctccagcagcagcaagccctcatgctccagcaggagtactacaagaagcagcaggagcagctccacctgcagctcctcacccagcagcaggctgggaaaccgcagcccaaagaggcactggggaacaagcagctggccttccagcagcagctcctgcaaatgcaacagttgcagcagcagcacctgctcaacctgcagaggcaggggctggtcagcctgcagcccaaccaagcctcggggcccctccagacccttccgcaagcagctgtttgcccaacagacctgccccagctgtggaagggcgagggtgcccccgggcagcctgccgaggacagcgtcaagcaggaggggctggacctcactggcacggccgccaccgctacctcgtttgccgctccccccaaggtctcaccccccctctcccaccataccctgcccaacggacagcctactgtgctcacatctcggagagacagctcttcccacgaggagacccccggctcccaccccctgtacggacacggagagtgcaagtggccaggctgtgagaccctgtgtgaagacctgggccagtttatcaaacacctcaacacagagcacgccctggatgaccggagtacagcccagtgccgggtacagatgcaggtggtgcagcagctggagatccagctcgccaaggagagcgagcggctgcaggccatgatggcccacctgcacatgcggccctcggagcccaagcccttcagccagccactgaacccggtccccggctcctcctcattctccaaggtgaccgtctctgcagcagactcattcccagatggtctcgtgcaccccccgacctcggccgcagcccctgtcacccctctacggccccctggcctgggctctgcctccctgcatggtgggggcccagcccgtcggagaagcagtgacaagttctgctcccccatctcctcagagctggcccagaatcatgagttctacaagaacgccgacgtccggccccccttcacctacgcctccctcatccgccaggccatcctggaaacccctgacaggcagctgaccctgaatgagatctataactggttcaccaggatgttcgcctatttccgcagaaacactgccacctggaagaacgccgtgcgccacaacctcagcctgcacaagtgcttcgtccgcgtggagaacgtcaagggtgccgtgtggactgtggacgagcgggagtatcagaagcggagaccgccaaagatgacagggagccccaccctggtgaagaacatgatctctggcctcagctatggagcacttaatgccagctaccaggccgccctggccgagagcagcttccccctcctcaacagccctggcatgctgaaccctggctccgccagcagcctgctgcccctcagccacgatgacgtgggtgcccccgtggagccgctgcccagcaacggcagcagcagccctcctcgcctctccccgccccagtacagccaccaggtgcaggtgaaggaggagccagcagaggcagaggaagacaggcagcccgggcctcccctgggcgcccctaaccccagcgcctcggggcctccggaagacagggacctggaggaggagctgccgggagaagaactgtcctaagggcctgtagtgaccggcagggctggggtgagacccctcccttccagaatccaggccccatctcccccaactccacagcccctcccgagcctcaaggcaagtccaggactcagaccggggaggcccgggccagcagctcccagtgtgacctgacaaaaacacgtaggggcagggacggtccccacccccagggacacaacccctggtcttggaccagtagaggacacggagggttcagacccctcctcagaccctccccacatctgaaactgcctccccccaaccaccagcagcagcagggccctcctcccccaccagctctccccacagggcccctcagcatcatggagacccgcaggcggggcttagccacccctcaaacccagggccccctggcacctggctctggccgtgttttctggccagaggcccccactttcctaactcgtgctcccttccgccttcttttccgtactgtgaagaaagaactctccaccccagctcccaccctgccctggcctgggtggaggaactgtgcctccatccccagaagaaacagccccctctgctgctggggtgggactgtctgtgtgccctgtgggggtccgtgtgagcaggcccacctggctccagacccgcccccaacctgagacagaaccaggctgagccaggcctccacccccacccccgtttgctgggggctcctccagccgcccccatgggaagaggcctggtaccgcctcacccacagaggtctgtgccaggtgcgcttctgcaggtggagccaagctctccctgaggccagaggcggggcctgggccgggagcccaggggaaggccaggctggaccccggctccacacccacatccagcctgcaggcctctctgcagtcctctcaccctccctcagctccccttcctctgcagtcaccctcagctccccttccttgcccgcctctccccccgccgccccaccagttaaacggatgaccaaagacctttcttatgccggaagcaaaaaccaaaactttttgttggctttttcctttgtcgcctccccagcacctgccctcccagtctcccaccccggccccaggctggaagccctccctccacttaagttattgttttaaaccaaagtttacagtgtctgttggtggccaagaccttctctctccacccctcctccatccaccctgaggaccctggggctcagtggaggcagggccctgcccccctcccttccgctcctgcccagcctgggggaaggagaaaggaggggagaaagcgggctctcaccccctcaggagtgggcacgggagcccttctccctgaccctgggctgcttcctgggggctctccagacccctctctaggaccaagtcacccgtcgtgctgggagtgtggattctagcaaaagagctggaaaaaagtcagactctccacagaccccctatgggggacccccaactcaaggccaaggactgggcgtatcggatgctcataacacccctggcctggcccctttactgagaagactccttggatatttcccaagaaccccccacatacacccctcacaagccacccctcctgagaggcagggggccctccgccccctccccatgtattccccacctgtgttccgtttgaccagcacagaaatattaaacgtcctctattcaccgggccctgtgtgtgtcaccgaggtgcgggaggggaggagcattaaagctgaaagatcgctctgctcggggagcctgggcagagcagcagcaacgtgagggtcgctgtggtggtggtttctgtgagtggatggaatgagcagccctgcaggggcgctgggcatgtgccctcactgtggacagggcccacccacctccggttcccctgtgcctcctgtcccttccacgcttaaacagggttctctgtcattttcctgttttcttccagagtcccaatcctttgccctagttctttcactagtttgaaatccaagttcttgccagagtgttggagcaaggcagctgatttgctgcagggatggagaggaccaccgccgcagggttcttttacctgtgccaccagctctggagacatccacacccattcccaggtgtccttccaggcccattgtccacgtcttcaagggggctgcctggataggcgtgtgtgtgtgtagtgcccaggtgtggtggtggcatcctgaagcagtaggaccattagtgtgcgtgcacacccacgtggcacactgtgtggtgaccatggtcatcatagtgggctcacggcggaaacgggatcattcaacctatacaaaggggaccctggataggctgcaaggaaagaggccaagggccaagctgctaagccaaagatggcccctgacacctcccccagccccagcacaccagcctgcacctcttatcccgtgttaagtcctggttccccacctgctgcccctcctcaacacagagcccctcccgccgcctcagacccctgtgcacatccccagggcctcagccgtctcattggtctttattttttattttttttaagatggagtttcgctcttattgcccagactggagtgcagtgatgctatctcggctcactgcaacctttgcctcccaggttcaagtgattctcctgcctcagcctcccaagtagctgggattacaggcgtgcaccaccacgccgggctaaatttttttgtatttttagtagagacggggtttctctatgttggtcaggctgatctcgaactcccgacctcaggtgatccgccagcctcagcctcccaaagtgctgggattacaggcgtgagccactgcacccggctctcactggtcttacgccaccttctggacactccctccttgagggcagaaaggagtcccaggcctgtccctagggacaaggcccagggaagagtgtatttggggagcaggggaggggagggtgttgagaaagctgaactggagtcaatcacccttcccacaaatcaccaaactgctggaactctccagccaaatgctgggagaaggacctggagggtgagtctttgctgacctctctctactctcaggcatgtcttttgtccttttcgtccatctatttctgtctgtcgctcactcgccccgctttctctgtctcaccttcatccactctgcaggcctgctccaccacagccctaatcctctggacgcttgtgtagggcctggggtgaattccctgtcccccatggtacctcgagaggggctggggagctcagcttggtctcagagtctccccaccagatactgtttaaaaaagtagcactgatgtgttttgtaatctgcccctcccagccctccgtggaggctgccagggccttgtacggtaaacctagctgcatgtaatctgtggacaatggcattctctacaatgcaataaaaacaattacccatgaaaaaaaaaaaaaaaaa

SEQ ID NO: 588 - protein, 678 aa, Homo sapiens
MMVESASETIRSAPSGQNGVGSLSGQADGSSGGATGTTASGTGREVTTGADSNGEMSPAELLHFQQQQALQVARQFLLQQASGLSSPGNNDSKQSASAVQVPVSVAMMSPQMLTPQQMQQILSPPQLQALLQQQQALMLQQEYYKKQQEQLHLQLLTQQQAGKPQPKEALGNKQLAFQQQLLQMQQLQQQHLLNLQRQGLVSLQPNQASGPLQTLPQAAVCPTDLPQLWKGEGAPGQPAEDSVKQEGLDLTGTAATATSFAAPPKVSPPLSHHTLPNGQPTVLTSRRDSSSHEETPGSHPLYGHGECKWPGCETLCEDLGQFIKHLNTEHALDDRSTAQCRVQMQVVQQLEIQLAKESERLQAMMAHLHMRPSEPKPFSQPLNPVPGSSSFSKVTVSAADSFPDGLVHPPTSAAAPVTPLRPPGLGSASLHGGGPARRRSSDKFCSPISSELAQNHEFYKNADVRPPFTYASLIRQAILETPDRQLTLNEIYNWFTRMFAYFRRNTATWKNAVRHNLSLHKCFVRVENVKGAVWTVDEREYQKRRPPKMTGSPTLVKNMISGLSYGALNASYQAALAESSFPLLNSPGMLNPGSASSLLPLSHDDVGAPVEPLPSNGSSSPPRLSPPQYSHQVQVKEEPAEAEEDRQPGPPLGAPNPSASGPPEDRDLEEELPGEELS

SEQ ID NO: 589 - DNA, 5926 bp, Homo sapiens
gccgtccctgcggaccggacagtgcggccggcggccggcggccgggacggagcccccagcccgcgaggagggcgcggcgcaggcggcggcggcgcggcggggaggagcccgggccggaaccagggctgggccgggggcggggacgccggggtccgggagcccgggagccggagcgagctgacgagcgtcgcggaaggaccgggaaggaagagcggagccggagcgagccaagcagcccacaaagtgccatgccccggcggggttgaggcgcgcggcggtcggcccggcgcgctgggaggacgcccgggagctgcgcgacgcggggcggcgcggaagggcagccccggcgggcggcggcgggcccgggctgcgaccggagcgagccccatgccccgcgcgggctgacgggccggagcccgcacggagcggccgggcgggacaggtaccgctagagcgacatgatggtggaatctgcctcggagacaatcaggtcggctccatctggtcagaatggcgtgggcagcctctctgggcaagccgatggcagcagcggcggggccacagggacaactgcaagtggcacgggcagggaagtgaccacgggtgcagacagcaatggtgagatgagtcccgcagagctgctgcacttccagcagcaacaggctctccaagtggcccggcagttcctgctgcagcaggcctcaggcctgagctccccagggaacaatgacagcaaacagtctgcctctgctgtgcaggtgcctgtgtcggtggccatgatgtcgccgcagatgcttaccccgcaacagatgcagcagatcctgtcgcccccgcagctgcaggccttgctccagcagcagcaagccctcatgctccagcagctacaggagtactacaagaagcagcaggagcagctccacctgcagctcctcacccagcagcaggctgggaaaccgcagcccaaagaggcactggggaacaagcagctggccttccagcagcagctcctgcaaatgcaacagttgcagcagcagcacctgctcaacctgcagaggcaggggctggtcagcctgcagcccaaccaagcctcggggcccctccagacccttccgcaagctgtttgcccaacagacctgccccagctgtggaagggcgagggtgcccccgggcagcctgccgaggacagcgtcaagcaggaggggctggacctcactggcacggccgccaccgctacctcgtttgccgctccccccaaggtctcaccccccctctcccaccataccctgcccaacggacagcctactgtgctcacatctcggagagacagctcttcccacgaggagacccccggctcccaccccctgtacggacacggagagtgcaagtggccaggctgtgagaccctgtgtgaagacctgggccagtttatcaaacacctcaacacagagcacgccctggatgaccggagtacagcccagtgccgggtacagatgcaggtggtgcagcagctggagatccagctcgccaaggagagcgagcggctgcaggccatgatggcccacctgcacatgcggccctcggagcccaagcccttcagccagccagtgaccgtctctgcagcagactcattcccagatggtctcgtgcaccccccgacctcggccgcagcccctgtcacccctctacggccccctggcctgggctctgcctccctgcatggtgggggcccagcccgtcggagaagcagtgacaagttctgctcccccatctcctcagagctggcccagaatcatgagttctacaagaacgccgacgtccggccccccttcacctacgcctccctcatccgccaggccatcctggaaacccctgacaggcagctgaccctgaatgagatctataactggttcaccaggatgttcgcctatttccgcagaaacactgccacctggaagaacgccgtgcgccacaacctcagcctgcacaagtgcttcgtccgcgtggagaacgtcaagggtgccgtgtggactgtggacgagcgggagtatcagaagcggagaccgccaaagatgacagggagccccaccctggtgaagaacatgatctctggcctcagctatggagcacttaatgccagctaccaggccgccctggccgagagcagcttccccctcctcaacagccctggcatgctgaaccctggctccgccagcagcctgctgcccctcagccacgatgacgtgggtgcccccgtggagccgctgcccagcaacggcagcagcagccctcctcgcctctccccgccccagtacagccaccaggtgcaggtgaaggaggagccagcagaggcagaggaagacaggcagcccgggcctcccctgggcgcccctaaccccagcgcctcggggcctccggaagacagggacctggaggaggagctgccgggagaagaactgtcctaagggcctgtagtgaccggcagggctggggtgagacccctcccttccagaatccaggccccatctcccccaactccacagcccctcccgagcctcaaggcaagtccaggactcagaccggggaggcccgggccagcagctcccagtgtgacctgacaaaaacacgtaggggcagggacggtccccacccccagggacacaacccctggtcttggaccagtagaggacacggagggttcagacccctcctcagaccctccccacatctgaaactgcctccccccaaccaccagcagcagcagggccctcctcccccaccagctctccccacagggcccctcagcatcatggagacccgcaggcggggcttagccacccctcaaacccagggccccctggcacctggctctggccgtgttttctggccagaggcccccactttcctaactcgtgctcccttccgccttcttttccgtactgtgaagaaagaactctccaccccagctcccaccctgccctggcctgggtggaggaactgtgcctccatccccagaagaaacagccccctctgctgctggggtgggactgtctgtgtgccctgtgggggtccgtgtgagcaggcccacctggctccagacccgcccccaacctgagacagaaccaggctgagccaggcctccacccccacccccgtttgctgggggctcctccagccgcccccatgggaagaggcctggtaccgcctcacccacagaggtctgtgccaggtgcgcttctgcaggtggagccaagctctccctgaggccagaggcggggcctgggccgggagcccaggggaaggccaggctggaccccggctccacacccacatccagcctgcaggcctctctgcagtcctctcaccctccctcagctccccttcctctgcagtcaccctcagctccccttccttgcccgcctctccccccgccgccccaccagttaaacggatgaccaaagacctttcttatgccggaagcaaaaaccaaaactttttgttggctttttcctttgtcgcctccccagcacctgccctcccagtctcccaccccggccccaggctggaagccctccctccacttaagttattgttttaaaccaaagtttacagtgtctgttggtggccaagaccttctctctccacccctcctccatccaccctgaggaccctggggctcagtggaggcagggccctgcccccctcccttccgctcctgcccagcctgggggaaggagaaaggaggggagaaagcgggctctcaccccctcaggagtgggcacgggagcccttctccctgaccctgggctgcttcctgggggctctccagacccctctctaggaccaagtcacccgtcgtgctgggagtgtggattctagcaaaagagctggaaaaaagtcagactctccacagaccccctatgggggacccccaactcaaggccaaggactgggcgtatcggatgctcataacacccctggcctggcccctttactgagaagactccttggatatttcccaagaaccccccacatacacccctcacaagccacccctcctgagaggcagggggccctccgccccctccccatgtattccccacctgtgttccgtttgaccagcacagaaatattaaacgtcctctattcaccgggccctgtgtgtgtcaccgaggtgcgggaggggaggagcattaaagctgaaagatcgctctgctcggggagcctgggcagagcagcagcaacgtgagggtcgctgtggtggtggtttctgtgagtggatggaatgagcagccctgcaggggcgctgggcatgtgccctcactgtggacagggcccacccacctccggttcccctgtgcctcctgtcccttccacgcttaaacagggttctctgtcattttcctgttttcttccagagtcccaatcctttgccctagttctttcactagtttgaaatccaagttcttgccagagtgttggagcaaggcagctgatttgctgcagggatggagaggaccaccgccgcagggttcttttacctgtgccaccagctctggagacatccacacccattcccaggtgtccttccaggcccattgtccacgtcttcaagggggctgcctggataggcgtgtgtgtgtgtagtgcccaggtgtggtggtggcatcctgaagcagtaggaccattagtgtgcgtgcacacccacgtggcacactgtgtggtgaccatggtcatcatagtgggctcacggcggaaacgggatcattcaacctatacaaaggggaccctggataggctgcaaggaaagaggccaagggccaagctgctaagccaaagatggcccctgacacctcccccagccccagcacaccagcctgcacctcttatcccgtgttaagtcctggttccccacctgctgcccctcctcaacacagagcccctcccgccgcctcagacccctgtgcacatccccagggcctcagccgtctcattggtctttattttttattttttttaagatggagtttcgctcttattgcccagactggagtgcagtgatgctatctcggctcactgcaacctttgcctcccaggttcaagtgattctcctgcctcagcctcccaagtagctgggattacaggcgtgcaccaccacgccgggctaaatttttttgtatttttagtagagacggggtttctctatgttggtcaggctgatctcgaactcccgacctcaggtgatccgccagcctcagcctcccaaagtgctgggattacaggcgtgagccactgcacccggctctcactggtcttacgccaccttctggacactccctccttgagggcagaaaggagtcccaggcctgtccctagggacaaggcccagggaagagtgtatttggggagcaggggaggggagggtgttgagaaagctgaactggagtcaatcacccttcccacaaatcaccaaactgctggaactctccagccaaatgctgggagaaggacctggagggtgagtctttgctgacctctctctactctcaggcatgtcttttgtccttttcgtccatctatttctgtctgtcgctcactcgccccgctttctctgtctcaccttcatccactctgcaggcctgctccaccacagccctaatcctctggacgcttgtgtagggcctggggtgaattccctgtcccccatggtacctcgagaggggctggggagctcagcttggtctcagagtctccccaccagatactgtttaaaaaagtagcactgatgtgttttgtaatctgcccctcccagccctccgtggaggctgccagggccttgtacggtaaacctagctgcatgtaatctgtggacaatggcattctctacaatgcaataaaaacaattacccatgaaaaaaaaaaaaaaaaa

SEQ ID NO: 590 - protein, 667 aa, Homo sapiens
MMVESASETIRSAPSGQNGVGSLSGQADGSSGGATGTTASGTGREVTTGADSNGEMSPAELLHFQQQQALQVARQFLLQQASGLSSPGNNDSKQSASAVQVPVSVAMMSPQMLTPQQMQQILSPPQLQALLQQQQALMLQQLQEYYKKQQEQLHLQLLTQQQAGKPQPKEALGNKQLAFQQQLLQMQQLQQQHLLNLQRQGLVSLQPNQASGPLQTLPQAVCPTDLPQLWKGEGAPGQPAEDSVKQEGLDLTGTAATATSFAAPPKVSPPLSHHTLPNGQPTVLTSRRDSSSHEETPGSHPLYGHGECKWPGCETLCEDLGQFIKHLNTEHALDDRSTAQCRVQMQVVQQLEIQLAKESERLQAMMAHLHMRPSEPKPFSQPVTVSAADSFPDGLVHPPTSAAAPVTPLRPPGLGSASLHGGGPARRRSSDKFCSPISSELAQNHEFYKNADVRPPFTYASLIRQAILETPDRQLTLNEIYNWFTRMFAYFRRNTATWKNAVRHNLSLHKCFVRVENVKGAVWTVDEREYQKRRPPKMTGSPTLVKNMISGLSYGALNASYQAALAESSFPLLNSPGMLNPGSASSLLPLSHDDVGAPVEPLPSNGSSSPPRLSPPQYSHQVQVKEEPAEAEEDRQPGPPLGAPNPSASGPPEDRDLEEELPGEELS

SEQ ID NO: 591 - DNA, 3665 bp, Homo sapiens
ggcttggggcagccgggtagctcggaggtcgtggcgctgggggctagcaccagcgctctgtcgggaggcgcagcggttaggtggaccggtcagcggactcaccggccagggcgctcggtgctggaatttgatattcattgatccgggttttatccctcttcttttttcttaaacatttttttttaaaactgtattgtttctcgttttaatttatttttgcttgccattccccacttgaatcgggccgacggcttggggagattgctctacttccccaaatcactgtggattttggaaaccagcagaaagaggaaagaggtagcaagagctccagagagaagtcgaggaagagagagacggggtcagagagagcgcgcgggcgtgcgagcagcgaaagcgacaggggcaaagtgagtgacctgcttttgggggtgaccgccggagcgcggcgtgagccctcccccttgggatcccgcagctgaccagtcgcgctgacggacagacagacagacaccgcccccagccccagctaccacctcctccccggccggcggcggacagtggacgcggcggcgagccgcgggcaggggccggagcccgcgcccggaggcggggtggagggggtcggggctcgcggcgtcgcactgaaacttttcgtccaacttctgggctgttctcgcttcggaggagccgtggtccgcgcgggggaagccgagccgagcggagccgcgagaagtgctagctcgggccgggaggagccgcagccggaggagggggaggaggaagaagagaaggaagaggagagggggccgcagtggcgactcggcgctcggaagccgggctcatggacgggtgaggcggcggtgtgcgcagacagtgctccagccgcgcgcgctccccaggccctggcccgggcctcgggccggggaggaagagtagctcgccgaggcgccgaggagagcgggccgccccacagcccgagccggagagggagcgcgagccgcgccggccccggtcgggcctccgaaaccatgaactttctgctgtcttgggtgcattggagccttgccttgctgctctacctccaccatgccaagtggtcccaggctgcacccatggcagaaggaggagggcagaatcatcacgaagtggtgaagttcatggatgtctatcagcgcagctactgccatccaatcgagaccctggtggacatcttccaggagtaccctgatgagatcgagtacatcttcaagccatcctgtgtgcccctgatgcgatgcgggggctgctgcaatgacgagggcctggagtgtgtgcccactgaggagtccaacatcaccatgcagattatgcggatcaaacctcaccaaggccagcacataggagagatgagcttcctacagcacaacaaatgtgaatgcagaccaaagaaagatagagcaagacaagaaaaaaaatcagttcgaggaaagggaaaggggcaaaaacgaaagcgcaagaaatcccggtataagtcctggagcgtgtacgttggtgcccgctgctgtctaatgccctggagcctccctggcccccatccctgtgggccttgctcagagcggagaaagcatttgtttgtacaagatccgcagacgtgtaaatgttcctgcaaaaacacagactcgcgttgcaaggcgaggcagcttgagttaaacgaacgtacttgcagatgtgacaagccgaggcggtgagccgggcaggaggaaggagcctccctcagggtttcgggaaccagatctctcaccaggaaagactgatacagaacgatcgatacagaaaccacgctgccgccaccacaccatcaccatcgacagaacagtccttaatccagaaacctgaaatgaaggaagaggagactctgcgcagagcactttgggtccggagggcgagactccggcggaagcattcccgggcgggtgacccagcacggtccctcttggaattggattcgccattttatttttcttgctgctaaatcaccgagcccggaagattagagagttttatttctgggattcctgtagacacacccacccacatacatacatttatatatatatatattatatatatataaaaataaatatctctattttatatatataaaatatatatattctttttttaaattaacagtgctaatgttattggtgtcttcactggatgtatttgactgctgtggacttgagttgggaggggaatgttcccactcagatcctgacagggaagaggaggagatgagagactctggcatgatcttttttttgtcccacttggtggggccagggtcctctcccctgcccaggaatgtgcaaggccagggcatgggggcaaatatgacccagttttgggaacaccgacaaacccagccctggcgctgagcctctctaccccaggtcagacggacagaaagacagatcacaggtacagggatgaggacaccggctctgaccaggagtttggggagcttcaggacattgctgtgctttggggattccctccacatgctgcacgcgcatctcgcccccaggggcactgcctggaagattcaggagcctgggcggccttcgcttactctcacctgcttctgagttgcccaggagaccactggcagatgtcccggcgaagagaagagacacattgttggaagaagcagcccatgacagctccccttcctgggactcgccctcatcctcttcctgctccccttcctggggtgcagcctaaaaggacctatgtcctcacaccattgaaaccactagttctgtccccccaggagacctggttgtgtgtgtgtgagtggttgaccttcctccatcccctggtccttcccttcccttcccgaggcacagagagacagggcaggatccacgtgcccattgtggaggcagagaaaagagaaagtgttttatatacggtacttatttaatatccctttttaattagaaattaaaacagttaatttaattaaagagtagggttttttttcagtattcttggttaatatttaatttcaactatttatgagatgtatcttttgctctctcttgctctcttatttgtaccggtttttgtatataaaattcatgtttccaatctctctctccctgatcggtgacagtcactagcttatcttgaacagatatttaattttgctaacactcagctctgccctccccgatcccctggctccccagcacacattcctttgaaataaggtttcaatatacatctacatactatatatatatttggcaacttgtatttgtgtgtatatatatatatatatgtttatgtatatatgtgattctgataaaatagacattgctattctgttttttatatgtaaaaacaaaacaagaaaaaatagagaattctacatactaaatctctctccttttttaattttaatatttgttatcatttatttattggtgctactgtttatccgtaataattgtggggaaaagatattaacatcacgtctttgtctctagtgcagtttttcgagatattccgtagtacatatttatttttaaacaacgacaaagaaatacagatatatcttaaaaaaaaaaaagcattttgtattaaagaatttaattctgatctcaaaaaaaaaaaaa

SEQ ID NO: 592 - protein, 412 aa, Homo sapiens
MTDRQTDTAPSPSYHLLPGRRRTVDAAASRGQGPEPAPGGGVEGVGARGVALKLFVQLLGCSRFGGAVVRAGEAEPSGAARSASSGREEPQPEEGEEEEEKEEERGPQWRLGARKPGSWTGEAAVCADSAPAARAPQALARASGRGGRVARRGAEESGPPHSPSRRGSASRAGPGRASETMNFLLSWVHWSLALLLYLHHAKWSQAAPMAEGGGQNHHEVVKFMDVYQRSYCHPIETLVDIFQEYPDEIEYIFKPSCVPLMRCGGCCNDEGLECVPTEESNITMQIMRIKPHQGQHIGEMSFLQHNKCECRPKKDRARQEKKSVRGKGKGQKRKRKKSRYKSWSVYVGARCCLMPWSLPGPHPCGPCSERRKHLFVQDPQTCKCSCKNTDSRCKARQLELNERTCRCDKPRR

SEQ ID NO: 593 - DNA, 3596 bp, Homo sapiens
ggcttggggcagccgggtagctcggaggtcgtggcgctgggggctagcaccagcgctctgtcgggaggcgcagcggttaggtggaccggtcagcggactcaccggccagggcgctcggtgctggaatttgatattcattgatccgggttttatccctcttcttttttcttaaacatttttttttaaaactgtattgtttctcgttttaatttatttttgcttgccattccccacttgaatcgggccgacggcttggggagattgctctacttccccaaatcactgtggattttggaaaccagcagaaagaggaaagaggtagcaagagctccagagagaagtcgaggaagagagagacggggtcagagagagcgcgcgggcgtgcgagcagcgaaagcgacaggggcaaagtgagtgacctgcttttgggggtgaccgccggagcgcggcgtgagccctcccccttgggatcccgcagctgaccagtcgcgctgacggacagacagacagacaccgcccccagccccagctaccacctcctccccggccggcggcggacagtggacgcggcggcgagccgcgggcaggggccggagcccgcgcccggaggcggggtggagggggtcggggctcgcggcgtcgcactgaaacttttcgtccaacttctgggctgttctcgcttcggaggagccgtggtccgcgcgggggaagccgagccgagcggagccgcgagaagtgctagctcgggccgggaggagccgcagccggaggagggggaggaggaagaagagaaggaagaggagagggggccgcagtggcgactcggcgctcggaagccgggctcatggacgggtgaggcggcggtgtgcgcagacagtgctccagccgcgcgcgctccccaggccctggcccgggcctcgggccggggaggaagagtagctcgccgaggcgccgaggagagcgggccgccccacagcccgagccggagagggagcgcgagccgcgccggccccggtcgggcctccgaaaccatgaactttctgctgtcttgggtgcattggagccttgccttgctgctctacctccaccatgccaagtggtcccaggctgcacccatggcagaaggaggagggcagaatcatcacgaagtggtgaagttcatggatgtctatcagcgcagctactgccatccaatcgagaccctggtggacatcttccaggagtaccctgatgagatcgagtacatcttcaagccatcctgtgtgcccctgatgcgatgcgggggctgctgcaatgacgagggcctggagtgtgtgcccactgaggagtccaacatcaccatgcagattatgcggatcaaacctcaccaaggccagcacataggagagatgagcttcctacagcacaacaaatgtgaatgcagaccaaagaaagatagagcaagacaagaaaaaaaatcagttcgaggaaagggaaaggggcaaaaacgaaagcgcaagaaatcccgtccctgtgggccttgctcagagcggagaaagcatttgtttgtacaagatccgcagacgtgtaaatgttcctgcaaaaacacagactcgcgttgcaaggcgaggcagcttgagttaaacgaacgtacttgcagatgtgacaagccgaggcggtgagccgggcaggaggaaggagcctccctcagggtttcgggaaccagatctctcaccaggaaagactgatacagaacgatcgatacagaaaccacgctgccgccaccacaccatcaccatcgacagaacagtccttaatccagaaacctgaaatgaaggaagaggagactctgcgcagagcactttgggtccggagggcgagactccggcggaagcattcccgggcgggtgacccagcacggtccctcttggaattggattcgccattttatttttcttgctgctaaatcaccgagcccggaagattagagagttttatttctgggattcctgtagacacacccacccacatacatacatttatatatatatatattatatatatataaaaataaatatctctattttatatatataaaatatatatattctttttttaaattaacagtgctaatgttattggtgtcttcactggatgtatttgactgctgtggacttgagttgggaggggaatgttcccactcagatcctgacagggaagaggaggagatgagagactctggcatgatcttttttttgtcccacttggtggggccagggtcctctcccctgcccaggaatgtgcaaggccagggcatgggggcaaatatgacccagttttgggaacaccgacaaacccagccctggcgctgagcctctctaccccaggtcagacggacagaaagacagatcacaggtacagggatgaggacaccggctctgaccaggagtttggggagcttcaggacattgctgtgctttggggattccctccacatgctgcacgcgcatctcgcccccaggggcactgcctggaagattcaggagcctgggcggccttcgcttactctcacctgcttctgagttgcccaggagaccactggcagatgtcccggcgaagagaagagacacattgttggaagaagcagcccatgacagctccccttcctgggactcgccctcatcctcttcctgctccccttcctggggtgcagcctaaaaggacctatgtcctcacaccattgaaaccactagttctgtccccccaggagacctggttgtgtgtgtgtgagtggttgaccttcctccatcccctggtccttcccttcccttcccgaggcacagagagacagggcaggatccacgtgcccattgtggaggcagagaaaagagaaagtgttttatatacggtacttatttaatatccctttttaattagaaattaaaacagttaatttaattaaagagtagggttttttttcagtattcttggttaatatttaatttcaactatttatgagatgtatcttttgctctctcttgctctcttatttgtaccggtttttgtatataaaattcatgtttccaatctctctctccctgatcggtgacagtcactagcttatcttgaacagatatttaattttgctaacactcagctctgccctccccgatcccctggctccccagcacacattcctttgaaataaggtttcaatatacatctacatactatatatatatttggcaacttgtatttgtgtgtatatatatatatatatgtttatgtatatatgtgattctgataaaatagacattgctattctgttttttatatgtaaaaacaaaacaagaaaaaatagagaattctacatactaaatctctctccttttttaattttaatatttgttatcatttatttattggtgctactgtttatccgtaataattgtggggaaaagatattaacatcacgtctttgtctctagtgcagtttttcgagatattccgtagtacatatttatttttaaacaacgacaaagaaatacagatatatcttaaaaaaaaaaaagcattttgtattaaagaatttaattctgatctcaaaaaaaaaaaaa

SEQ ID NO: 594 - protein, 389 aa, Homo sapiens
MTDRQTDTAPSPSYHLLPGRRRTVDAAASRGQGPEPAPGGGVEGVGARGVALKLFVQLLGCSRFGGAVVRAGEAEPSGAARSASSGREEPQPEEGEEEEEKEEERGPQWRLGARKPGSWTGEAAVCADSAPAARAPQALARASGRGGRVARRGAEESGPPHSPSRRGSASRAGPGRASETMNFLLSWVHWSLALLLYLHHAKWSQAAPMAEGGGQNHHEVVKFMDVYQRSYCHPIETLVDIFQEYPDEIEYIFKPSCVPLMRCGGCCNDEGLECVPTEESNITMQIMRIKPHQGQHIGEMSFLQHNKCECRPKKDRARQEKKSVRGKGKGQKRKRKKSRPCGPCSERRKHLFVQDPQTCKCSCKNTDSRCKARQLELNERTCRCDKPRR

SEQ ID NO: 595 - DNA, 3542 bp, Homo sapiens
ggcttggggcagccgggtagctcggaggtcgtggcgctgggggctagcaccagcgctctgtcgggaggcgcagcggttaggtggaccggtcagcggactcaccggccagggcgctcggtgctggaatttgatattcattgatccgggttttatccctcttcttttttcttaaacatttttttttaaaactgtattgtttctcgttttaatttatttttgcttgccattccccacttgaatcgggccgacggcttggggagattgctctacttccccaaatcactgtggattttggaaaccagcagaaagaggaaagaggtagcaagagctccagagagaagtcgaggaagagagagacggggtcagagagagcgcgcgggcgtgcgagcagcgaaagcgacaggggcaaagtgagtgacctgcttttgggggtgaccgccggagcgcggcgtgagccctcccccttgggatcccgcagctgaccagtcgcgctgacggacagacagacagacaccgcccccagccccagctaccacctcctccccggccggcggcggacagtggacgcggcggcgagccgcgggcaggggccggagcccgcgcccggaggcggggtggagggggtcggggctcgcggcgtcgcactgaaacttttcgtccaacttctgggctgttctcgcttcggaggagccgtggtccgcgcgggggaagccgagccgagcggagccgcgagaagtgctagctcgggccgggaggagccgcagccggaggagggggaggaggaagaagagaaggaagaggagagggggccgcagtggcgactcggcgctcggaagccgggctcatggacgggtgaggcggcggtgtgcgcagacagtgctccagccgcgcgcgctccccaggccctggcccgggcctcgggccggggaggaagagtagctcgccgaggcgccgaggagagcgggccgccccacagcccgagccggagagggagcgcgagccgcgccggccccggtcgggcctccgaaaccatgaactttctgctgtcttgggtgcattggagccttgccttgctgctctacctccaccatgccaagtggtcccaggctgcacccatggcagaaggaggagggcagaatcatcacgaagtggtgaagttcatggatgtctatcagcgcagctactgccatccaatcgagaccctggtggacatcttccaggagtaccctgatgagatcgagtacatcttcaagccatcctgtgtgcccctgatgcgatgcgggggctgctgcaatgacgagggcctggagtgtgtgcccactgaggagtccaacatcaccatgcagattatgcggatcaaacctcaccaaggccagcacataggagagatgagcttcctacagcacaacaaatgtgaatgcagaccaaagaaagatagagcaagacaagaaaatccctgtgggccttgctcagagcggagaaagcatttgtttgtacaagatccgcagacgtgtaaatgttcctgcaaaaacacagactcgcgttgcaaggcgaggcagcttgagttaaacgaacgtacttgcagatgtgacaagccgaggcggtgagccgggcaggaggaaggagcctccctcagggtttcgggaaccagatctctcaccaggaaagactgatacagaacgatcgatacagaaaccacgctgccgccaccacaccatcaccatcgacagaacagtccttaatccagaaacctgaaatgaaggaagaggagactctgcgcagagcactttgggtccggagggcgagactccggcggaagcattcccgggcgggtgacccagcacggtccctcttggaattggattcgccattttatttttcttgctgctaaatcaccgagcccggaagattagagagttttatttctgggattcctgtagacacacccacccacatacatacatttatatatatatatattatatatatataaaaataaatatctctattttatatatataaaatatatatattctttttttaaattaacagtgctaatgttattggtgtcttcactggatgtatttgactgctgtggacttgagttgggaggggaatgttcccactcagatcctgacagggaagaggaggagatgagagactctggcatgatcttttttttgtcccacttggtggggccagggtcctctcccctgcccaggaatgtgcaaggccagggcatgggggcaaatatgacccagttttgggaacaccgacaaacccagccctggcgctgagcctctctaccccaggtcagacggacagaaagacagatcacaggtacagggatgaggacaccggctctgaccaggagtttggggagcttcaggacattgctgtgctttggggattccctccacatgctgcacgcgcatctcgcccccaggggcactgcctggaagattcaggagcctgggcggccttcgcttactctcacctgcttctgagttgcccaggagaccactggcagatgtcccggcgaagagaagagacacattgttggaagaagcagcccatgacagctccccttcctgggactcgccctcatcctcttcctgctccccttcctggggtgcagcctaaaaggacctatgtcctcacaccattgaaaccactagttctgtccccccaggagacctggttgtgtgtgtgtgagtggttgaccttcctccatcccctggtccttcccttcccttcccgaggcacagagagacagggcaggatccacgtgcccattgtggaggcagagaaaagagaaagtgttttatatacggtacttatttaatatccctttttaattagaaattaaaacagttaatttaattaaagagtagggttttttttcagtattcttggttaatatttaatttcaactatttatgagatgtatcttttgctctctcttgctctcttatttgtaccggtttttgtatataaaattcatgtttccaatctctctctccctgatcggtgacagtcactagcttatcttgaacagatatttaattttgctaacactcagctctgccctccccgatcccctggctccccagcacacattcctttgaaataaggtttcaatatacatctacatactatatatatatttggcaacttgtatttgtgtgtatatatatatatatatgtttatgtatatatgtgattctgataaaatagacattgctattctgttttttatatgtaaaaacaaaacaagaaaaaatagagaattctacatactaaatctctctccttttttaattttaatatttgttatcatttatttattggtgctactgtttatccgtaataattgtggggaaaagatattaacatcacgtctttgtctctagtgcagtttttcgagatattccgtagtacatatttatttttaaacaacgacaaagaaatacagatatatcttaaaaaaaaaaaagcattttgtattaaagaatttaattctgatctcaaaaaaaaaaaaa

SEQ ID NO: 596 - protein, 371 aa, Homo sapiens
MTDRQTDTAPSPSYHLLPGRRRTVDAAASRGQGPEPAPGGGVEGVGARGVALKLFVQLLGCSRFGGAVVRAGEAEPSGAARSASSGREEPQPEEGEEEEEKEEERGPQWRLGARKPGSWTGEAAVCADSAPAARAPQALARASGRGGRVARRGAEESGPPHSPSRRGSASRAGPGRASETMNFLLSWVHWSLALLLYLHHAKWSQAAPMAEGGGQNHHEVVKFMDVYQRSYCHPIETLVDIFQEYPDEIEYIFKPSCVPLMRCGGCCNDEGLECVPTEESNITMQIMRIKPHQGQHIGEMSFLQHNKCECRPKKDRARQENPCGPCSERRKHLFVQDPQTCKCSCKNTDSRCKARQLELNERTCRCDKPRR

SEQ ID NO: 597 - DNA, 3507 bp, Homo sapiens
ggcttggggcagccgggtagctcggaggtcgtggcgctgggggctagcaccagcgctctgtcgggaggcgcagcggttaggtggaccggtcagcggactcaccggccagggcgctcggtgctggaatttgatattcattgatccgggttttatccctcttcttttttcttaaacatttttttttaaaactgtattgtttctcgttttaatttatttttgcttgccattccccacttgaatcgggccgacggcttggggagattgctctacttccccaaatcactgtggattttggaaaccagcagaaagaggaaagaggtagcaagagctccagagagaagtcgaggaagagagagacggggtcagagagagcgcgcgggcgtgcgagcagcgaaagcgacaggggcaaagtgagtgacctgcttttgggggtgaccgccggagcgcggcgtgagccctcccccttgggatcccgcagctgaccagtcgcgctgacggacagacagacagacaccgcccccagccccagctaccacctcctccccggccggcggcggacagtggacgcggcggcgagccgcgggcaggggccggagcccgcgcccggaggcggggtggagggggtcggggctcgcggcgtcgcactgaaacttttcgtccaacttctgggctgttctcgcttcggaggagccgtggtccgcgcgggggaagccgagccgagcggagccgcgagaagtgctagctcgggccgggaggagccgcagccggaggagggggaggaggaagaagagaaggaagaggagagggggccgcagtggcgactcggcgctcggaagccgggctcatggacgggtgaggcggcggtgtgcgcagacagtgctccagccgcgcgcgctccccaggccctggcccgggcctcgggccggggaggaagagtagctcgccgaggcgccgaggagagcgggccgccccacagcccgagccggagagggagcgcgagccgcgccggccccggtcgggcctccgaaaccatgaactttctgctgtcttgggtgcattggagccttgccttgctgctctacctccaccatgccaagtggtcccaggctgcacccatggcagaaggaggagggcagaatcatcacgaagtggtgaagttcatggatgtctatcagcgcagctactgccatccaatcgagaccctggtggacatcttccaggagtaccctgatgagatcgagtacatcttcaagccatcctgtgtgcccctgatgcgatgcgggggctgctgcaatgacgagggcctggagtgtgtgcccactgaggagtccaacatcaccatgcagattatgcggatcaaacctcaccaaggccagcacataggagagatgagcttcctacagcacaacaaatgtgaatgcagaccaaagaaagatagagcaagacaagaaaatccctgtgggccttgctcagagcggagaaagcatttgtttgtacaagatccgcagacgtgtaaatgttcctgcaaaaacacagactcgcgttgcaagatgtgacaagccgaggcggtgagccgggcaggaggaaggagcctccctcagggtttcgggaaccagatctctcaccaggaaagactgatacagaacgatcgatacagaaaccacgctgccgccaccacaccatcaccatcgacagaacagtccttaatccagaaacctgaaatgaaggaagaggagactctgcgcagagcactttgggtccggagggcgagactccggcggaagcattcccgggcgggtgacccagcacggtccctcttggaattggattcgccattttatttttcttgctgctaaatcaccgagcccggaagattagagagttttatttctgggattcctgtagacacacccacccacatacatacatttatatatatatatattatatatatataaaaataaatatctctattttatatatataaaatatatatattctttttttaaattaacagtgctaatgttattggtgtcttcactggatgtatttgactgctgtggacttgagttgggaggggaatgttcccactcagatcctgacagggaagaggaggagatgagagactctggcatgatcttttttttgtcccacttggtggggccagggtcctctcccctgcccaggaatgtgcaaggccagggcatgggggcaaatatgacccagttttgggaacaccgacaaacccagccctggcgctgagcctctctaccccaggtcagacggacagaaagacagatcacaggtacagggatgaggacaccggctctgaccaggagtttggggagcttcaggacattgctgtgctttggggattccctccacatgctgcacgcgcatctcgcccccaggggcactgcctggaagattcaggagcctgggcggccttcgcttactctcacctgcttctgagttgcccaggagaccactggcagatgtcccggcgaagagaagagacacattgttggaagaagcagcccatgacagctccccttcctgggactcgccctcatcctcttcctgctccccttcctggggtgcagcctaaaaggacctatgtcctcacaccattgaaaccactagttctgtccccccaggagacctggttgtgtgtgtgtgagtggttgaccttcctccatcccctggtccttcccttcccttcccgaggcacagagagacagggcaggatccacgtgcccattgtggaggcagagaaaagagaaagtgttttatatacggtacttatttaatatccctttttaattagaaattaaaacagttaatttaattaaagagtagggttttttttcagtattcttggttaatatttaatttcaactatttatgagatgtatcttttgctctctcttgctctcttatttgtaccggtttttgtatataaaattcatgtttccaatctctctctccctgatcggtgacagtcactagcttatcttgaacagatatttaattttgctaacactcagctctgccctccccgatcccctggctccccagcacacattcctttgaaataaggtttcaatatacatctacatactatatatatatttggcaacttgtatttgtgtgtatatatatatatatatgtttatgtatatatgtgattctgataaaatagacattgctattctgttttttatatgtaaaaacaaaacaagaaaaaatagagaattctacatactaaatctctctccttttttaattttaatatttgttatcatttatttattggtgctactgtttatccgtaataattgtggggaaaagatattaacatcacgtctttgtctctagtgcagtttttcgagatattccgtagtacatatttatttttaaacaacgacaaagaaatacagatatatcttaaaaaaaaaaaagcattttgtattaaagaatttaattctgatctcaaaaaaaaaaaaa

SEQ ID NO: 598 - protein, 354 aa, Homo sapiens
MTDRQTDTAPSPSYHLLPGRRRTVDAAASRGQGPEPAPGGGVEGVGARGVALKLFVQLLGCSRFGGAVVRAGEAEPSGAARSASSGREEPQPEEGEEEEEKEEERGPQWRLGARKPGSWTGEAAVCADSAPAARAPQALARASGRGGRVARRGAEESGPPHSPSRRGSASRAGPGRASETMNFLLSWVHWSLALLLYLHHAKWSQAAPMAEGGGQNHHEVVKFMDVYQRSYCHPIETLVDIFQEYPDEIEYIFKPSCVPLMRCGGCCNDEGLECVPTEESNITMQIMRIKPHQGQHIGEMSFLQHNKCECRPKKDRARQENPCGPCSERRKHLFVQDPQTCKCSCKNTDSRCKM

SEQ ID NO: 599 - DNA, 3410 bp, Homo sapiens
ggcttggggcagccgggtagctcggaggtcgtggcgctgggggctagcaccagcgctctgtcgggaggcgcagcggttaggtggaccggtcagcggactcaccggccagggcgctcggtgctggaatttgatattcattgatccgggttttatccctcttcttttttcttaaacatttttttttaaaactgtattgtttctcgttttaatttatttttgcttgccattccccacttgaatcgggccgacggcttggggagattgctctacttccccaaatcactgtggattttggaaaccagcagaaagaggaaagaggtagcaagagctccagagagaagtcgaggaagagagagacggggtcagagagagcgcgcgggcgtgcgagcagcgaaagcgacaggggcaaagtgagtgacctgcttttgggggtgaccgccggagcgcggcgtgagccctcccccttgggatcccgcagctgaccagtcgcgctgacggacagacagacagacaccgcccccagccccagctaccacctcctccccggccggcggcggacagtggacgcggcggcgagccgcgggcaggggccggagcccgcgcccggaggcggggtggagggggtcggggctcgcggcgtcgcactgaaacttttcgtccaacttctgggctgttctcgcttcggaggagccgtggtccgcgcgggggaagccgagccgagcggagccgcgagaagtgctagctcgggccgggaggagccgcagccggaggagggggaggaggaagaagagaaggaagaggagagggggccgcagtggcgactcggcgctcggaagccgggctcatggacgggtgaggcggcggtgtgcgcagacagtgctccagccgcgcgcgctccccaggccctggcccgggcctcgggccggggaggaagagtagctcgccgaggcgccgaggagagcgggccgccccacagcccgagccggagagggagcgcgagccgcgccggccccggtcgggcctccgaaaccatgaactttctgctgtcttgggtgcattggagccttgccttgctgctctacctccaccatgccaagtggtcccaggctgcacccatggcagaaggaggagggcagaatcatcacgaagtggtgaagttcatggatgtctatcagcgcagctactgccatccaatcgagaccctggtggacatcttccaggagtaccctgatgagatcgagtacatcttcaagccatcctgtgtgcccctgatgcgatgcgggggctgctgcaatgacgagggcctggagtgtgtgcccactgaggagtccaacatcaccatgcagattatgcggatcaaacctcaccaaggccagcacataggagagatgagcttcctacagcacaacaaatgtgaatgcagaccaaagaaagatagagcaagacaagaaaaatgtgacaagccgaggcggtgagccgggcaggaggaaggagcctccctcagggtttcgggaaccagatctctcaccaggaaagactgatacagaacgatcgatacagaaaccacgctgccgccaccacaccatcaccatcgacagaacagtccttaatccagaaacctgaaatgaaggaagaggagactctgcgcagagcactttgggtccggagggcgagactccggcggaagcattcccgggcgggtgacccagcacggtccctcttggaattggattcgccattttatttttcttgctgctaaatcaccgagcccggaagattagagagttttatttctgggattcctgtagacacacccacccacatacatacatttatatatatatatattatatatatataaaaataaatatctctattttatatatataaaatatatatattctttttttaaattaacagtgctaatgttattggtgtcttcactggatgtatttgactgctgtggacttgagttgggaggggaatgttcccactcagatcctgacagggaagaggaggagatgagagactctggcatgatcttttttttgtcccacttggtggggccagggtcctctcccctgcccaggaatgtgcaaggccagggcatgggggcaaatatgacccagttttgggaacaccgacaaacccagccctggcgctgagcctctctaccccaggtcagacggacagaaagacagatcacaggtacagggatgaggacaccggctctgaccaggagtttggggagcttcaggacattgctgtgctttggggattccctccacatgctgcacgcgcatctcgcccccaggggcactgcctggaagattcaggagcctgggcggccttcgcttactctcacctgcttctgagttgcccaggagaccactggcagatgtcccggcgaagagaagagacacattgttggaagaagcagcccatgacagctccccttcctgggactcgccctcatcctcttcctgctccccttcctggggtgcagcctaaaaggacctatgtcctcacaccattgaaaccactagttctgtccccccaggagacctggttgtgtgtgtgtgagtggttgaccttcctccatcccctggtccttcccttcccttcccgaggcacagagagacagggcaggatccacgtgcccattgtggaggcagagaaaagagaaagtgttttatatacggtacttatttaatatccctttttaattagaaattaaaacagttaatttaattaaagagtagggttttttttcagtattcttggttaatatttaatttcaactatttatgagatgtatcttttgctctctcttgctctcttatttgtaccggtttttgtatataaaattcatgtttccaatctctctctccctgatcggtgacagtcactagcttatcttgaacagatatttaattttgctaacactcagctctgccctccccgatcccctggctccccagcacacattcctttgaaataaggtttcaatatacatctacatactatatatatatttggcaacttgtatttgtgtgtatatatatatatatatgtttatgtatatatgtgattctgataaaatagacattgctattctgttttttatatgtaaaaacaaaacaagaaaaaatagagaattctacatactaaatctctctccttttttaattttaatatttgttatcatttatttattggtgctactgtttatccgtaataattgtggggaaaagatattaacatcacgtctttgtctctagtgcagtttttcgagatattccgtagtacatatttatttttaaacaacgacaaagaaatacagatatatcttaaaaaaaaaaaagcattttgtattaaagaatttaattctgatctcaaaaaaaaaaaaa

SEQ ID NO: 600 - protein, 327 aa, Homo sapiens
MTDRQTDTAPSPSYHLLPGRRRTVDAAASRGQGPEPAPGGGVEGVGARGVALKLFVQLLGCSRFGGAVVRAGEAEPSGAARSASSGREEPQPEEGEEEEEKEEERGPQWRLGARKPGSWTGEAAVCADSAPAARAPQALARASGRGGRVARRGAEESGPPHSPSRRGSASRAGPGRASETMNFLLSWVHWSLALLLYLHHAKWSQAAPMAEGGGQNHHEVVKFMDVYQRSYCHPIETLVDIFQEYPDEIEYIFKPSCVPLMRCGGCCNDEGLECVPTEESNITMQIMRIKPHQGQHIGEMSFLQHNKCECRPKKDRARQEKCDKPRR

SEQ ID NO: 601 - DNA, 3476 bp, Homo sapiens
ggcttggggcagccgggtagctcggaggtcgtggcgctgggggctagcaccagcgctctgtcgggaggcgcagcggttaggtggaccggtcagcggactcaccggccagggcgctcggtgctggaatttgatattcattgatccgggttttatccctcttcttttttcttaaacatttttttttaaaactgtattgtttctcgttttaatttatttttgcttgccattccccacttgaatcgggccgacggcttggggagattgctctacttccccaaatcactgtggattttggaaaccagcagaaagaggaaagaggtagcaagagctccagagagaagtcgaggaagagagagacggggtcagagagagcgcgcgggcgtgcgagcagcgaaagcgacaggggcaaagtgagtgacctgcttttgggggtgaccgccggagcgcggcgtgagccctcccccttgggatcccgcagctgaccagtcgcgctgacggacagacagacagacaccgcccccagccccagctaccacctcctccccggccggcggcggacagtggacgcggcggcgagccgcgggcaggggccggagcccgcgcccggaggcggggtggagggggtcggggctcgcggcgtcgcactgaaacttttcgtccaacttctgggctgttctcgcttcggaggagccgtggtccgcgcgggggaagccgagccgagcggagccgcgagaagtgctagctcgggccgggaggagccgcagccggaggagggggaggaggaagaagagaaggaagaggagagggggccgcagtggcgactcggcgctcggaagccgggctcatggacgggtgaggcggcggtgtgcgcagacagtgctccagccgcgcgcgctccccaggccctggcccgggcctcgggccggggaggaagagtagctcgccgaggcgccgaggagagcgggccgccccacagcccgagccggagagggagcgcgagccgcgccggccccggtcgggcctccgaaaccatgaactttctgctgtcttgggtgcattggagccttgccttgctgctctacctccaccatgccaagtggtcccaggctgcacccatggcagaaggaggagggcagaatcatcacgaagtggtgaagttcatggatgtctatcagcgcagctactgccatccaatcgagaccctggtggacatcttccaggagtaccctgatgagatcgagtacatcttcaagccatcctgtgtgcccctgatgcgatgcgggggctgctgcaatgacgagggcctggagtgtgtgcccactgaggagtccaacatcaccatgcagattatgcggatcaaacctcaccaaggccagcacataggagagatgagcttcctacagcacaacaaatgtgaatgcagaccaaagaaagatagagcaagacaagaaaatccctgtgggccttgctcagagcggagaaagcatttgtttgtacaagatccgcagacgtgtaaatgttcctgcaaaaacacagactcgcgttgcaaggcgaggcagcttgagttaaacgaacgtacttgcagatctctcaccaggaaagactgatacagaacgatcgatacagaaaccacgctgccgccaccacaccatcaccatcgacagaacagtccttaatccagaaacctgaaatgaaggaagaggagactctgcgcagagcactttgggtccggagggcgagactccggcggaagcattcccgggcgggtgacccagcacggtccctcttggaattggattcgccattttatttttcttgctgctaaatcaccgagcccggaagattagagagttttatttctgggattcctgtagacacacccacccacatacatacatttatatatatatatattatatatatataaaaataaatatctctattttatatatataaaatatatatattctttttttaaattaacagtgctaatgttattggtgtcttcactggatgtatttgactgctgtggacttgagttgggaggggaatgttcccactcagatcctgacagggaagaggaggagatgagagactctggcatgatcttttttttgtcccacttggtggggccagggtcctctcccctgcccaggaatgtgcaaggccagggcatgggggcaaatatgacccagttttgggaacaccgacaaacccagccctggcgctgagcctctctaccccaggtcagacggacagaaagacagatcacaggtacagggatgaggacaccggctctgaccaggagtttggggagcttcaggacattgctgtgctttggggattccctccacatgctgcacgcgcatctcgcccccaggggcactgcctggaagattcaggagcctgggcggccttcgcttactctcacctgcttctgagttgcccaggagaccactggcagatgtcccggcgaagagaagagacacattgttggaagaagcagcccatgacagctccccttcctgggactcgccctcatcctcttcctgctccccttcctggggtgcagcctaaaaggacctatgtcctcacaccattgaaaccactagttctgtccccccaggagacctggttgtgtgtgtgtgagtggttgaccttcctccatcccctggtccttcccttcccttcccgaggcacagagagacagggcaggatccacgtgcccattgtggaggcagagaaaagagaaagtgttttatatacggtacttatttaatatccctttttaattagaaattaaaacagttaatttaattaaagagtagggttttttttcagtattcttggttaatatttaatttcaactatttatgagatgtatcttttgctctctcttgctctcttatttgtaccggtttttgtatataaaattcatgtttccaatctctctctccctgatcggtgacagtcactagcttatcttgaacagatatttaattttgctaacactcagctctgccctccccgatcccctggctccccagcacacattcctttgaaataaggtttcaatatacatctacatactatatatatatttggcaacttgtatttgtgtgtatatatatatatatatgtttatgtatatatgtgattctgataaaatagacattgctattctgttttttatatgtaaaaacaaaacaagaaaaaatagagaattctacatactaaatctctctccttttttaattttaatatttgttatcatttatttattggtgctactgtttatccgtaataattgtggggaaaagatattaacatcacgtctttgtctctagtgcagtttttcgagatattccgtagtacatatttatttttaaacaacgacaaagaaatacagatatatcttaaaaaaaaaaaagcattttgtattaaagaatttaattctgatctcaaaaaaaaaaaaa

SEQ ID NO: 602 - protein, 371 aa, Homo sapiens
MTDRQTDTAPSPSYHLLPGRRRTVDAAASRGQGPEPAPGGGVEGVGARGVALKLFVQLLGCSRFGGAVVRAGEAEPSGAARSASSGREEPQPEEGEEEEEKEEERGPQWRLGARKPGSWTGEAAVCADSAPAARAPQALARASGRGGRVARRGAEESGPPHSPSRRGSASRAGPGRASETMNFLLSWVHWSLALLLYLHHAKWSQAAPMAEGGGQNHHEVVKFMDVYQRSYCHPIETLVDIFQEYPDEIEYIFKPSCVPLMRCGGCCNDEGLECVPTEESNITMQIMRIKPHQGQHIGEMSFLQHNKCECRPKKDRARQENPCGPCSERRKHLFVQDPQTCKCSCKNTDSRCKARQLELNERTCRSLTRKD

SEQ ID NO: 603 - DNA, 3614 bp, Homo sapiens
ggcttggggcagccgggtagctcggaggtcgtggcgctgggggctagcaccagcgctctgtcgggaggcgcagcggttaggtggaccggtcagcggactcaccggccagggcgctcggtgctggaatttgatattcattgatccgggttttatccctcttcttttttcttaaacatttttttttaaaactgtattgtttctcgttttaatttatttttgcttgccattccccacttgaatcgggccgacggcttggggagattgctctacttccccaaatcactgtggattttggaaaccagcagaaagaggaaagaggtagcaagagctccagagagaagtcgaggaagagagagacggggtcagagagagcgcgcgggcgtgcgagcagcgaaagcgacaggggcaaagtgagtgacctgcttttgggggtgaccgccggagcgcggcgtgagccctcccccttgggatcccgcagctgaccagtcgcgctgacggacagacagacagacaccgcccccagccccagctaccacctcctccccggccggcggcggacagtggacgcggcggcgagccgcgggcaggggccggagcccgcgcccggaggcggggtggagggggtcggggctcgcggcgtcgcactgaaacttttcgtccaacttctgggctgttctcgcttcggaggagccgtggtccgcgcgggggaagccgagccgagcggagccgcgagaagtgctagctcgggccgggaggagccgcagccggaggagggggaggaggaagaagagaaggaagaggagagggggccgcagtggcgactcggcgctcggaagccgggctcatggacgggtgaggcggcggtgtgcgcagacagtgctccagccgcgcgcgctccccaggccctggcccgggcctcgggccggggaggaagagtagctcgccgaggcgccgaggagagcgggccgccccacagcccgagccggagagggagcgcgagccgcgccggccccggtcgggcctccgaaaccatgaactttctgctgtcttgggtgcattggagccttgccttgctgctctacctccaccatgccaagtggtcccaggctgcacccatggcagaaggaggagggcagaatcatcacgaagtggtgaagttcatggatgtctatcagcgcagctactgccatccaatcgagaccctggtggacatcttccaggagtaccctgatgagatcgagtacatcttcaagccatcctgtgtgcccctgatgcgatgcgggggctgctgcaatgacgagggcctggagtgtgtgcccactgaggagtccaacatcaccatgcagattatgcggatcaaacctcaccaaggccagcacataggagagatgagcttcctacagcacaacaaatgtgaatgcagaccaaagaaagatagagcaagacaagaaaaaaaatcagttcgaggaaagggaaaggggcaaaaacgaaagcgcaagaaatcccggtataagtcctggagcgttccctgtgggccttgctcagagcggagaaagcatttgtttgtacaagatccgcagacgtgtaaatgttcctgcaaaaacacagactcgcgttgcaaggcgaggcagcttgagttaaacgaacgtacttgcagatgtgacaagccgaggcggtgagccgggcaggaggaaggagcctccctcagggtttcgggaaccagatctctcaccaggaaagactgatacagaacgatcgatacagaaaccacgctgccgccaccacaccatcaccatcgacagaacagtccttaatccagaaacctgaaatgaaggaagaggagactctgcgcagagcactttgggtccggagggcgagactccggcggaagcattcccgggcgggtgacccagcacggtccctcttggaattggattcgccattttatttttcttgctgctaaatcaccgagcccggaagattagagagttttatttctgggattcctgtagacacacccacccacatacatacatttatatatatatatattatatatatataaaaataaatatctctattttatatatataaaatatatatattctttttttaaattaacagtgctaatgttattggtgtcttcactggatgtatttgactgctgtggacttgagttgggaggggaatgttcccactcagatcctgacagggaagaggaggagatgagagactctggcatgatcttttttttgtcccacttggtggggccagggtcctctcccctgcccaggaatgtgcaaggccagggcatgggggcaaatatgacccagttttgggaacaccgacaaacccagccctggcgctgagcctctctaccccaggtcagacggacagaaagacagatcacaggtacagggatgaggacaccggctctgaccaggagtttggggagcttcaggacattgctgtgctttggggattccctccacatgctgcacgcgcatctcgcccccaggggcactgcctggaagattcaggagcctgggcggccttcgcttactctcacctgcttctgagttgcccaggagaccactggcagatgtcccggcgaagagaagagacacattgttggaagaagcagcccatgacagctccccttcctgggactcgccctcatcctcttcctgctccccttcctggggtgcagcctaaaaggacctatgtcctcacaccattgaaaccactagttctgtccccccaggagacctggttgtgtgtgtgtgagtggttgaccttcctccatcccctggtccttcccttcccttcccgaggcacagagagacagggcaggatccacgtgcccattgtggaggcagagaaaagagaaagtgttttatatacggtacttatttaatatccctttttaattagaaattaaaacagttaatttaattaaagagtagggttttttttcagtattcttggttaatatttaatttcaactatttatgagatgtatcttttgctctctcttgctctcttatttgtaccggtttttgtatataaaattcatgtttccaatctctctctccctgatcggtgacagtcactagcttatcttgaacagatatttaattttgctaacactcagctctgccctccccgatcccctggctccccagcacacattcctttgaaataaggtttcaatatacatctacatactatatatatatttggcaacttgtatttgtgtgtatatatatatatatatgtttatgtatatatgtgattctgataaaatagacattgctattctgttttttatatgtaaaaacaaaacaagaaaaaatagagaattctacatactaaatctctctccttttttaattttaatatttgttatcatttatttattggtgctactgtttatccgtaataattgtggggaaaagatattaacatcacgtctttgtctctagtgcagtttttcgagatattccgtagtacatatttatttttaaacaacgacaaagaaatacagatatatcttaaaaaaaaaaaagcattttgtattaaagaatttaattctgatctcaaaaaaaaaaaaa

SEQ ID NO: 604 - protein, 395 aa, Homo sapiens
MTDRQTDTAPSPSYHLLPGRRRTVDAAASRGQGPEPAPGGGVEGVGARGVALKLFVQLLGCSRFGGAVVRAGEAEPSGAARSASSGREEPQPEEGEEEEEKEEERGPQWRLGARKPGSWTGEAAVCADSAPAARAPQALARASGRGGRVARRGAEESGPPHSPSRRGSASRAGPGRASETMNFLLSWVHWSLALLLYLHHAKWSQAAPMAEGGGQNHHEVVKFMDVYQRSYCHPIETLVDIFQEYPDEIEYIFKPSCVPLMRCGGCCNDEGLECVPTEESNITMQIMRIKPHQGQHIGEMSFLQHNKCECRPKKDRARQEKKSVRGKGKGQKRKRKKSRYKSWSVPCGPCSERRKHLFVQDPQTCKCSCKNTDSRCKARQLELNERTCRCDKPRR

SEQ ID NO: 605 - DNA, 1380 bp, Homo sapiens
agttgccagttggttcgttggtccgtggaggcctctgagcacagacccgggcctcccctggggaagggggtgggaagaccccgaggtggaaaagaaggagcaccttgagctggatgggggctgcagcgagcctggttcgggctgggggcggactcgctggggctcccagggcttccaaaccacgaaacgcccaggtggagggagtaaggctcccgtttagaggccagtcctgccctcctgactttcggtggcttgtggaatttgtttgttttgactgatacctttcttacgagggactttctttgtctctgggttgcttctaatatttaaaatcatcatgggcacagatgagtccatccatgctcactggaaacagtccacggggctgccgtctcccctccatctcaagcacgacctgcggcagacagctggagaaggttccagaaaaaagggactctggcatgaccgaggtggagaggacctacagtgctaattgcagtgattttctggaatctaagggatgttttgccaacacaacaccctctggcaaaagtgtcagttcctcatcttcagtggaaacaggcccaagtgtcagtgagcctcctggcctccccagagtgtctgcttacgtagacaccactgctgacttggatcggaaactctccttctcacattctgatcactcctctgaaatgtcgttgcctgaagtccaaaaggataaatatcctgaggaattcagcctgcttaagttgcagacgaaagatgggcatcgtcctgagtggacattttacccaaggtttagcagcaacatccacacctaccacgtcggaaagcagtgcttctttaatggagtcttcctcggcaacaagaggtctctatcagagaggacggtggacaagtgctttgggagaaagaaatacgatattgatcccaggaatggaatcccaaagttaactccaggcgacaatccatatatgtacccagaacagagtaaaggcttccacaaagcaggatcaatgctcccaccagtgaatttttcaatagtgccttatgaaaagaaatttgatacatttattccacttgagcctcttccacaaattcccaacttgcctttctgggtgaaggagaaggccaacagtttgaaaaatgagatacaagaggttgaggagcttgacaactggcagccagcagtgcccttaatgcacatgctacacctttctggtgctttggactttccaagacaatcctgagcataaacaggcccacaaaacatgtgctgactgcactctggcgacccttttccagttgatgttttttgtcatgtgactgttctaaatccagtgtttgacccttaaaaaaaaaaaaaaaaaaaaaaaaaaa

SEQ ID NO: 606 - protein, 300 aa, Homo sapiens
MSPSMLTGNSPRGCRLPSISSTTCGRQLEKVPEKRDSGMTEVERTYSANCSDFLESKGCFANTTPSGKSVSSSSSVETGPSVSEPPGLPRVSAYVDTTADLDRKLSFSHSDHSSEMSLPEVQKDKYPEEFSLLKLQTKDGHRPEWTFYPRFSSNIHTYHVGKQCFFNGVFLGNKRSLSERTVDKCFGRKKYDIDPRNGIPKLTPGDNPYMYPEQSKGFHKAGSMLPPVNFSIVPYEKKFDTFIPLEPLPQIPNLPFWVKEKANSLKNEIQEVEELDNWQPAVPLMHMLHLSGALDFPRQS

SEQ ID NO: 607 - DNA, 3012 bp, Homo sapiens
gctttggccagagtggtttgatggttttgtgttagtcttcctgcagctgagcttccacaagacactttttccctttcagccacccaatatctcgcgagacttgctattctgcgccccctcctaccttgcgcttgcgcagatcttcaaagcagaaggtcgcgcttggaggaagtggcggctttgagtccggtggcccaatcgctgttactacttctctgaagctcctctcggctgcttgccgagacaccctgccgccaagatgcctcgaattatgatcaaggggggcgtatggaggaataccgaggatgaaattctgaaagcagcggtaatgaaatatgggaaaaatcagtggtctaggattgcctcattgctgcatagaaaatcagcaaagcagtgcaaagccagatggtatgaatggctggatccaagcattaagaagacagaatggtccagagaagaagaggaaaaactcttgcacttggccaagttgatgccaactcagtggaggaccattgctccaatcattggaagaacagcggcccagtgcttagaacactatgaatttcttctggataaagctgcccaaagagacaatgaagaggaaacaacagatgatccacgaaaacttaaacctggagaaatagatccaaatccagaaacaaaaccagcgcggcctgatccaattgatatggatgaggatgaacttgagatgctttctgaagccagagcccgcttggctaatactcagggaaagaaggccaagaggaaagcaagagagaaacaattggaagaagcaagacgtcttgctgccctccaaaaaagaagagaacttcgagcagctggcatagaaattcagaagaaaagaaaaaggaagagaggagttgattataatgccgaaatcccatttgaaaaaaagcctgcccttggtttttatgatacttctgaggaaaactaccaagctcttgacgcagatttcaggaaattaagacaacaggatcttgatggggagctaagatctgaaaaagaaggaagagatagaaaaaaagacaaacagcatttgaaaaggaaaaaagaatctgatttaccatcagctattcttcaaactagtggtgtttctgaatttactaaaaagagaagcaaactagtacttcctgcccctcagatttcagatgcagaactccaggaagttgtaaaagtaggccaagcgagtgaaattgcacgtcaaactgccgaggaatctggcataacaaattctgcttccagtacacttttgtctgagtacaatgtcaccaacaacagcgttgctcttagaacaccacgaacaccagcttcccaggacagaattctgcaggaagcccagaacctcatggccctcaccaatgtggacaccccattgaaaggtggacttaataccccattgcatgagagtgacttctcaggtgtaactccacagcgacaagttgtacagactccaaacacagttctctctactccattcaggactccttctaatggagctgaagggctgactccccggagtggaacaactcccaaaccagttattaactctactccgggtagaactcctcttcgagacaagttaaacattaatcccgaggatggaatggcagactatagtgatccctcttacgtgaagcagatggaaagagaatcccgagaacatctccgtttagggttgttgggccttcctgcccctaagaatgattttgaaattgttctaccagaaaatgccgagaaggagctggaagaacgtgaaatagatgatacttacattgaagatgctgctgatgtggatgctcgaaagcaggccatacgagatgcagagcgtgtaaaggaaatgaaacgaatgcataaagctgtccagaaagatctgccaagaccatcagaagtaaatgaaactattctaagacccttaaatgtagaaccgcctttaacagatttacagaaaagtgaagaactaatcaaaaaagaaatgatcacaatgcttcattatgaccttctacatcacccttatgaaccatctggaaataaaaaaggcaaaactgtagggtttggtaccaataattcagagcacattacctatctggaacataatccttatgaaaagttctccaaagaagagctgaaaaaggcccaggatgttttggtgcaggagatggaagtggttaaacaaggaatgagccatggagagctctcaagtgaagcttataaccaggtgtgggaagaatgctacagtcaagttttatatcttcctgggcagagccgctacacacgggccaatctggctagtaaaaaggacagaattgaatcacttgaaaagaggctcgagataaacaggggtcacatgacgacagaagccaagagggctgcaaagatggaaaagaagatgaaaattttgcttgggggttaccagtctcgtgctatggggctcatgaaacagttgaatgacttatgggaccaaattgaacaggctcacttggagttacgcacttttgaagaactcaagaaacatgaagattctgctattccccggaggctagagtgtctaaaagaagacgttcagcgacaacaagaaagagaaaaggaacttcaacatagatatgctgatttgctgctggagaaagagactttaaagtcaaaattctgaagtacagtttatattctgtcacaggattaattaattgccggttttcatactctagaaggctgaaactgatgtttatcttcattgacaaatttacccaccatctgtggtttttcagttgtttattttaaatgatatcgatcttacacattctgtgtataaagaccttaactccacaggacggacattttagagtttaaattattaaggctatcattcttttagtaatgtcatatttgcaaacttttttagttttggcctttaatttaaaaagcctaattttaaagtgctgcctttgagtaactcttgaataaaaacaaaatataaaaaattgaaaaaaaaaaaaa

SEQ ID NO: 608 - protein, 802 aa, Homo sapiens
MPRIMIKGGVWRNTEDEILKAAVMKYGKNQWSRIASLLHRKSAKQCKARWYEWLDPSIKKTEWSREEEEKLLHLAKLMPTQWRTIAPIIGRTAAQCLEHYEFLLDKAAQRDNEEETTDDPRKLKPGEIDPNPETKPARPDPIDMDEDELEMLSEARARLANTQGKKAKRKAREKQLEEARRLAALQKRRELRAAGIEIQKKRKRKRGVDYNAEIPFEKKPALGFYDTSEENYQALDADFRKLRQQDLDGELRSEKEGRDRKKDKQHLKRKKESDLPSAILQTSGVSEFTKKRSKLVLPAPQISDAELQEVVKVGQASEIARQTAEESGITNSASSTLLSEYNVTNNSVALRTPRTPASQDRILQEAQNLMALTNVDTPLKGGLNTPLHESDFSGVTPQRQVVQTPNTVLSTPFRTPSNGAEGLTPRSGTTPKPVINSTPGRTPLRDKLNINPEDGMADYSDPSYVKQMERESREHLRLGLLGLPAPKNDFEIVLPENAEKELEEREIDDTYIEDAADVDARKQAIRDAERVKEMKRMHKAVQKDLPRPSEVNETILRPLNVEPPLTDLQKSEELIKKEMITMLHYDLLHHPYEPSGNKKGKTVGFGTNNSEHITYLEHNPYEKFSKEELKKAQDVLVQEMEVVKQGMSHGELSSEAYNQVWEECYSQVLYLPGQSRYTRANLASKKDRIESLEKRLEINRGHMTTEAKRAAKMEKKMKILLGGYQSRAMGLMKQLNDLWDQIEQAHLELRTFEELKKHEDSAIPRRLECLKEDVQRQQEREKELQHRYADLLLEKETLKSKF

SEQ ID NO: 609 - DNA, 3143 bp, Homo sapiens
ctcgaggtaacctttggtggcgggaagagttcggaagttttcgcgccggggtggagtcatcctgggaacctccacgcgactttggtggaggtagttctttggcagcgggcatggcgggtaccgtggtgctggacgatgtggagctgcgggaggctcagagagattacctggacttcctggacgacgaggaagaccagggaatttatcagagcaaagttcgggagctgatcagtgacaaccaataccggctgattgtcaatgtgaatgacctgcgcaggaaaaacgagaagagggctaaccggcttctgaacaatgcctttgaggagctggttgccttccagcgggccttaaaggattttgtggcctccattgatgctacctatgccaagcagtatgaggagttctacgtaggactggaaggcagctttggctccaagcacgtctccccgcggactcttacctcctgcttcctcagctgtgtggtctgtgtggagggcattgtcactaaatgttctctagttcgtcccaaagtcgtccgcagtgtccactactgtcctgctactaagaagaccatagagcgacgttattctgatctcaccaccctggtggcctttccctccagctctgtctatcctaccaaggatgaggagaacaatccccttgagacagaatatggcctttctgtctacaaggatcaccagaccatcaccatccaggagatgccggagaaggccccagccggccagctcccccgctctgtggacgtcattctggatgatgacttggtggataaagcgaagcctggtgaccgggttcaggtggtgggaacctaccgttgccttcctggaaagaagggaggctacacctctgggaccttcaggactgtcctgattgcctgtaatgttaagcagatgagcaaggatgctcagccctctttctctgctgaggatatagccaagatcaagaagttcagtaaaacccgatccaaggatatctttgaccagctggccaagtcattggccccaagtatccatgggcatgactatgtcaagaaagcaatcctctgcttgctcttgggaggggtggaacgagacctagaaaatggcagccacatccgtggggacatcaatattcttctaataggagacccatccgttgccaagtctcagcttctgcggtatgtgctttgcactgcaccccgagctatccccaccactggccggggctcctctggagtgggtctgacggctgctgtcaccacagaccaggaaacaggagagcgccgtctggaagcaggggccatggtcctggctgaccgaggcgtggtttgcattgatgaatttgacaaaatgtctgacatggatcgcacagccatccatgaagtgatggagcagggtcgagtgaccattgccaaggctggcatccatgctcggctgaatgcccgctgcagtgttttggcagctgccaaccctgtctacggcaggtatgaccagtataagactccaatggagaacattgggctacaggactcactgctgtcacgatttgacttgctcttcatcatgctggatcagatggatcctgagcaggatcgggagatctcagaccatgtccttcggatgcaccgttacagagcacctggggagcaggatggcgatgctatgcccttgggtagtgctgtggatatcctggccacagatgatcccaactttagccaggaagatcagcaggacacccagatttatgagaagcatgacaaccttctacatgggaccaagaagaaaaaggagaagatggtgagtgcagcattcatgaagaagtacatccatgtggccaaaatcatcaagcctgtcctgacacaggagtcggccacctacattgcagaagagtattcacgcctgcgcagccaggatagcatgagctcagacaccgccaggacatctccagttacagcccgaacactggaaactctgattcgactggccacagcccatgcgaaggcccgcatgagcaagactgtggacctgcaggatgcagaggaagctgtggagttggtccagtatgcttactttaagaaggttctggagaaggagaagaaacgtaagaagcgaagtgaggatgaatcagagacagaagatgaagaggagaaaagccaagaggaccaggagcagaagaggaagagaaggaagactcgccagccagatgccaaagatggggattcatacgacccctatgacttcagtgacacagaggaggaaatgcctcaagtacacactccaaagacggcagactcacaggagaccaaggaatcccagaaagtggagttgagtgaatccaggttgaaggcattcaaggtggccctcttggatgtgttccgggaagctcatgcgcagtcaatcggcatgaatcgcctcacagaatccatcaaccgggacagcgaagagcccttctcttcagttgagatccaggctgctctgagcaagatgcaggatgacaatcaggtcatggtgtctgagggcatcatcttcctcatctgaggaggcctcgtctctgaacttgggttgtgccgagagagtttgttctgtgtttcccaccctctccctgacccaagtctttgcctctactcccttaacagtgttgaattcaactgaaggcgaggaatgttggtgatgaagctgagttcaggactcggtggaccctttgggaatgggtcatgaaagctgccatggggtgaggaaagaggagacagtgggagaggacaatgactattgcatcttcattgcaaaagcactggctcatccgccctacttcccatcccacacaaacccaattgtaaataacatatgacttctgagtacttttgggggcacaactgttttctgtttgctgtttttttgttttgttttttttctccagagcactttggtctagactaggctttgggtggttccaattggtggagagaagctctgaggcacgtcatgcaggtcaagaaagctttctttgcagtagcaccagttaaggtgaatatgtattgtatcacaaaacaaacccaatatccagatgaatatccgagatgttgaataaacttagccatttcgtacacatggtaaaaaaaaaaaaaaaaaaaaaaaaaaaaaaaa

SEQ ID NO: 610 - protein, 808 aa, Homo sapiens
MAGTVVLDDVELREAQRDYLDFLDDEEDQGIYQSKVRELISDNQYRLIVNVNDLRRKNEKRANRLLNNAFEELVAFQRALKDFVASIDATYAKQYEEFYVGLEGSFGSKHVSPRTLTSCFLSCVVCVEGIVTKCSLVRPKVVRSVHYCPATKKTIERRYSDLTTLVAFPSSSVYPTKDEENNPLETEYGLSVYKDHQTITIQEMPEKAPAGQLPRSVDVILDDDLVDKAKPGDRVQVVGTYRCLPGKKGGYTSGTFRTVLIACNVKQMSKDAQPSFSAEDIAKIKKFSKTRSKDIFDQLAKSLAPSIHGHDYVKKAILCLLLGGVERDLENGSHIRGDINILLIGDPSVAKSQLLRYVLCTAPRAIPTTGRGSSGVGLTAAVTTDQETGERRLEAGAMVLADRGVVCIDEFDKMSDMDRTAIHEVMEQGRVTIAKAGIHARLNARCSVLAAANPVYGRYDQYKTPMENIGLQDSLLSRFDLLFIMLDQMDPEQDREISDHVLRMHRYRAPGEQDGDAMPLGSAVDILATDDPNFSQEDQQDTQIYEKHDNLLHGTKKKKEKMVSAAFMKKYIHVAKIIKPVLTQESATYIAEEYSRLRSQDSMSSDTARTSPVTARTLETLIRLATAHAKARMSKTVDLQDAEEAVELVQYAYFKKVLEKEKKRKKRSEDESETEDEEEKSQEDQEQKRKRRKTRQPDAKDGDSYDPYDFSDTEEEMPQVHTPKTADSQETKESQKVELSESRLKAFKVALLDVFREAHAQSIGMNRLTESINRDSEEPFSSVEIQAALSKMQDDNQVMVSEGIIFLI

SEQ ID NO: 611 - DNA, 3003 bp, Homo sapiens
ccaaccccggcctaggctctccaccgcatcggattctggaatttacgatcacgaaagttctattgtcccgcgattggctcccgggccgcatgacatcatagcgcttgattcatccttcgggtcccgattggctggccgcgccattgtgacgtcacggtcagcccacgttctgattgtagatagccggcgccttcctcttcccatcgcgcgggtcctagccaccggtgtctccttctacatccgcctctgcgccggctgccacccgcgctccctccgccgccgccgccttgctgctgctcaaagctgctgccgccccttgggctaaaaggttttcaaatggaacattttgatgcatcacttagtacctatttcaaggcattgctaggccctcgagatactagagtaaaaggatggtttcttctggacaattatatacccacatttatctgctctgtcatatatttactaattgtatggctgggaccaaaatacatgaggaataaacagccattctcttgccgggggattttagtggtgtataaccttggactcacactgctgtctctgtatatgttctgtgagttagtaacaggagtatgggaaggcaaatacaacttcttctgtcagggcacacgcaccgcaggagaatcagatatgaagattatccgtgtcctctggtggtactacttctccaaactcatagaatttatggacactttcttcttcatcctgcgcaagaacaaccaccagatcacggtcctgcacgtctaccaccatgcctcgatgctgaacatctggtggtttgtgatgaactgggtcccctgcggccactcttattttggtgccacacttaatagcttcatccacgtcctcatgtactcttactatggtttgtcgtcagtcccttccatgcgtccatacctctggtggaagaagtacatcactcaggggcagctgcttcagtttgtgctgacaatcatccagaccagctgcggggtcatctggccgtgcacattccctcttggttggttgtatttccagattggatacatgatttccctgattgctctcttcacaaacttctacattcagacctacaacaagaaaggggcctcccgaaggaaagaccacctgaaggaccaccagaatgggtccatggctgctgtgaatggacacaccaacagcttttcacccctggaaaacaatgtgaagccaaggaagctgcggaaggattgaagtcaaagaattgaaaccctccaaaccacgtcatctgattgtaagcacaatatgagttgtgccccaatgctcgttaacagctgctgtaactagtctggcctacaatagtgtgattcatgtaggacttctttcatcaattcaaaacccctagaaaacgtatacagattatataagtagggataagatttctaacatttctgggctctctgacccctgcgctagactgtggaaagggagtattattatagtatacaacactgctgttgccttattagttataacatgataggtgctgaattgtgattcacaatttaaaaacactgtaatccaaacttttttttttaactgtagatcatgcatgtgattgtaaatgtaaatttgtacaatgttgttatggtagagaaacacacatgccttaaaatttaaaaagcagggcccaaagcttattagtttaaattagggtatgtttcaagtttgtattaatttgtaatagctctgtttagaaaaaatcaaagaccatgatttatgaaactaatgtgacataatttccagtgacttgttgatgtgaaatcagacacggcaccttcagttttgtactattggctttgaatcaagcaggctcaaatctagtggaacagtcagtttaactttttaacagatcttatttttttattttgagtgccactattaatgtaaaaaggggggggctctacagcagtcgtgatgaaacttaaatatatattctttgtcctcgagattttaggaagggtgtagggtgagtaggccatttttaatttctgaagtgctaagtgtttttatacagcaaacaaaaagtcaattttgctttccaccagtgcgagagaggatgtatacttttcaagagagatgattgcctatttaccgtttgacagagtcccgtagatgagcaatggggaactggttgccagggtctaaatttggattgatttatgcactgttatctgttttgacacagatttccttgtaaaatgtgcctagtttaccaaaattaacaaagggggggaaaggaccttagaactttttaaggtaaaatcaaatatagctacagcataagagaatcgagaaatttgatagaggtaacttgtttaatgtaaatctaatagtacttgtaatttctttctgcttagaatctaaagatgtgtttagaacctcttgtttaaaaataatagactgcttatcataaaatcacatctcacacatttgaggcagtggtcaaacaggtaaagcctatgatgtgtgtcattttaaagtgtcggaatttagcctctgaataccttctccattgggggaaagatattcttggaaccactcatgacatatcttagaaggtcattgacaatgtataaactaattgttggtttgatatttatgtaaatatcagtttaccatgctttaattttgcacattcgtactatagggagcctattggttctctattagtcttgtgggttttctgtttgaaaaggagtcatggcatctgtttacatttaccttatcaaacctagaatgtgtatatttataaatgtatgtcttcattgctaggtactaatttgcagatgtctttacatatttcaatacagaaactataacattcaatagtgtgctgtcaaagtgtgcttagctcacctggatatacctacattgttaaatgtctaaacagtaatcattaaaacatttttgattacctgtgaaaaaaaaaaaaaaaaaaaaaaaaaaaaaaaaaaaaaa

SEQ ID NO: 612 - protein, 299 aa, Homo sapiens
MEHFDASLSTYFKALLGPRDTRVKGWFLLDNYIPTFICSVIYLLIVWLGPKYMRNKQPFSCRGILVVYNLGLTLLSLYMFCELVTGVWEGKYNFFCQGTRTAGESDMKIIRVLWWYYFSKLIEFMDTFFFILRKNNHQITVLHVYHHASMLNIWWFVMNWVPCGHSYFGATLNSFIHVLMYSYYGLSSVPSMRPYLWWKKYITQGQLLQFVLTIIQTSCGVIWPCTFPLGWLYFQIGYMISLIALFTNFYIQTYNKKGASRRKDHLKDHQNGSMAAVNGHTNSFSPLENNVKPRKLRKD

SEQ ID NO: 613 - DNA, 3564 bp, Homo sapiens
gccccacatacctcccctgttggccaacgtagtcaggagcaccatcctccgccagtttgcccaagccattaagctggaagcaatgcttgtgttctcctctctcatcaaccatgcttttaccaaactttgctcaactgtcagtcaccaagtattactcattcatactctctgtccttctaagcttattccccttccccacattgccccagccttccatagcatgtcagatccttcctggacaactacaatttctccttggctccttgcctctgttttcttgattcctaaaaattagatgaggttgtacctgtatagtgctttgcatagtgtctgccatgtttatctggcacatagtgtaggtatctagcaattacgtgcctgaatgtttctctaaatacatatgtacctttcaaatataaccagtcctataatatgtgctaatggctgtgtgaagctgagtatgccttgatagcctgagaatacataatgtttcacaaatgaagagcttacctgggcaggagactttagaaggccagttgccttgcttccagctgaaggagtagaacaccagcagctctcagaccatacaaattgctagacaccttttcctgttgtggcatggtgcaatgaggagctcttacctatgcctggagacatgccatctaaggactcgttggctgcagtctgtgcagatcttcacatacaaggagatggccatagctgtggtgctctgcagatgtggcagtggcttcatcaggatgaacgaggggcccctggagatgatcaagctgctcacactgcaatacaagctactggaattaggtctgcttctggacaaggaacagcttgctggaatggacatccatgttcgtgtgaagggtagtggtcatgtggttcagatttatgctgtccttcagtacatctccaaagccctggtaccctgttacccaaaatatgtagatgaggcttccgaggagatcaaagacaccctcaccagaccttgctggtggttcacccctgttgctatgaatccaagaaatttgcaggccctggtgcctgtgctcactaccagaaatcatagcagtaagcccatcaaaaagatcaaggtttacctttatagtaaacaatggttgaaggtctttaaggttaaaaaaaattgctagacatcccagctgccctagaagcagagatgacatgtgctgttattttaaagggccttgcttacctgcatattacctgttagggctttcaggtagaatataccaatgatagaccagtctggtggcactgttcccaaggacggaatagggtgaactttgatgtctaggcactcaaatactccataataaaatgatcatggaaactggcagtcttactccaattgcccaggatggagtgcagtggcaccatctcagctcattgcagcctcaaatttcccaggcccaggtgtccctcctacttcagcctcctgcatagctgggactacaggcaagcaccaccatgcccagctaattttttatatttttggtagagacaaggtttcaccgtgttgcccaggctggtcttgaattcctaggctcaagcagtctgcctgcttcagcctcccaaaatcctgagattacaggtgtgagccattgtgcctggcctggccctcttatttaaccttgttttggttggcagcaacattgagcccaggctaaagtacaccatacatgtcggacagagcttatctgcctcagtagccacttggtcagtatttgttgatcacttaaacccactcagtgttggtcatttgtctgtgttagcctctgctaaggaatgtggaccctacacgtgacaatacagttaccagtaaaaagactcagtaggaattatgaggtatatactcgaatcaacaggtagtttattattatactacgggtatggctgtgtatgttgcagttaggttcagctgcagcgatggacatgccaaaataatagtggtttgaataatggtatcccaaaacaaagtagaagtgtgtatctcttatgaaaggcagggtggatggttcagggctagtatgaccctgcgtaaattccttgctcatcatacgtctgtcaggcttagtgtggcctcagtcttccgagcagcaggatgtaagaagaaacagaaagtagaagcgcggatggtgctttcttttatgggaagttcccagaaacagcctccagataactttgcttacatctcattggctagaacatcaccccgtggctgcaggtggctggaaaatctcatctttattctgggtggccatgtgcagctaaaagtactgctactgtttatagagtttgggcaagaaccggctgtctgtgccatgggtggtagacgagaccagcagtccccactcacttggaactgagagtctgggggaaggatagtgacaaaataaacagatacttacagtgacaaggcctctgagaggtctgcaaaggtgtgccctgcgagtaaacaggaaggacacctaaatcagactggtggggtgggggaggggatgaggaaacgttgcctagagactaagcaagaatctctctggactgaggaaatgggcagggtattgaagcaaaggctcggaggcaaagggggcaggtagttgggtgatggaggagcatatgaggaacagaaagtagaccagggaagccagagggagacagggttctgatcacatgggccctggggccacagggacaggtttggtcattttccccggagcctttgactggtttctggaggtgagtaacctagacaggtgctttcagggggtgaggagcagcacaagactagaggcaggaaatatccactgggagagagtgtactaatctggttgggaaatgatggtggcttcagctacatagtggctttggggatcaagagaagtggatgcaaatcctgtaaatcccatagagcttggaatttagaaataatttggccttttcacgtaataggtgatgaaaccaagaatgagaatttaaatggcttgcccagaatcacacagctagctgtggagcagcaccagatatcatttctctatctaactctttcctttatgtcactgttgaatgtgctgatttgggagaacagggcattgtgggcattttggagccagcaacaggacctgaatcctggtgtccattgcagagggaggagtccaccctgctttgggggctggattcctggtaaggttatggggcaggtcacagaaatgagggagttggaaggaaaaaccaggtgtgagaagatgatggattcagtttttggtttgttgatttggagattcaggaccaccatctgtaggtggagagagatcagatggaaactggtccttgagattggaattggggatgcaggattgggtggaattggtcaaaacttttctataccctttctttaaatttctccagtgaaagggactcagcaactgtttttgagtccattgtgtcatgtaccttagaattaagagatttttccagtgtttagccctgaatgatttttgctgcaatttgaattctgtgcaaccacagagattt

SEQ ID NO: 614 - protein, 178 aa, Homo sapiens [sequence omitted]

SEQ ID NO: 615 - DNA, 1794 bp, Homo sapiens
gaagtatactcattcaagtaaaggatcagtttcagggttcaggctgaagtgtcttaatgactagaattcaggttccaaggagaagcccacaaggctaagggtattggatataacggaaagtggaagctatacctgacttccagagaatgtggaccggatataagatcttaatcttctcttatcttactacagaaatctggatggagaagcggtatttatctcaaagagaagtggacctagaggcttatttcactaggaatcacaccgttttgcaaggtactcgattcaaaagagccattttccaagggcaatactgtagaaattttggctgttgtgaagacagagatgatggctgtgtcactgagttctatgcggcgaatgcgttgtgctactgtgataaattctgtgacagagaaaattctgattgctgtcctgactacaagtccttttgccgtgaagagaaagaatggcctcctcacacacagccttggtatccagaaggttgcttcaaagatggtcaacattatgaagagggatcagtaattaaagaaaactgcaactcctgcacatgctcaggacagcaatggaaatgttcccagcatgtatgccttgttcgttcagaattaattgaacaggtcaataaaggagactatggatggacagcacagaattacagccaattttggggaatgactttagaagatggttttaaatttcgccttggcactttgccacctagtctcatgctcctgagcatgaatgaaatgacagcttctttacctgcaacaactgatcttccagagttttttgttgcttcttataaatggcctggatggactcatggcccattggatcaaaaaaattgtgctgcatcctgggcattttccactgcaagtgtggctgctgaccgaatagcaattcagtctaagggtcgatacacggccaatctatcccctcagaatttgatctcttgctgtgccaagaaccgtcatggatgcaatagtggaagcatcgatagggcttggtggtacctgagaaaacgtggactggtatcccacgcatgctacccacttttcaaagaccaaaatgctaccaacaatggatgtgccatggcaagcaggtctgatgggcgaggaaaacggcatgccacgaagccatgtcccaacaacgtagaaaaatctaacaggatctatcaatgttctcctccatacagagtctcttccaacgaaactgagataatgaaagaaatcatgcaaaatggaccagttcaagccataatgcaagtccatgaagatttcttccattataagacagggatatacagacatgttaccagcacaaataaagaatcagaaaaatatcgaaagcttcagacacatgcagtcaaactcactggatggggcacactgagaggagcacaagggcagaaagaaaaattttggattgctgccaattcctggggaaagtcatggggagagaatggctatttcaggattcttcgaggagtaaatgagtccgacattgaaaagttgattatcgcagcttggggccaactgacgagttctgatgaaccataacatatcattaaatttccataaggtcatgcctttaagtaaccccctaaattgaagtttagcaatatgacattcttggtgacagtggaatctttgtctcttcaccgtgttaacataatctatctattttcttattttcccctctggtctatgcttctgcttccttcatattactgagcattaacaacaccaaaaaaaaaaaaaaaaaaaaaaaaaaaaa

SEQ ID NO: 616 - protein, 476 aa, Homo sapiens
MWTGYKILIFSYLTTEIWMEKRYLSQREVDLEAYFTRNHTVLQGTRFKRAIFQGQYCRNFGCCEDRDDGCVTEFYAANALCYCDKFCDRENSDCCPDYKSFCREEKEWPPHTQPWYPEGCFKDGQHYEEGSVIKENCNSCTCSGQQWKCSQHVCLVRSELIEQVNKGDYGWTAQNYSQFWGMTLEDGFKFRLGTLPPSLMLLSMNEMTASLPATTDLPEFFVASYKWPGWTHGPLDQKNCAASWAFSTASVAADRIAIQSKGRYTANLSPQNLISCCAKNRHGCNSGSIDRAWWYLRKRGLVSHACYPLFKDQNATNNGCAMASRSDGRGKRHATKPCPNNVEKSNRIYQCSPPYRVSSNETEIMKEIMQNGPVQAIMQVHEDFFHYKTGIYRHVTSTNKESEKYRKLQTHAVKLTGWGTLRGAQGQKEKFWIAANSWGKSWGENGYFRILRGVNESDIEKLIIAAWGQLTSSDEP

SEQ ID NO: 617 - DNA, 1641 bp, Homo sapiens
atgaccacctcacctacgagcagtgtgactctcagactccttgatgtgaacgctggaaaggtgatagcccggctgtgcagctacacaacgcctgttggcagccctggagttgtttgtatgattgaaatgactgcagatggaaaacctccagtacagaagaaagacacagagatttcccatgcctctcaggcatattttgaatcaatgttccttggccatattcctgcaaatgttcaaattcataagaaagcaggtcctgtttatgggttcaggggctgcattctagaccttcaagtaaacaacaaagaattcttcatcatcgatgaagcacgacatggaaagaatattgagaactgccacgtcccttggtgtgctcatcatctgtgccgcaacaatggcacctgcatcagtgataatgaaaatctgttttgtgagtgtccaaggctgtattcaggcaagctgtgccagtttgcaagttgtgaaaacaacccatgtggaaatggtgccacctgtgttccaaaatccggaacagatattgtctgcctctgcccatatgggaggtctggacccctctgcactgatgctattaatattactcagccaaggttcagtggcacagatgcctttggatacacctcattcctggcttattcacggatctcagacatcagcttccattatgaattccacctgaagtttcagctggcaaacaaccactcagcactgcaaaataacttgatattttttactggacagaaaggccatgggttgaatggcgatgacttcctggctgtgggcctgctcaatggcagtgtggtttatagttataacctggggtctggcatagcaagcatcaggagcgagcccctcaatctgagccttggagtccacactgttcatctgggcaagttcttccaagagggctggctgaaggtagatgatcataaaaataaatccattatcgccccaggaagactggttggtctcaatgtcttcagtcagttttatgtaggtggctacagtgaatacactccagatctcttaccaaatggagcagattttaaaaatggttttcaaggctgtattttcactcttcaagttcgcactgagaaggatggccatttcagaggactgggaaatcctgagggccacccaaatgctggacgcagtgttggccagtgtcatgcttctccctgcagtttaatgaaatgtggcaatggtgggacatgcatagagagtggaactagtgtttactgcaattgtaccactgggtggaaaggatcattctgcacagagacagtttctacctgtgatcctgaacatgaccctccacaccactgtagcagaggagcaacctgcatttcattacctcatggatacacctgtttctgtcctctaggaaccactggaatctactgtgaacaagttaagtcaagtgagcttaagttcataactcagttccagatcaagacttcatctctgggagcctctcctatctgtattttccatctcactcaaaactgtcagaaatatcacaaggccatcagcttcagagggaaattagagaggagaaatggccccaagtcaagtagtaacagtaagaagcaacagtgtcctaactactggggcaacttatggtag

SEQ ID NO: 618 - protein, 546 aa, Homo sapiens
MTTSPTSSVTLRLLDVNAGKVIARLCSYTTPVGSPGVVCMIEMTADGKPPVQKKDTEISHASQAYFESMFLGHIPANVQIHKKAGPVYGFRGCILDLQVNNKEFFIIDEARHGKNIENCHVPWCAHHLCRNNGTCISDNENLFCECPRLYSGKLCQFASCENNPCGNGATCVPKSGTDIVCLCPYGRSGPLCTDAINITQPRFSGTDAFGYTSFLAYSRISDISFHYEFHLKFQLANNHSALQNNLIFFTGQKGHGLNGDDFLAVGLLNGSVVYSYNLGSGIASIRSEPLNLSLGVHTVHLGKFFQEGWLKVDDHKNKSIIAPGRLVGLNVFSQFYVGGYSEYTPDLLPNGADFKNGFQGCIFTLQVRTEKDGHFRGLGNPEGHPNAGRSVGQCHASPCSLMKCGNGGTCIESGTSVYCNCTTGWKGSFCTETVSTCDPEHDPPHHCSRGATCISLPHGYTCFCPLGTTGIYCEQVKSSELKFITQFQIKTSSLGASPICIFHLTQNCQKYHKAISFRGKLERRNGPKSSSNSKKQQCPNYWGNLW

SEQ ID NO: 619 - DNA, 2860 bp, Homo sapiens
actgagcaaatgagatagaaacatggcattcttaattatactaattacctgctttgtgattattcttgctacttcacagccttgccagacccctgatgactttgtggctgccacttctccgggacatatcataattggaggtttgtttgctattcatgaaaaaatgttgtcctcagaagactctcccagacgaccacaaatccaggagtgtgttggctttgaaatatcagtttttcttcaaactcttgccatgatacacagcattgagatgatcaacaattcaacactcttacctggagtcaaactggggtatgaaatctatgacacttgtacagaagtcacagtggcaatggcagccactctgaggtttctttctaaattcaactgctccagagaaactgtggagtttaagtgtgactattccagctacatgccaagagttaaggctgtcataggttctgggtactcagaaataactatggctgtctccaggatgttgaatttacagctcatgccacaggtgggttatgaatcaactgcagaaatcctgagtgacaaaattcgctttccttcatttttacggactgtgcccagtgacttccatcaaattaaagcaatggctcacctgattcagaaatctggttggaactggattggcatcataaccacagatgatgactatggacgattggctcttaacacttttataattcaggctgaagcaaataacgtgtgcatagccttcaaagaggttcttccagcctttctttcagataataccattgaagtcagaatcaatcggacactgaagaaaatcattttagaagcccaggttaatgtcattgtggtatttctgaggcaattccatgtttttgatctcttcaataaagccattgaaatgaatataaataagatgtggattgctagtgataattggtcaactgccaccaagattaccaccattcctaatgttaaaaagattggcaaagttgtagggtttgcctttagaagagggaatatatcctctttccattcctttcttcaaaatctgcacttgcttcccagtgacagtcacaaactcttacatgaatatgccatgcatttatctgcctgcgcatatgtcaaggacactgatttgagtcaatgcatattcaatcattctcaaaggactttggcctacaaggctaacaaggctatagaaaggaacttcgtcatgagaaatgacttcctctgggactatgctgagccaggactcattcatagtattcagcttgcagtgtttgcccttggttatgccattcgggatctgtgtcaagctcgtgactgtcagaaccccaacgcctttcaaccatgggagttacttggtgtgctaaaaaatgtgacattcactgatggatggaattcatttcattttgatgctcacggggatttaaatactggatatgatgttgtgctctggaaggagatcaatggacacatgactgtcactaagatggcagaatatgacctacagaatgatgtcttcatcatcccagatcaggaaacaaaaaatgagttcaggaatcttaagcaaattcaatctaaatgctccaaggaatgcagtcctgggcaaatgaagaaaactacaagaagtcaacacatctgttgctatgaatgtcagaactgtcctgaaaatcattacactaatcagacagatatgcctcactgccttttatgcaacaacaaaactcactgggcccctgttaggagcactatgtgctttgaaaaggaagtggaatatctcaactggaatgactccttggccatcctactcctgattctctccctactgggaatcatatttgttctggttgttggcataatatttacaagaaacctgaacacacctgttgtgaaatcatccgggggattaagagtctgctatgtgatccttctctgtcatttcctcaattttgccagcacgagctttttcattggagaaccacaagacttcacatgtaaaaccaggcagacaatgtttggagtgagctttactctttgcatctcctgcattttgacgaagtctctgaaaattttgctagccttcagctttgatcccaaattacagaaatttctgaagtgcctctatagaccgatccttattatcttcacttgcacgggcatccaggttgtcatttgcacactctggctaatctttgcagcacctactgtagaggtgaatgtctccttgcccagagtcatcatcctggagtgtgaggagggatccatacttgcatttggcaccatgctgggctacattgccatcctggccttcatttgcttcatatttgctttcaaaggcaaatatgagaattacaatgaagccaaattcattacatttggcatgctcatttacttcatagcttggatcacattcatccctatctatgctaccacatttggcaaatatgtaccagctgtggagattattgtcatattaatatctaactatggaatcctgtattgcacattcatccccaaatgctatgttattatttgtaagcaagagattaacacaaagtctgcctttctcaagatgatctacagttattcttcccatagtgtgagcagcattgccctgagtcctgcttcactggactccatgagcggcaatgtcacaatgaccaatcccagctctagtggcaagtctgcaacctggcagaaaagcaaagatcttcaggcacaagcatttgcacacatatgcagggaaaatgccacaagtgtatctaaaactttgcctcgaaaaagaatgtcaagtatatgaataagccttaggagatgccacattccagaataaaatgtttccagggtctttgcatct

SEQ ID NO: 620 - protein, 926 aa, Homo sapiens
MAFLIILITCFVIILATSQPCQTPDDFVAATSPGHIIIGGLFAIHEKMLSSEDSPRRPQIQECVGFEISVFLQTLAMIHSIEMINNSTLLPGVKLGYEIYDTCTEVTVAMAATLRFLSKFNCSRETVEFKCDYSSYMPRVKAVIGSGYSEITMAVSRMLNLQLMPQVGYESTAEILSDKIRFPSFLRTVPSDFHQIKAMAHLIQKSGWNWIGIITTDDDYGRLALNTFIIQAEANNVCIAFKEVLPAFLSDNTIEVRINRTLKKIILEAQVNVIVVFLRQFHVFDLFNKAIEMNINKMWIASDNWSTATKITTIPNVKKIGKVVGFAFRRGNISSFHSFLQNLHLLPSDSHKLLHEYAMHLSACAYVKDTDLSQCIFNHSQRTLAYKANKAIERNFVMRNDFLWDYAEPGLIHSIQLAVFALGYAIRDLCQARDCQNPNAFQPWELLGVLKNVTFTDGWNSFHFDAHGDLNTGYDVVLWKEINGHMTVTKMAEYDLQNDVFIIPDQETKNEFRNLKQIQSKCSKECSPGQMKKTTRSQHICCYECQNCPENHYTNQTDMPHCLLCNNKTHWAPVRSTMCFEKEVEYLNWNDSLAILLLILSLLGIIFVLVVGIIFTRNLNTPVVKSSGGLRVCYVILLCHFLNFASTSFFIGEPQDFTCKTRQTMFGVSFTLCISCILTKSLKILLAFSFDPKLQKFLKCLYRPILIIFTCTGIQVVICTLWLIFAAPTVEVNVSLPRVIILECEEGSILAFGTMLGYIAILAFICFIFAFKGKYENYNEAKFITFGMLIYFIAWITFIPIYATTFGKYVPAVEIIVILISNYGILYCTFIPKCYVIICKQEINTKSAFLKMIYSYSSHSVSSIALSPASLDSMSGNVTMTNPSSSGKSATWQKSKDLQAQAFAHICRENATSVSKTLPRKRMSSI

SEQ ID NO: 621 - DNA, 3538 bp, Homo sapiens
ggctggggctccgctggggaaccggccgagcggcgcgcgcggaggtgtccggcggccaggaggatggccaaggtcccgaagctggaagacaccttcctgcaggcgcagcctgcgccccaactgtccccggggatccaggaagactgctgtgtgcagctcctgggcaagggcttgctagtctatccggaagaaacagtgtacctggcggccgaagggcagcccgggggcgagcagggcggcggggagaaaggcgaagacccggagctgccgggggcagtgaaatcagaaatgcacttaaacaatggtaacttttcctctgaagaagaggacgccgacaaccacgacagcaaaaccaaagcagcggatcaatacctgtctcagaagaaaaccatcacgcagattgtgaaggataaaaagaagcagacacagctcacgctgcagtggcttgaagagaattacattgtatgtgaaggagtttgcttaccacggtgcattctttatgcacactacttagatttctgtaggaaagagaaattagagccagcctgtgcggccacctttggaaagacaattcgccagaagtttcccctcctaacaacaaggcggcttggaacaagaggccattcaaagtatcattactatgggattggcatcaaagagagcagtgcatattaccactccgtttattctggaaagggcttgacaaggttttctggaagcaagctaaagaatgagggtggcttcactcgtaaatattcgcttagctcaaaaactggaacacttcttccagaattccccagcgctcaacaccttgtataccaaggatgcatttctaaggacaaggttgatacgctcataatgatgtacaaaactcactgccagtgtatcctggacaatgcaattaatggaaactttgaagagatccagcattttttattacacttttggcaaggaatgcctgaccatctccttcccctgctcgaaaatcctgttatcattgatattttctgtgtttgtgactcaattctttataaggttcttacagatgtactcattcctgcaacaatgcaagaaatgcctgaaagcttattagcagacataagaaattttgctaaaaattgggaacagtgggttgtttcatccttggaaaacttgccagaagctctaactgacaagaaaatacctattgtgcgaagatttgtatcttctctgaaacgacaaacatctttcttacatcttgcccagattgccagaccagctctctttgaccagcatgtcgttaattctatggtgtctgatattgaaagggttgatttgaacagcattggctctcaagcccttcttaccatttcaggcagcacagacactgaatctggtatctacactgaacatgactctatcactgtgttccaagaactgaaggatctccttaagaagaatgccactgtggaggcttttattgaatggttggatactgtggtagaacagagagttattaagaccagcaaacaaaatggaaggtcattaaagaagagagctcaagactttctgttaaagtggagtttttttggtgctcgagtaatgcataatctcaccttgaacaatgcatccagttttggttcttttcatttgattcgaatgcttctcgatgaatacattctcctggccatggagacccagtttaataatgacaaagagcaggagttacagaatttattggacaagtatatgaagaattcagatgcgagtaaagctgctttcactgcttctccgagttcatgctttctggccaaccgtaataaagggagcatggtttccagcgacgctgtgaagaatgaaagccacgtggagacaacctatctccctctgccatccagtcaacctggaggcctaggccctgctctgcaccagttccctgctgggaacacagacaacatgccgctcacaggtcaaatggagctttcacagattgctggtcatctgatgacaccacccatttctccagccatggcaagccgaggaagtgtcattaaccaaggaccaatggcagggaggcccccaagtgtgggcccagtactgtcagctccatcacactgctccacatacccagagcccatttatcccgctctccctcaagccaatcatgacttttatagcaccagctctaactaccagactgtgtttagggcacagccccactccacatcaggactctatcctcatcacaccgagcatggtcgatgcatggcttggactgaacagcagctttcaagagacttcttcagtggcagctgtgcggggtctccatataactcccggccaccgtctagctatggcccatccctgcaagcccaggattcacacaatatgcagtttttaaatacaggaagcttcaatttcttgagcaacacaggagctgccagctgccaaggagcaacactgcctcctaattcaccaaatggatactatggaagcaacataaactacccagagtctcacaggctcggatcaatggtgaatcagcacgtttctgtcatcagcagcattcgttcactgcccccctacagtgacatccacgatccacttaacattttagatgacagtggtagaaaacagaccagctcgttttacacagacacatcatctccagttgcatgtcgaactccagtcctagcttccagtttgcaaaccccaattccttcttcctcatcccaatgtatgtatggaacttccaaccagtatccagctcaagaaaccctggactcccatggaacaagcagtagagaaatggtgtcctctttaccacctatcaacactgtgttcatgggaacagcagctggaggcacttaaaccaccaatgtgggagggggtgctaaaactttaaaaaaaatctctactgtgcaaatatcattattcactcagacttccataagagtaaataaaaatgaatatgcagtggctgacattgttttaaagtcactggtactatggacaactccatagtgaatggagatacttgcagagcttgtcatgcacactaagagtttaaaatgtgagctcattattaatcatagtttcaaaattatcaaataaaaccagtgaagatctgaagatgcaaacatttcaactatgaagatttacatttcactttctaatttattaaacatctgtgtgcctttttatctttggtttcttttaaaaagtatatttaatgcctttacaatacctttaatttattaggatctcagaatcattgtttactatcccttatttgacaaaaagtcaaatgtgtatgttctacctccaacggaaatgtttacaaggtcaagacttaattcaattcagacaagaccaaagttgcttgacttcaattcctgtgcattagtgtgatgatttctgtcacatagcagcattccgattctatgtaactgaatggagatgataagtgctttcccctctttatttaaaaaagattaaaaggaataaaagaaataaaaaaaaaaaaaaaaaaaaaaaaaaaagaaaaaaaaaaaaaaaa

SEQ ID NO: 622 - protein, 928 aa, Homo sapiens
MAKVPKLEDTFLQAQPAPQLSPGIQEDCCVQLLGKGLLVYPEETVYLAAEGQPGGEQGGGEKGEDPELPGAVKSEMHLNNGNFSSEEEDADNHDSKTKAADQYLSQKKTITQIVKDKKKQTQLTLQWLEENYIVCEGVCLPRCILYAHYLDFCRKEKLEPACAATFGKTIRQKFPLLTTRRLGTRGHSKYHYYGIGIKESSAYYHSVYSGKGLTRFSGSKLKNEGGFTRKYSLSSKTGTLLPEFPSAQHLVYQGCISKDKVDTLIMMYKTHCQCILDNAINGNFEEIQHFLLHFWQGMPDHLLPLLENPVIIDIFCVCDSILYKVLTDVLIPATMQEMPESLLADIRNFAKNWEQWVVSSLENLPEALTDKKIPIVRRFVSSLKRQTSFLHLAQIARPALFDQHVVNSMVSDIERVDLNSIGSQALLTISGSTDTESGIYTEHDSITVFQELKDLLKKNATVEAFIEWLDTVVEQRVIKTSKQNGRSLKKRAQDFLLKWSFFGARVMHNLTLNNASSFGSFHLIRMLLDEYILLAMETQFNNDKEQELQNLLDKYMKNSDASKAAFTASPSSCFLANRNKGSMVSSDAVKNESHVETTYLPLPSSQPGGLGPALHQFPAGNTDNMPLTGQMELSQIAGHLMTPPISPAMASRGSVINQGPMAGRPPSVGPVLSAPSHCSTYPEPIYPALPQANHDFYSTSSNYQTVFRAQPHSTSGLYPHHTEHGRCMAWTEQQLSRDFFSGSCAGSPYNSRPPSSYGPSLQAQDSHNMQFLNTGSFNFLSNTGAASCQGATLPPNSPNGYYGSNINYPESHRLGSMVNQHVSVISSIRSLPPYSDIHDPLNILDDSGRKQTSSFYTDTSSPVACRTPVLASSLQTPIPSSSSQCMYGTSNQYPAQETLDSHGTSSREMVSSLPPINTVFMGTAAGGT

SEQ ID NO: 623 - DNA, 2965 bp, Homo sapiens
gcacaggggccttggtccttccattgattcataagtacaacaccctacttcttggatacagagccatcgcggaatgttcgctggagtgaggcagcgtatggagcacatgggacatgcagacccagatggacatcttacaaactttcagaggagctgaagccagattgttcttacaaatggtcaccagaaggaggacaatcacaaactgtctcatcctcctctgcaaatccaacagaaaggacacagtagagtgggcaagaatgcaaagaaggtctgtggtttggaactggcccaagccgaactaaacttttctaaatatacattaaactgtcaacaaagagcaccgtgacccacagcctgaataaagggagagccccaaggccctctgaagccactagttctgtgagttgttttagggagaagacagacaaccaagaattatttaccttattagactgtgcccatccaagcccaggtaaaactttttgatcagcagaaaactggaattatttccctttctctatcctggattgagtgtgaattccccagagaaacttggctttgagagcactagctggacatataggggtccatttccaatctgctctgagaagggccctgtcttcatcctaaaggaaggctttagaaaactgttatctaagatctaggattgaagatggtgagaacctgaggctgagcaattggccccaattcttcctgaagcattatctgagagagagagcctagcctgtggtttttgacccctggcagaagggtggagagagggaagaagaaagaaggaagatgaagacaacttcctgctcaagaccaacccatctcccctcattctggggtgaccaattgagaaaacaatgatatctcccttactctcatctgtttccaaaggctttgcttcatctaccaaaaaaccgtgtgagtgagaaccatctaccctcatgtgcttattaagctcttagagtcattctctggtgactatattgattcatttatttgtactctaggaacataaaacaatatggcattattgacacagaaaacaaagaatagacagatagcatacagctgaacaactttaattaccagggttccagtgtctgtttaactagctgtgtaaatatgagtatttgaattaatttttctaggatcaatttccttacttctaaatgagaaagacgaggccaaaagttcttaaccttacttctggctttacaactgaatggttctctgttcctaataatgagttccttttttttttttttttctgagacgaagtctcgctctgtcaccaggctggagtgcagtggcacaatcttgctcactgcaacctctgcctcccgggttcaagcaattctcctgcctcagcctcacgagtagctgggactacacgcgcctgccaccatacccagctaatttttgtatttttagtagagacagggtttcaccatgttggccaggatggtcttgatctcttgacctcgtgatccgccggcctcggcctcccaaagtgctgagattacaggcgtgagccaccgcgcctggccctaataatgagttcttatgaatggtatatgtacgccaaatagaaagcatgctaatagctaagaaggaatcgtgaaggataatgagaatttgctgccttttctagtcattctagaggaatttataaataaataaaatggtttgatatgtaagaatatctgctgagccaaacagtgcacacttcttagacataagttgtagccaaggcaataaagcttaaggatggaatagaagcattaaggaaaattttcctagaaaggaaaaaaatggaggcagaaagggtgggaaaggcagacagaagtcaactcataggaagcagagagataaagagctttgaaatataatgtgaggacctagacatatttgagaagagaggtactggtcaaaacaaaggacagagatggcagaagcccacaggaaacttatggccaatggtagcagtcagtgaggatgagtagggtagtaataatatattataactaattactgccatttattgatcacttactaagtattaaaattatttgttaggaaatttataaataccttgtctcctttctagaactctctccaaaggatatggtcatattcatcatatagataagtaaactaaggctcaggaaaaatgacttcctcaagggcaaacccaggtctgtctgtgctatttttactataccgttgctatttgtccatgaacaggaaaaaccctcaactagggccttgagcaatcaagaattattggaaggaaaaatcgttacaggtaaccactgataaatcagatggaacaatcactttttgagcaaagggattgtgtcctctttatctgcgtgttccctgcatttagcccagggtctagcaacttgtgatagacaaagatgtgttagatcccccttcaaaaaaggacttgctgctcagctgctggggtgcagtcagcctccagcctccaatcagctctgtaagagctggcctcagctgtaaataaaaactgcttcatttcaggtcatgctggtatccaataactgagaaaggagttgggggtaggggcaaagaggggagagtgaaggggacaaaggcctgaagctaatcagggacccctctgatggccaattctgactccagagctccctatcaagtgggccaagttcttctcagccctactctggatagtgacttctcccttggcccaattctgtctctacccactccttttcacaggtgttgatccctaatgaatatccggcaccccgcattccatctcggtgactgcttccagaaaacacaagctgtgacatgcccattatgtactcaataaatctttaataattgagtggatagagtgatgtgagttgagaagcattattaaagattattttcccaaaaataaacaaaaaaaatgtgcccattg

SEQ ID NO: 624 - protein, 63 aa, Homo sapiens
MQTQMDILQTFRGAEARLFLQMVTRRRTITNCLILLCKSNRKDTVEWARMQRRSVVWNWPKPN

SEQ ID NO: 625 - DNA, 2672 bp, Homo sapiens
gcgtggccggcgccggctcttgcggccgagcagagttgcggcgtgggaaagagccgctaggagcagaccgcgccgccgccggagccgcgcctgcccaggcccggggagggaggaggcgggcgtcagggtgctgcgccccgctcggcgtccgagcttccggccgggctgtgccccgcgcggtcttcgccgggatgaagcgcccctgcgaggagacgacctccgagagcgacatggacgagaccatcgacgtggggagcgagaacaattactcggggcaaagtactagctctgtgattagattgaattctccaacaacaacatctcagattatggcaagaaagaaaaggagagggattatagagaaaaggcgtcgggatcggataaataacagtttatctgagttgagaagacttgtgccaactgcttttgaaaaacaaggatctgcaaagttagaaaaagctgaaatattgcaaatgacagtggatcatttgaagatgcttcaggcaacagggggtaaaggctactttgacgcacacgctcttgccatggacttcatgagcataggattccgagagtgcctaacagaagttgcgcggtacctgagctccgtggaaggcctggactcctcggatccgctgcgggtgcggcttgtgtctcatctcagcacttgcgccacccagcgggaggcggcggccatgacatcctccatggcccaccaccatcatccgctccacccgcatcactgggccgccgccttccaccacctgcccgcagccctgctccagcccaacggcctccatgcctcagagtcaaccccttgtcgcctctccacaacttcagaagtgcctcctgcccacggctctgctctcctcacggccacgtttgcccatgcggattcagccctccgaatgccatccacgggcagcgtcgccccctgcgtgccacctctctccacctctctcttgtccctctctgccaccgtccacgccgcagccgcagcagccaccgcggctgcacacagcttccctctgtccttcgcgggggcattccccatgcttcccccaaacgcagcagcagcagtggccgcggccacagccatcagcccgcccttgtcagtatcagccacgtccagtcctcagcagaccagcagtggaacaaacaataaaccttaccgaccctgggggacagaagttggagctttttaaatttttcttgaacttcttgcaatagtaactgaatgtcctccatttcagagtcagcttaaaacctctgcaccctgaaggtagccatacagatgccgacagatccacaaaggaacaataaagctatttgagacacaaacctcacgagtggaaatgtggtattctcttttttttctctcccttttttgtttggttcaaggcagctcggtaactgacatcagcaacttttgaaaacttcacacttgttaccatttagaagtttcctggaaaatatatggaccgtaccatccagcagtgcatcagtatgtctgaattggggaagtaaaatgccctgactgaattctcttgagactagatgggacatacatatatagagagagagtgagagagtcgtgtttcgtaagtgcctgagcttaggaagttttcttctggatatataacattgcacaagggaagacgagtgtggaggataggttaagaaaggaaagggacagaagtcttgcaataggctgcagacattttaataccatgccagagaagagtattctgctgaaaccaacaggttttactggtcaaaatgactgctgaaaataattttcaagttgaaagatctagttttatcttagtttgccttctttgtacagacatgccaagaggtgacatttagcagtgcattggtataagcaattatttcatcagttctcagattaacaagcatttctgctctgcctgcaggcccccaggcacttttttttttggatggctcaaaatatggtgctgctttatataaaccttacatttatatagtgcacctatgagcagttgcctaccatgtgtccaccagaggctatttaattcatgccaacttgaaaactctccagtttgtaggagtttggtttaatttattcagtttcattaggactatttttatatatttatcctcttcattttctcctaatgatgcaacatctattcttgtcaccctttgggagaagttacatttctggaggtgatgaagcaaggagggagcactaggaagagaaaagctacaatttttaaagctctttgtcaagttagtgattgcatttgatcccaaaacaagatgaatgtatgcaatgggatgtacataagttatttttgcccatgcctaaactagtgctatgtaatggggttgtggttttgtttttttcgatttcgtttaatgacaaaataatctcttaatatgctgaaatcaagcacgtgagagtttttgtttaaaagataagagacacagcatgtattatgcacttcatttctctactgtgtggagaaagcaataaacattatgagaatgttaaacgttatgcaaaattatacttttaaatatttgttttgaaattactgtacctagtcttttttgcattactttgtaacctttttctatgcaagagtctttacataccactaattaaatgaagtcctttttgacta

SEQ ID NO: 626 - protein, 337 aa, Homo sapiens
MKRPCEETTSESDMDETIDVGSENNYSGQSTSSVIRLNSPTTTSQIMARKKRRGIIEKRRRDRINNSLSELRRLVPTAFEKQGSAKLEKAEILQMTVDHLKMLQATGGKGYFDAHALAMDFMSIGFRECLTEVARYLSSVEGLDSSDPLRVRLVSHLSTCATQREAAAMTSSMAHHHHPLHPHHWAAAFHHLPAALLQPNGLHASESTPCRLSTTSEVPPAHGSALLTATFAHADSALRMPSTGSVAPCVPPLSTSLLSLSATVHAAAAAATAAAHSFPLSFAGAFPMLPPNAAAAVAAATAISPPLSVSATSSPQQTSSGTNNKPYRPWGTEVGAF

SEQ ID NO: 627 - DNA, 5550 bp, Homo sapiens
agaaaccctcataaagtagatgcagagggcagtaagatataactcaactttgaaaatgtcagccgttatagttgaagaaatctgacccaagagacttcgctccgctgcaagatggaaggaagcttaagtaagacataaatttgtaatgaacttgctcacaacatccgccgccactgtgacttgcagtcatcatccattaccacaaaattagttgcaggatggctactcgtatccctccacacatgatcatcagtatttgcctcctgtgtcccaaccggcctgagtcaaggttacgactcactgattaaaaagagggactttttcaaatactttgcacttttgattgtgtattatggataccaaggaagagaagaaggaacggaaacaaagttattttgctcgactgaaaaagaaaaaacaagccaaacaaaatgcagagacagcctcagctgtagctacaaggactcatactgggaaggaagataataatacagtagttttagagccagacaagtgcaacattgctgtggaagaggaatatatgactgatgagaaaaaaaagagaaaaagtaatcagttaaaggagatcaggcgtacagaactaaagagatattatagtattgatgacaatcaaaacaaaacacatgataaaaaagagaagaagatggtggttcagaagccccatgggactatggaatacactgctggaaaccaggacaccctaaactccatagcactgaaatttaacatcactcccaataaattggtggaactgaataaacttttcacacatactattgttccaggccaggtcctttttgtgccagatgccaactctccttccagtaccttaaggctatcatcatccagtcctggtgctgctgtctctccttcatcatcagatgcagaatatgataaattgcctgatgctgacttagcacgaaaggccttgaaacccattgaaagagtcttatcgtctacttctgaagaagatgagccaggtgtggtgaaatttttaaaaatgaattgtcgatacttcaccgatggaaagggtgtggttggcggtgttatgatagtgactcctaacaacatcatgtgtgaccctcataaatctgatcctctggttattgaaaatgggtgtgaggagtatggtctcatctgccccatggaagaggttgtttccactgcgctctacaatgacatttctcacatgaagatcaaagatgccttgccatctgacctacctcaggatctttgtcctctgtacaggcctggagaatgggaagacctggcttcagaaaaggatatcaacccattcagtaagttcaaatctatcaacaaggaaaaacgacagcagaatggagagaaaattatgacttcggattccagaccaatagtacctttggagaagtccacaggacatacacctacaaagccctcaggcagctctgtgtcagagaaattaaagaaactggactcctctagggagacatcccatggttctcccacagtgactaagctcagcaaggaaccttccgacacttctgctgcatttgaatctacagccaaagaaaactttctaggggaagatgatgattttgttgacttggaagaactttcttctcaaactggtggtggaatgcacaaaaaagacaccttgaaggagtgcctttctcttgacccagaggaacgaaagaaagctgagtcacaaataaacaattctgccgtggaaatgcaggtgcagtcagccctagcctttttgggaacagagaatgatgttgaactgaagggggcgctagatttagaaacctgtgagaagcaagatataatgccagaagtggacaagcagtctggttcgccagaaagccgagtagaaaacacactgaacatacatgaagatttagataaagttaaactcattgaatattacctgactaagaacaaagaagggccacaggtatctgaaaatttgcagaaaacagaattaagtgatggaaaaagtattgaaccagggggaatagacattacccttagtagttctctttcccaggcgggtgatcccataactgagggcaataaagagccagataagacctgggtgaaaaagggagagcccctcccggtaaaactgaactcttctacagaagcaaatgtgattaaagaggctctagactcctctttggaatctactctggacaacagctgtcaaggtgcacaaatggataataaatctgaagttcagttgtggctgttaaagagaattcaggtacccattgaagatatacttccttcaaaagaagaaaaaagcaagaccccacccatgttcctgtgcatcaaagtgggaaaaccaatgagaaaatcctttgccactcacactgcagccatggtccagcagtacggcaaacggagaaagcagccagagtactggtttgctgttcctcgggagagggtggatcatttgtacacattctttgttcagtggtctcccgatgtctatggaaaagatgccaaagagcaaggctttgtggtggtggagaaggaagaactgaacatgattgacaacttcttcagtgagccaacaaccaagagctgggagatcatcactgttgaagaggcaaagcgcaggaagagcacatgcagctactatgaagacgaggacgaagaggtgctgcctgtcctacggccccacagcgcgctcctggagaatatgcacatcgagcagctggcccgacgccttcctgcaagggtgcaagggtatccatggagactggcctatagcacgttagagcacgggaccagcttaaagacgctctaccggaaatcggcatcactagacagtcctgtcctattggtcatcaaagatatggataatcagatttttggagcatatgcaactcatcctttcaagttcagtgaccactattatggcacaggcgaaacttttctctacacattcagccctcattttaaggtctttaagtggagtggagaaaattcatactttatcaatggagacataagttctttagaacttggtggtggagggggacgatttggtttatggctagatgctgatttataccacggacgaagcaactcttgcagcactttcaataatgatattctttccaaaaaggaagacttcatagttcaggatctggaggtgtgggcatttgattgaaattcagactgccttaaaatataaccattaaaagactgggttcgatcagccctcctaaagctggctggaaaaagaagccccagcccagcctgcctcatcccaccccaatgcttcctttctgccatcatctcagagcatgatcacattgcagaaagattctggaaggtccatgtagagggcagacattgaagaaagaaacttaaaatccaggttgttgaaaagactttgtactcccacttcctccaaatccatacagtgaggaatcagagtgtttatagatatatgagttgaatgcaatttttatttttggtaactgtgaaaaataagatactgtggatatatacatgccttgtgtatttatcagcataattttcattaccaaaatgtacagctattatttgccatggaaaaggttagtctcatttagaaaaatcgaaagtgcacagcacttaaagggaatatatgaggtttttttttaaaaaaaaaaaaacttttatttattatttgtagtatattgtctgaaatgtgtcggcagttttttttcttttaatgtgtcaaatcttgaaatattaaatgtatacattttgtgctatgttttgggaacaaatctgtttgatttatatagttttatattgaattttttttgccctgattgtttagggtgataggtcttaagcagcatatatctatatatctgtatgtgggtatatagagatatatgtgtgtgtgtatgtatatgtacatatacatatatatgagtgtataattctaaatttctaaaaactcattatgaatgttcatcaatttgactattataggccagctttccatttagtcaataaaagcgtacatttttagttacttaccttgaacatattcgtgtgaaaaagaatacatcatttctcacagtcttaagttgatatttatagaaatgaatacctttgtgaacctagacttagaacaaatcctgcttttgaaaaaaatgttttgcttcttacaaaatcatttgtgttaataacaaaaactttattttcggagtgttctttgtataacttttccaagcttttacattaacgagcaggcctctgtcttaaaagggactcagtatattaatttctgcattttttaaatcaaatgaaaaacgtcaaattggaccaattgtcttggtttcttgattcatttatttgagaaaaaaacaatacaaagaaatgcattcatatcaaaattggaatagaaaggaaaacctatttttaagatatcaacctattttcacatcataaaacatctattacataaaataaaggtccaggcatagtggctcttgcctgtaatcccagcactttgggaggccgaggcaggtggatcactcaaggtcacaagtttgagaccagtctggccaacatggtgaaaccccatctctactaaaagtacaaatattagccgactatgtggcgggcacctgtaatcccacctactcgggaggctgaggcaggagaattgcttgaatccgggaagcagaggttgtagtgagccaagatcgtgccactgcactctatcctgggtaacagcgagactctgtcttaaaaataataacaataataataataataaagacttacttaaccaatattattgattaccagacttttatgaaagccaaagactgcttgctagtaggaaaaaatttcaaataataaccaaagctgaaaaatggtctgtcataaattatttccccggtaatttttgaaaggaaaaatgtataacaagtactatttacatatctgcatttaaaaaagcaattcttagaatacttcctttacattattctcctattttagacattttgtgaaagagaacaaattgtccagtggcctcctgtcagatcaacaattattatactccttaattccatgcaaatttaaatgaatgctataaaattttaaatctgtagcctgggtgtacgtttcactcaagttctcctactgaggactcttgactaacagcatactggcagtttcaccttaacctgctcgttaaataatgtgttggtgtgagatatcaggaatgtctcatgatatcacgtttaccatttacaccatctgcaaccatatgctattaataaaatggaaaaaaacaaaatggtcattttgcatatacttcactctgacctagtttagtccatgatactataattgtgagagcatatccagatgctgtgttctctatgtaaaacagtattgtccattcagaaatgtgtgacccttcatttatggatattgactatatgtaatgcagtgctatcccaatattttcaataaaggactttatgcattcagtgaaaaaaaaaaaaaaaaaaaaaaaaaaaaaaa

SEQ ID NO: 628 - protein, 942 aa, Homo sapiens
MDTKEEKKERKQSYFARLKKKKQAKQNAETASAVATRTHTGKEDNNTVVLEPDKCNIAVEEEYMTDEKKKRKSNQLKEIRRTELKRYYSIDDNQNKTHDKKEKKMVVQKPHGTMEYTAGNQDTLNSIALKFNITPNKLVELNKLFTHTIVPGQVLFVPDANSPSSTLRLSSSSPGAAVSPSSSDAEYDKLPDADLARKALKPIERVLSSTSEEDEPGVVKFLKMNCRYFTDGKGVVGGVMIVTPNNIMCDPHKSDPLVIENGCEEYGLICPMEEVVSTALYNDISHMKIKDALPSDLPQDLCPLYRPGEWEDLASEKDINPFSKFKSINKEKRQQNGEKIMTSDSRPIVPLEKSTGHTPTKPSGSSVSEKLKKLDSSRETSHGSPTVTKLSKEPSDTSAAFESTAKENFLGEDDDFVDLEELSSQTGGGMHKKDTLKECLSLDPEERKKAESQINNSAVEMQVQSALAFLGTENDVELKGALDLETCEKQDIMPEVDKQSGSPESRVENTLNIHEDLDKVKLIEYYLTKNKEGPQVSENLQKTELSDGKSIEPGGIDITLSSSLSQAGDPITEGNKEPDKTWVKKGEPLPVKLNSSTEANVIKEALDSSLESTLDNSCQGAQMDNKSEVQLWLLKRIQVPIEDILPSKEEKSKTPPMFLCIKVGKPMRKSFATHTAAMVQQYGKRRKQPEYWFAVPRERVDHLYTFFVQWSPDVYGKDAKEQGFVVVEKEELNMIDNFFSEPTTKSWEIITVEEAKRRKSTCSYYEDEDEEVLPVLRPHSALLENMHIEQLARRLPARVQGYPWRLAYSTLEHGTSLKTLYRKSASLDSPVLLVIKDMDNQIFGAYATHPFKFSDHYYGTGETFLYTFSPHFKVFKWSGENSYFINGDISSLELGGGGGRFGLWLDADLYHGRSNSCSTFNNDILSKKEDFIVQDLEVWAFD

SEQ ID NO: 629 - DNA, 7709 bp, Homo sapiens
attttgaagagaggggtcccggggagctccctccaagatctagaggctccgcggccacccctgccgggtcctgccaagacttgctagaaggaacgagtcgcgtgccttagttagttggttcccgtcacaggaagaaacgcctttgcagtgggtttaattgcttctgggccgagcgaattccccgccgtacaactcagtggtgcggactttgcctcctgctaccctgttgctgcgccgagcggggtgggaaagtttctggagttgtcagtcgcgcagcccgtggccacctagacccgaggtgcgggcgcctgcgaagggcccccgcggggtggccggggccgccggggcatgcagcgcgggggcgcggctcggtgacgccgcgggcggggacccggcatccgggcaggctgcgcgcgggtgcggggcgagggcgccgcggggactgggacgcacggcccgcgcgcgggacacggccatggaggacgcgggagcagctggcccggggccggagcctgagcccgagcccgagccggagcccgagcccgcgccggagccggaaccggagcccaagccgggtgctggcacatccgaggcgttctcccgactctggaccgacgtgatgggtatcctggacggttcactgggaaacatcgatgacctggcgcagcagtatgcagattattacaacacctgtttctccgacgtgtgcgagaggatggaggagctgcggaaacggcgggtttcccaggacctggaagtggagaaacccgatgctagccccacgtcacttcagctgcggtcccagatcgaagagtcgcttggcttctgtagcgccgtgtcaaccccagaagtggaaagaaagaaccctcttcataaatcaaactcagaagacagctctgtaggaaaaggagactggaagaagaaaaataagtatttctggcagaacttccgaaagaaccagaaaggaataatgagacagacttcaaaaggagaagacgttggttatgttgccagtgaaataacgatgagcgatgaggagcggattcagctaatgatgatggtcaaagaaaagatgatcacaattgaggaagcacttgctaggctcaaggaatacgaggcccagcaccggcagtcggctgccctggaccctgctgactggccagatggttcttacccaacgtttgatggctcatcaaactgcaattcaagagaacaatcggatgatgagactgaggagtcggtgaagtttaagaggttacacaagctggtaaactccactcgcagagtcagaaagaaactaattagggtggaagaaatgaaaaaacccagcactgaaggtggggaggagcacgtgtttgagaattcgccggtcctggatgaacggtccgccctctactctggcgtgcacaagaagccccttttctttgatggctctcctgagaaacctcccgaagatgactcagactctctcaccacgtctccatcctccagcagcctggacacctggggggctggccggaagttggtcaaaaccttcagcaaaggagagagccggggcctgattaagccccccaagaagatggggacattcttctcctacccagaagaagaaaaggcccagaaagtgtcccgctccctcaccgagggggagatgaagaagggtctcgggtccctaagccacgggagaacctgcagttttggaggatttgacttgacgaatcgctctctgcacgttggcagtaataattctgacccaatgggtaaagaaggagactttgtgtacaaagaagtcatcaaatcacctactgcctctcgcatctctcttgggaaaaaggtgaaatcagtgaaagagacgatgagaaagagaatgtctaaaaaatacagcagctctgtctctgagcaggactcgggccttgatggaatgcctggctcccctccgccttcacagcccgaccccgaacacttggacaagcccaagctcaaggccgggggttctgtagaaagtcttcgcagttctctcagtgggcagagctccatgagcggtcaaacagtgagcaccactgattcctcaaccagcaaccgggaaagcgtcaagtcggaagatggggatgacgaagagccgccttaccgaggcccgttctgcgggcgtgccagggtgcacaccgacttcacccccagtccctatgacacagactcactcaagctcaagaaaggagatatcatcgatataatcagcaagccacccatggggacctggatgggcctgctgaacaacaaagtcggcacgttcaagttcatctacgtggacgtgctcagtgaagacgaggagaaacccaaacgccccaccaggaggcgtcggaaaggacgaccaccccagcccaagtctgtggaggatctcctggatcggattaacctaaaagagcacatgcccactttcctgttcaatggatatgaagatttggacacctttaagctgctggaggaggaagacttggatgagttaaatatcagggacccggaacacagagctgttctcttgacagcagtggagctgttacaagagtatgacagtaacagcgaccagtcaggatcccaggagaagctgctcgttgacagccagggcctgagtggatgctcaccccgagactcaggatgctacgaaagcagtgagaacctggaaaacggcaagactcggaaagctagcctcctatctgccaagtcatccaccgagcccagcttgaagtcttttagcagaaaccagttgggcaattacccaacattgcctttaatgaaatcaggggatgcactgaagcagggacaggaggagggcaggctgggtggtggccttgccccagacacgtccaagagctgtgacccacctggtgtgactggtttgaataaaaaccgaagaagcctcccagtttccatctgccggagctgtgagaccctggagggcccccagactgtggacacttggccccgatcccattccctggatgaccttcaagtggagcctggtgctgagcaagacgtgcctaccgaggtgacagaaccgccccctcagattgtacctgaagtgccacagaagacgaccgcctcttccacgaaggcccagcccctggagcaagactctgctgtcgacaatgcattgctactgacccaaagcaagagattttctgaacctcagaaattgacaactaagaaactggagggctcaatcgcagcctctggtcgcggcctgtcaccccctcagtgtttgcccagaaactatgatgctcagcctcctggagctaaacacggtttagcaaggacgcctctggagggccacagaaaaggacacgagtttgaaggaacacaccatcccctgggcaccaaagaaggggtagatgctgagcagagaatgcagcccaaaattccatcacagcctccacctgttcctgccaaaaagagcagagaacgccttgctaacggactccaccctgttcccatgggccccagtggggccctccccagtcccgatgcgccatgcctgccagtgaaaaggggcagccccgccagccccaccagccctagcgactgtcccccagcactggctcccaggcctctctcagggcaggcgcctggcagcccaccaagcacaaggccgcccccctggctctcagagctccccgagaacacaagcctccaggagcacggtgtgaagctgggcccggctttgaccaggaaggtctcctgtgcccggggagtggatctagaaacgctcactgaaaacaagctgcacgctgaaggcatcgatctcacggaggagccgtattctgataagcatggccgctgtgggattcctgaagccctggtgcagagatacgcagaggacttggatcagcccgagcgggacgtcgccgccaacatggaccagatccgggtgaagcagcttcggaagcagcaccgcatggcgattccaagtggtggactcacggaaatctgccgaaagcccgtctctcctgggtgcatttcgtctgtgtcagattggctcatttccatcggtctgcccatgtacgccggcaccctctccaccgcgggcttcagcacactgagccaagtgccttctctgtctcacacttgccttcaggaggccggcatcacagaggagagacacataagaaagctcctatctgcagccagactcttcaaactgccgccaggccctgaggccatgtagccaggcccggaatgggcctctctggacaagagccaccctttcactgtgcatatgatgctgatgcaattcctccatcatctctggacgtgcagaccagatccagaagaaaggcctggcgtgtggccaaacagcgtgaaaccttggcacaggactgaggatcctctcctccagaaaagccccctcgaggaaataaattagtgcggttctctttgacccccaaagacaagacaagcacttatttttattttcagaagacaaaagaaccaagatgccaactggctgcgaatgctctatctccagtctgtctctgtgtactggtagaggctgggaggagtagggggcagcctgttccatttctgatagtgcccttgctcttctgtctgtcatcttgcaggatgcccgagggccagatgggcttagctaggccaaagtaacagactcaagagttattgtacattactgaccacgctcatttgttcaaaagttagaacatctggctgcaccaggaaaaaaaaaaaaaaaaagtcctgttcttctttagataaacaagagacattttcataattgctttctagcaatcagcttttatttgccttaatataagcttttaagcagttatctaactagtgtccacaaccctgtaaccatacttccacatcttcagcttaggcagacatcgaacctctctgggatgtttccagcaaaagtgagcttttctaatcgtctcattgtaacatggcttattttgtagaggtattcatcagccacacacttcatgttggtttttggtttttaagctaactacaaatctagtaaaaagctatctgaaattcacaaatatcatgtgtgtgcgtgcgtgcgtgcgcgtgtgtgtctgtattcatagtgactgcttttggttttaaccagtttagtatcgttactgtgtggatcgtcgcgctgcagtattgacttggaatcctgaccatgtccatcccaaaattcagtcctcagttaacggatcatgtttgcaaaaggtcactgtgaggctgcatatttcagaaagatgtccttaataagggaagtcatgtataagatgttttctaaaagacttttcagtattacaactaatactattattatccttctttttttatttagataattcttttaatttaaacaaaggttcactatggaaccagacaaatctcattagccatgtgttaagtatttgctactttaaattgttttacaactgatttcagcacattctatccttttttttttttgaaatggagtttcgctcttgtcacccaggctggagtgcaatggcacgatcttggctcactgcaacctcagtctcccaggttcaagtgattctcctgccttagcctcccgagtagctgggattataggcacccaccaccacgcccagctaatttttgtattattagtagagacagggtttcaccatgttggccaggctggtctcaaactcaactcctgacctcaggtggtccacccgcctcagcctcccaaagtgctgggattacaggtgtgagccaccgcacctggcctctgtcctcttttagtctagtgtctggttttctagcaaacagtaaatttaaacaagtaaactattatggtttccattgcttacaaaatgattttcctttacattcttatcatgaacactattttaagcatcaaatgcaatcatctaaaatataaaggtcaatcatttataatagaaacaccttgaccacaagcccttgattgaacattttataatatttcatctacttattaaaacaaataatttcccttgggttggaggggaagtgatttcataaattaattagaaagccatctttagcatattgcttatgtctggatccatgtttctgaggaaaaagacattctcaggtgatgtatttttttcatgcattagtatgcatttttaaaaaataatgcatgtttctttaataattaattttcatcttctataagatgccatgtgaagaagttgtggaaatgtagaataaaaagctaaagctgccaaatttctgttgaactcttaaaaacagctcatgtttgtttgtcctctcgggttgtggcctagcctatttgcaatgtaatgaagctgcagggttcttgtatagctaaagcgttcaatgcatttcacgtgctgtggtggatgtgggtgctgtagacaggcttcttctcttcctgctctcaaaatacctcggcttgacatttggacagatcctgtcattgtttaagctgagcaaaaaaccacacaaaagttgtgtaagagatgagataacaaaggagcgagagaaatctcatgtgaatttccaagttttaattcgttctccatgaaggattttcatttcagtgaaagtcgcagcagaagagggaactttctggagtttttgagaatgccaaaccacatttttatcacacttctttggaaatcaatgcctttgcatagaaaatcaaattcagggaccacaaagaattttcagtgggaatgtctagtctgaggggtctgaggttgtttttactttattgtgttgtttaaatattttaaaaatatctttagcgtttggtcttttttttttctgtaaacatttaatttggtctgagaaaagctgaatgtttgggtgtgacgtttgactgaggtggattggggctgcctgtggacattagtgaacaggtggtaggcttcaggaatatccagttttaatcagttgcatttggtacagaattttgagtaatggtgaaaattgttgtctttggaaagcacaaaagaaacctggaaaggcagttcggctcaggtagctacacataacattgtgtatgattttcacttcaaagctgtctggaaggaaatgcagtcagctccagctagtactatttatgtacccagataactaagatattgtttcatggccttgccttagtcagaggcccttttctctgtcctgaacccccaggtatgggtgaaattggaaattactaatctattggaaatcagttcctgacatagtaaagtttgctttcataactgcagcaaaaaaggtcaacttgccaagtcactgctgccatgtgtgtactgtattattttcagaaaaaaatataatagtctgagtccaagttatcttgatttaaaattgatagagaaaagaaactgtcgagcaagttatataacaactaacaacattgcactttctgtatatgaaatcaatatttaaataacttatttttctccattgctgttcttaaaaacattgtaagtagctgtaatataccagtaccaatatgttcttgcaattgcttcagcccaagaaagctgtgtattgttttaaaaattgtaaaaattattgtgatgattcatttagcataaagagaggtggacggaagggttttcctatgtatcaaaacttgtctataattatgtcatctatgtacctagaaaaaagtaaataaatttcttcagttgaatatg

SEQ ID NO: 630 - protein, 1247 aa, Homo sapiens
MEDAGAAGPGPEPEPEPEPEPEPAPEPEPEPKPGAGTSEAFSRLWTDVMGILDGSLGNIDDLAQQYADYYNTCFSDVCERMEELRKRRVSQDLEVEKPDASPTSLQLRSQIEESLGFCSAVSTPEVERKNPLHKSNSEDSSVGKGDWKKKNKYFWQNFRKNQKGIMRQTSKGEDVGYVASEITMSDEERIQLMMMVKEKMITIEEALARLKEYEAQHRQSAALDPADWPDGSYPTFDGSSNCNSREQSDDETEESVKFKRLHKLVNSTRRVRKKLIRVEEMKKPSTEGGEEHVFENSPVLDERSALYSGVHKKPLFFDGSPEKPPEDDSDSLTTSPSSSSLDTWGAGRKLVKTFSKGESRGLIKPPKKMGTFFSYPEEEKAQKVSRSLTEGEMKKGLGSLSHGRTCSFGGFDLTNRSLHVGSNNSDPMGKEGDFVYKEVIKSPTASRISLGKKVKSVKETMRKRMSKKYSSSVSEQDSGLDGMPGSPPPSQPDPEHLDKPKLKAGGSVESLRSSLSGQSSMSGQTVSTTDSSTSNRESVKSEDGDDEEPPYRGPFCGRARVHTDFTPSPYDTDSLKLKKGDIIDIISKPPMGTWMGLLNNKVGTFKFIYVDVLSEDEEKPKRPTRRRRKGRPPQPKSVEDLLDRINLKEHMPTFLFNGYEDLDTFKLLEEEDLDELNIRDPEHRAVLLTAVELLQEYDSNSDQSGSQEKLLVDSQGLSGCSPRDSGCYESSENLENGKTRKASLLSAKSSTEPSLKSFSRNQLGNYPTLPLMKSGDALKQGQEEGRLGGGLAPDTSKSCDPPGVTGLNKNRRSLPVSICRSCETLEGPQTVDTWPRSHSLDDLQVEPGAEQDVPTEVTEPPPQIVPEVPQKTTASSTKAQPLEQDSAVDNALLLTQSKRFSEPQKLTTKKLEGSIAASGRGLSPPQCLPRNYDAQPPGAKHGLARTPLEGHRKGHEFEGTHHPLGTKEGVDAEQRMQPKIPSQPPPVPAKKSRERLANGLHPVPMGPSGALPSPDAPCLPVKRGSPASPTSPSDCPPALAPRPLSGQAPGSPPSTRPPPWLSELPENTSLQEHGVKLGPALTRKVSCARGVDLETLTENKLHAEGIDLTEEPYSDKHGRCGIPEALVQRYAEDLDQPERDVAANMDQIRVKQLRKQHRMAIPSGGLTEICRKPVSPGCISSVSDWLISIGLPMYAGTLSTAGFSTLSQVPSLSHTCLQEAGITEERHIRKLLSAARLFKLPPGPEAM

SEQ ID NO: 631 - DNA, 1599 bp, Homo sapiens
actcttgggaaaactgctgggcaccgtcgtcgcgctgaaggtggttctgtacctgctccgagtgtgcttagcgatggcctggaaatccggcggcgccagccactcggagctaatccacaatctccgcaaaaatggaatcatcaagacagataaagtatttgaagtgatgctggctacagaccgctcccactatgcaaaatgtaacccatacatggattctccacaatcaataggtttccaagcaacaatcagtgctccacacatgcatgcatatgcgctagaacttctatttgatcagttgcatgaaggagctaaagctcttgatgtaggatctggaagtggaatccttactgcatgttttgcacgtatggttggatgtactggaaaagtcataggaattgatcacattaaagagctagtagatgactcagtaaataatgtcaggaaggacgatccaacacttctgtcttcagggagagtacagcttgttgtgggggatggaagaatgggatatgctgaagaagccccttatgatgccattcatgtgggagctgcagcccctgttgtaccccaggcgctaatagatcagttaaagcccggaggaagattgatattgcctgttggtcctgcaggcggaaaccaaatgttggagcagtatgacaagctacaagatggcagcatcaaaatgaagcctctgatgggggtgatatacgtgcctttaacagataaagaaaagcagtggtccaggtggaagtgattttatcttctgctctttcttcttccacacatgcaagggatgaattgtaaaagcaacatcagcttgaccagtataaaattacagtggattgctcatctcagtcctcaaagctttttgaaaaccaacaccatcacagcttgttttggactttgttacactgttattttcagcatgaaaatgtgtgtttttttagggtttctgattcttcaaagaggcacagagccaaattggtagaggaaggatgcaaagtataaatttgtgtaatattactttaacatgcccatattttacttggaaatattaaaagaaagggttctgtaaaatggaaaacttagtttgtgaattgattttgaggagtggtttttcttttcttggacacttaattctgttctgatattaatttatcagattgcttttgtgcattggataacaccaccattcacaagttaagattcttggtatttggatatctgttagatgctactaagaaaatagagatgagctttctttttaaagcttttgatgtggtgtcatagaatagcatgttgtagatacaatcagctgctttgttaccttaaaactaggcatttgtaaatattaaaccttaagatggcaggtgatgtcctgtaaacactcagctgttcagattggacataactgacttagttcttcccttctctctctctcaaaattataggagacttgtagtttagtgtggttttctgtttctaatttgctgctgataatgtatatgaacttaacatgctgtgtaagctgtgtcctagttcttgaacagtttatgcagtgctgctttgccaaataaagttaaaagtaaaagaggc

SEQ ID NO: 632 - protein, 227 aa, Homo sapiens
MAWKSGGASHSELIHNLRKNGIIKTDKVFEVMLATDRSHYAKCNPYMDSPQSIGFQATISAPHMHAYALELLFDQLHEGAKALDVGSGSGILTACFARMVGCTGKVIGIDHIKELVDDSVNNVRKDDPTLLSSGRVQLVVGDGRMGYAEEAPYDAIHVGAAAPVVPQALIDQLKPGGRLILPVGPAGGNQMLEQYDKLQDGSIKMKPLMGVIYVPLTDKEKQWSRWK

SEQ ID NO: 633 - DNA, 3594 bp, Homo sapiens
ctggtgctgatcaacgccgaggccgactcgtcgccacccagcgcgccgcaggccggggcggagaggcgcagggcgctgggcagtctccggcgagggcaaggagcggtgcccggctgggccggctatgtctcccgctactgcggttcccgccggcgcccgcgacctcgggggagcagccgggttcgggggcgccgcgctgtgaggccggggcctagagccagccgcggccgcgcaggaggggcccagggcccgcgctcgcccgcgtccccgccttcctcccgcgctcagccacgcctcggctcgctgcccttggctctcgtcgccatggcctccgtcgcccaggagagcgcgggctcgcagcgccggctaccgccgcgtcacggggcgctgcgcgggctgctactgctctgcctgtggctgccaagcggccgtgcggccttgccgcccgcggcgccgctgtccgaactgcacgcgcagctgtcgggcgtggagcagctgctggaggagttccgccggcaactgcagcaggagcggcctcaggaggagctggagctggagctgcgcgcgggcggcggcccccaggaggactgcccaggccggggcagcggcggctacagcgcaatgcctgacgccatcatccgcaccaaggactccctggcggcgggtgccagcttcctgcgggcgccggcggccgtgcggggctggcggcaatgcgtggcggcctgctgctccgagccgcgctgctccgtggccgtggtggagctgccccggcgccccgcgcccccggcagccgtgctcggctgctacctcttcaactgcacggcgcgcggccgcaacgtctgcaagttcgcgctgcacagcggctacagcagctacagcctcagccgcgcgccggacggcgccgccctggccaccgcgcgcgcctcgccccggcaggaaaaggatgcgcctccacttagcaaggctgggcaggatgtggttctgcatctgcccacagacggggtggttctagacggccgcgagagcacagatgaccacgccatcgtccagtatgagtgggcactgctgcagggggacccgtcagtggacatgaaggtgcctcaatcaggaaccctgaagctgtcccacctacaggagggaacctacaccttccagctgaccgtgacggacactgccgggcagagaagctctgacaacgtgtcagtgacagtgcttcgcgcagcctactccacaggaggatgtttgcacacttgctcacgctaccacttcttctgtgacgatggctgctgcattgacatcacgctcgcctgcgatggagtgcagcagtgtcctgatgggtctgatgaagacttctgccagaatctgggcctggaccacaagatggtaacccacacggcagctagtcctgccctgccaagaaccacagggccgagtgaagatgcagggggtgactccttggtggaaaagtctcagaaagccactgccccaaacaagccacctgcattatcaaacacagagaagaggaatcattccgccttttggggaccagagagtcaaatcattcctgtgatgccagatagtagttcctcagggaagaacagaaaagaggaaagttatatatttgagtcaaagggtgatggaggaggaggggaacacccagccccagaaacaggtgcagtgctacccctggcgctgggtttggctatcactgctctgctgcttctcatggttgcatgccgactacgactggtgaaacagaaactgaaaaaagctcgtcccattacatctgaggaatcggactacctcataaatgggatgtatctatagtaatgtaatttcaataccttggggcagggacatgttttgtttataatttatacatctattaagttctggatatttacagcttcttttgtttttaattgggccagaagattctgcaaatcccaaatctttctttattatttattgtaaaaaaagtttccttagaagtcataaaatattttgaaatttagagaggaattcatgattaaagattcctaaaaatataattctgatttatgtaagctgtccctgaaaatagaaatgtgtacttagctgagagaaaattcagcatctcaggaggtggtattaggatgactgtgttaacccattaccttttagaagccaactgttggccccttaccatgctggactgctataggcccagcttccccttgttctgtggcccttttcttcctccttgaagctcccagtattctttttcttttcccctctaaacctgtttctgagagtggatctcaagcaagttcatgccttcaatcagatgttacttagggtgggtatacctaaattataaaccttatgtacaagtcagtaagccttagggaaggtgagtgtgggtccttcctaatccctctgacgtcatgtcatataggtggctgcctccttagactgacctttgggagaaaaaaaccccagactttgaattagtaacagctctaagatggtcatgcagtgagataggaaatcaagatggaagcagagaatctggcatgccaaaaactaacagaaacttagttgaaggcaaagagagctaggagaacgtttaatacttcattacatcaaatcaacactgctccatggtgagagcacagcaactcatttatatatatatatataggctttgttgatgaaaaacgacaattgaagagaggacgttgagtggattcctgggtacagcttttgtaaaaatgtcaccatggctttcatccaatggaatgagtcgatgttttttaatgctataaaatgttagaatgtgccatcagctaatgccaggcttacgtatttctagaccataaagcagtttttcacaaattcatctttacagaaaaccagcatctagcttagcatctttccccttttaatttgtaggcttttaaaggcaaatcattcccaccatcacttaacgccgggattatacacattctagaaatgattctgagaggagtgtatagtatggtgcctatctacactcacatgatattcttattcacgttttttttaaccataagtggcaaatattttaaaatatttgaaaaacactccagaatctagtacgctttatttttagactgaacctaaagtaggttgttcttttaacaaagggtttaattcgggtggggaatataacatatcaaaatacatgaacaaatggaaagttacttctagaaaagcaaagaaattgggtatcatttttgtttcttgggaagctaattttgttgaatgtttagaattgagcaaagatgtaaatttttgaagggcagtttagaaaaattaactttgtgaatgaacttaagatgtctgtactctatatgtgatgctgtgcagtttgtttttatatggaaagatgtcaactatagccataaccaataaaataaatactgatgaggcatgcagctttcagcacatcttttatacatgaagaaattaattttgtgttgctatggtgttgaaatatccaagatgttctgtatctatgtaaacatgattcctttaataaattgtattttattattaaaaaaaaaaaaaaaa

SEQ ID NO: 634 - protein, 500 aa, Homo sapiens
MASVAQESAGSQRRLPPRHGALRGLLLLCLWLPSGRAALPPAAPLSELHAQLSGVEQLLEEFRRQLQQERPQEELELELRAGGGPQEDCPGRGSGGYSAMPDAIIRTKDSLAAGASFLRAPAAVRGWRQCVAACCSEPRCSVAVVELPRRPAPPAAVLGCYLFNCTARGRNVCKFALHSGYSSYSLSRAPDGAALATARASPRQEKDAPPLSKAGQDVVLHLPTDGVVLDGRESTDDHAIVQYEWALLQGDPSVDMKVPQSGTLKLSHLQEGTYTFQLTVTDTAGQRSSDNVSVTVLRAAYSTGGCLHTCSRYHFFCDDGCCIDITLACDGVQQCPDGSDEDFCQNLGLDHKMVTHTAASPALPRTTGPSEDAGGDSLVEKSQKATAPNKPPALSNTEKRNHSAFWGPESQIIPVMPDSSSSGKNRKEESYIFESKGDGGGGEHPAPETGAVLPLALGLAITALLLLMVACRLRLVKQKLKKARPITSEESDYLINGMYL

SEQ ID NO: 635 - DNA, 1611 bp, Homo sapiens
atgatgcccacactagttatcctgttgaaagaggggactgatagctcccaaggcatcccccagcttgtgaataacctcagtacctgccaggtgattgccaaggctgtaagagccaccctgggtgcctgtggcatggacaagcttattgtggatggcggaggcaaagcaacaatatctaacgatgtggccacaattctgaaacttcttcatgttgtccatcttgcagcaaagacgttagtagacattgccaaatcccaagacactgaggtcggtgatggcaccatctcagtgaccttgctggctgcagagtttctgaagcaggtgaaactgcaggtgaaggatggtttacaccctcagctcaacattcgagctgtctgcacagccacccagttggtagttaacacgatcaaagagattgctgtgactgtgaagaaggcagataaagtggagtagaggaagctgctggagtagtgtgccaggaccactctgagctccaactgatctcacagcagaaagctttctttgctaagatggtggtggatgcagtgatgacgtgtgatgatttgctgcagcttaaaatgattggaatcaagaaggtacaggatggagcccagctggtgttgcatttaagaagactttctcttatgctgggtttaaaatgcaaccctcccaaaaataccaaaatccctagattgcccttttgaatgttgagctcgagttgaaagctgagaaagataatgcttagataaaagtccacacggttgaggattatcaggcgattgttgatgccgagtggaacattctctatgacaagttagagaggatctatcattttggagccaaagttgtcttgtctgaactccccactggagatgtggccgcccagtactttgctgacaggaacatgttctgtgctggccaagtacctgaggagaatctgaagaggacaatgatggcctgtggaggctcaatccagaccagtacgaatgctttcttagcagatgtgctgggtcgacgccaggtgtttgaagagaccctgattaaaggtgagaggtacaacttttttactggctgcctcaaagccaagacaggcaccttcatcctccatggtggtagtgagcagtttattgaggagacagagcggtccctgtgtgatgccatcatgatcatcaggagggccatcgggaatgagtcagtggtggctggtggcagggccattgagagggagttctccaagtacctccaggattcctcaaagactattccaggaaaacaacagctgttgattggggcatatgccaaggccttggagattgtctcattccagctgtacaataatgctggctttggggccacagagattctcaacaagctgcaggcatggcattcccaggggcacgtgatatgaggtggacatcaacaacgaggacattgctgacaactttgaggccttcgtgtgggagccagctttggtatggatcaatgccctggcagtggcctcttaggctgtgtgcctgattgtgtctgtggatgaaaccatcaagaatccgattgactgtggatgctcccccagcagctagctggggccgtggtcgtggccgcccccattga

SEQ ID NO: 636 - DNA, 885 bp, Homo sapiens
accataccagtgagggtgaatgtgtacacgcccagcttcctgcctgttactctccacagtatgcgaagaatatccctgacttctagccctgtgcgccttcttttgtttctgctgttgctactaatagccttggagatcatggttggtggtcactctctttgcttcaacttcactataaaatcattgtccagacctggacagccctggtgtgaagcgcaggtcttcttgaataaaaatcttttccttcagtacaacagtgacaacaacatggtcaaacctctgggcctcctggggaagaaggtatatgccaccagcacttggggagaattgacccaaacgctgggagaagtggggcgagacctcaggatgctcctttgtgacatcaaaccccagataaagaccagtgatccttccactctgcaagtcgagatgttttgtcaacgtgaagcagaacggtgcactggtgcatcctggcagttcgccaccaatggagagaaatccctcctctttgacgcaatgaacatgacctggacagtaattaatcatgaagccagtaagatcaaggagacatggaagaaagacagagggctggaaaagtatttcaggaagctctcaaagggagactgcgatcactggctcagggaattcttagggcactgggaggcaatgccagaaccgacagtgtcaccagtaaatgcttcagatatccactggtcttcttctagtctaccagatagatggatcatcctgggggcattcatcctgttagttttaatgggaattgttctcatctgtgtctggtggcaaaatggtgagtggcaggctggtctctggcccttgaggacgtcttagtctggtaaggactcaagagaggtgaatcatggg

SEQ ID NO: 637 - protein, 263 aa, Homo sapiens
MRRISLTSSPVRLLLFLLLLLIALEIMVGGHSLCFNFTIKSLSRPGQPWCEAQVFLNKNLFLQYNSDNNMVKPLGLLGKKVYATSTWGELTQTLGEVGRDLRMLLCDIKPQIKTSDPSTLQVEMFCQREAERCTGASWQFATNGEKSLLFDAMNMTWTVINHEASKIKETWKKDRGLEKYFRKLSKGDCDHWLREFLGHWEAMPEPTVSPVNASDIHWSSSSLPDRWIILGAFILLVLMGIVLICVWWQNGEWQAGLWPLRTS

SEQ ID NO: 638 - DNA, 10835 bp, Homo sapiens
caaaaatcagtctgatctcgggaaacctggagaaatttattttctgtactctaatgttctttcattttggtgaccatcaaggtgctgggagaggaattagatggctgtaattcaaagttaatggaattagatgcagcagtacagaaattcttggaacagaatggccaactgggtaagccactggccaagaagataggaaaactgactgaacttcaccagcagaccattagacaagctgagaatcggctctccaagctcaatcaggcagcatcacatttagaagaatacaatgaaatgcttgaattaattttgaagtggattgaaaaagctaaagtcttggctcatggaactattgcatggaattctgcaagccagcttcgggaacaatatattttgcatcagaccctgctagaagaatccaaagaaattgacagtgagctggaagcaatgactgagaaattacagtacctcactagcgtgtactgtacagaaaaaatgtctcagcaagtggcagaactgggacgggagactgaggagttgcgacagatgatcaaaattcgtttgcagaacctccaagatgcagctaaggatatgaaaaaatttgaagcagagttgaaaaagttacaagctgccttggagcaagcccaggcaacactgacttctccagaagttggacgtctcagtctcaaggagcagctctctcatcggcagcatttgttgtctgagatggagtcactgaagccgaaggtgcaagcagtgcagctctgccagagtgccctccggatccccgaggatgtggttgccagcttacctctctgtcatgctgctctgcggctgcaggaagaggccagccggctgcagcacaccgccatccagcagtgtaacatcatgcaggcagctgtggtacaatatgaacaatatgagcaagaaatgaaacatctccagcaactgatagaaggagctcacagagagattgaggataaacctgttgccaccagtaacatacaggagctgcaggctcagatttctcggcatgaggagctggcgcagaaaattaagggctaccaggagcagatcgcttctttgaattccaagtgcaagatgctgacgatgaaagccaagcacgccaccatgctgctgacggtgaccgaggtcgaggggctggcggaagggacagaggacctggatggggagctcctccccacgccttcggcccacccctctgtggtcatgatgactgcaggtcgctgtcacactttgctgtcaccggtcactgaggagtctggggaggagggaaccaacagtgagatttcctctccacctgcctgtcgctccccttcacctgtggctaatacagatgcttctgttaaccaggacattgcatattaccaagccttgtctgctgagaggttgcagacagatgctgcaaaaattcaccccagcacatccgcatcccaggagttctatgaaccgggattggagccatccgctactgccaaactgggtgatttgcagcgttcttgggaaaccttaaagaatgtgatcagtgagaagcagcgcacactctatgaagctttggaacgccagcagaagtaccaggactccctccagtccatctctacgaagatggaggccattgagctgaaactcagtgagagcccagagcctggcaggagtccagaaagccagatggctgaacatcaggcattgatggatgagattctcatgctccaggatgaaatcaatgagctccagtcctctctcgcagaggagctggtatccgagtcttgtgaggccgaccctgcggagcagctggccttgcagtccacgctcactgtcttagccgagcgaatgtccaccatcaggatgaaagcctcggggaaacggcagcttttggaggagaagttgaatgatcagctggaggaacaaaggcaggaacaggccctgcagaggtatcgctgtgaagccgatgagctggacagctggctcttgagtaccaaggccactctggacactgcgctgagtccacccaaggagcccatggacatggaggcccagcttatggactgccagaatatgctggtggaaatagagcagaaggtggtggctttatcagaactgtcagtccacaatgagaacctgctgctggagggcaaagctcacaccaaggacgaggccgagcagctggctggaaagctgagaaggctcaaggggagcctgctggagctgcagagagccctgcatgataagcagctcaacatgcagggaacagcacaggagaaggaggagagcgatgttgacctaacagccacgcagagccccggcgtccaggaatggctggcccaagctcgcaccacatggacccagcagcggcagagcagtctccagcaacaaaaagagttagaacaggaattagccgagcagaagagtctccttcgctcagtagccagtcgtggagaggagattctaattcaacattcggcggcagagacctctggtgatgctggcgaaaaacctgatgtgttatcccaggagttggggatggaaggggagaaatcatccgctgaagaccagatgagaatgaaatgggaaagcctacatcaagaatttagtaccaagcagaaactactacagaatgttctggaacaggaacaagagcaagtgctttatagcaggccaaatcgactcttgtctggtgtgccactgtacaaaggggacgtgccaacccaagataaatctgcagttacatctttgctggatggactgaaccaagccttcgaggaggtttcatcccagagtggaggggcaaagaggcagagtatacacttggagcagaagttgtatgatggagtctcagccacctctacttggttggatgacgttgaagaacgtttatttgttgccacagcacttttaccagaagaaacagagacttgtctcttcaaccaagagattcttgccaaagacattaaggaaatgtctgaagaaatggataagaacaaaaacttgttttcccaagcttttccagagaatggtgataatcgagatgttattgaagatactttgggttgtcttttgggcaggttatccttgctagactcagtagtgaatcaacgatgtcatcagatgaaagaaagacttcagcaaatactaaatttccagaatgatctgaaagtgctgtttacatcactggctgacaacaaatacatcattctgcaaaaactggcaaatgtgtttgaacagcccgtagcagaacaaatagaggcaatacaacaggctgaagatggactcaaagaatttgatgcaggaatcattgaattaaagaggcgtggtgacaagctacaggtcgagcagccgtccatgcaagaactctccaagctccaggacatgtatgatgagctgatgatgatcattggctcccggaggagtggtctgaatcagaaccttacactcaagagtcagtatgagagggccctacaagatctggctgacctgctagaaactggtcaggagaagatggcaggagaccagaaaatcatcgtgtcttccaaagaggaaatccagcaactacttgacaaacataaggaatactttcagggcctggaatctcatatgatcttgactgaaacactcttcagaaagataatcagctttgcagtccaaaaggaaacccagttccatacagagctgatggctcaggcttctgctgtactgaaacgggctcacaagaggggtgtggagctggagtacattctagagacgtggtcccatctggatgaggaccagcaggagctcagcagacagctggaggtggtggaaagcagcatcccaagcgtgggtctggtggaggagaacgaggacaggcttattgaccgcataacactctaccagcatttaaaatctagccttaatgaataccagcccaaattatatcaagtattagatgatgggaaacgacttctgatatccatcagctgctcagatctagaaagccaactaaatcaacttggagagtgctggctaagtaacaccaataaaatgtctaaggaacttcacagactggaaacaatattgaaacactggaccagatatcaaagtgaatctgcagatctaattcactggttacaatctgcaaaagaccggctagaattttggactcagcaatctgtgacagtcccacaagagctggaaatggtccgtgatcatctaaatgctttcctggagttttctaaagaagtggatgcccaatcttccctgaaatcatctgttctgagtactggaaatcagctccttcgactaaaaaaggtggacacagccacgctgcgctctgagctgtcgcgcattgatagccagtggactgacctgctaaccaatatcccagccgtccaggagaagctccaccagctccagatggataaactgccttcccgccatgccatttctgaagtcatgagttggatttctctaatggaaaatgttattcagaaggatgaagataatattaaaaattccataggttacaaggcaattcatgaataccttcagaaatataagggttttaagatagacattaactgtaaacagctgacagtggattttgtgaaccagtccgtgctacaaatcagcagtcaggatgtggaaagtaagcgtagtgataagactgattttgctgagcaacttggagcaatgaataaaagttggcaaattctgcaaggtctagtaactgagaagatccagctgttggaaggcttattggaatcttggtcagaatatgaaaataatgtacaatgtctgaaaacatggtttgaaacccaggaaaagagactaaaacaacagcatcgaattggagatcaggcttctgttcaaaatgcactgaaagactgtcaggatctggaagatttgattaaagcaaaagaaaaagaagtagagaaaattgagcagaatggacttgctttgattcagaacaagaaagaagacgtctctagcattgtcatgagcacactgcgagagctcggccaaacctgggcaaatttagatcacatggttggacaattaaagatactgctgaaatcagtgcttgaccaatggagtagtcacaaagtggcctttgacaagataaacagttacctcatggaggccagatactctctttcccgattccgtctgctgactggctccttagaagctgtgcaagttcaggtggacaatcttcagaatctccaagatgatctggaaaaacaggaaaggagcttacagaaatttggctctatcaccaaccaattattaaaagagtgtcacccacccgtgacagaaactcttaccaatacactgaaagaagtcaacatgagatggaataacttgctggaagagattgctgagcagctacagtccagcaaggccctacttcagctttggcaaagatacaaggactactccaaacagtgtgcttcgacagttcagcagcaggaggatcgaaccaatgagctgttgaaggcagccacaaacaaggacattgccgatgatgaggttgccacatggattcaagattgcaacgacctcctcaaaggactgggcacagttaaagattccctcttttttctccatgagctgggagagcaactgaagcaacaagtggatgcttccgcagcatcagctattcaatcggatcaactctctttgagtcaacacttgtgtgccctggagcaagctctctgcaaacagcagacttcattacaggctggagttcttgattatgaaacctttgccaagagtttagaagctttggaggcctggatagtggaagctgaagaaatactacaagggcaggaccctagccactcatctgacctctccacaatccaggaaaggatggaagaacttaagggacagatgttaaaattcagcagcatggctccagatttagaccgtctaaatgagcttggatataggttacccttgaatgataaggaaatcaaaagaatgcagaatctgaaccgccattggtctctgatctcctctcagactacagaaagattcagcaagttgcagtcatttttgctacaacatcagactttcttggaaaaatgtgaaacatggatggaattcctagttcagacagaacaaaagttagcagtagagatttcaggaaattatcagcaccttttggaacagcagagagcacacgagttgtttcaagccgagatgttcagtcgtcagcagattttgcactcaatcattattgatgggcaacgtcttctagaacaaggtcaagttgatgacagggatgaattcaacctgaaattgacactcctcagtaatcaatggcagggagtgattcgcagggcccagcagaggcgggggatcattgacagccagattcgccagtggcagcgctatagggagatggcagaaaagcttcgtaaatggttggttgaagtgtcctacctccccatgagtggtctcggaagtgttcctataccactgcaacaagcaaggaccctctttgatgaagtgcagttcaaagaaaaagtgtttctgcggcaacaaggcagctacatcctgactgtggaggctggcaagcaactccttctctcggcggacagtggcgctgaggccgccttgcaggccgaactcgctgaaatccaagagaaatggaaatcagccagcatgcggctggaagaacagaagaaaaaactagccttcttgttgaaagactgggaaaaatgtgagaaaggaatagcagattccctggagaaactacgaactttcaaaaagaagctttcgcagtctctcccggatcaccatgaagagctccatgcagaacaaatgcgttgcaaggaattagaaaatgcagttgggagctggacagatgacttgacccagttgagcctgctgaaggacaccctctctgcctatatcagtgctgatgatatctccattcttaatgaacgcgtagagcttctgcaaaggcagtgggaagaactatgccaccagctctccttaaggcggcagcaaataggtgaaagattgaatgaatgggcagtcttcagtgaaaagaacaaggaactctgtgagtggttgactcaaatggaaagcaaagtttctcagaatggagacattctcattgaagaaatgatagagaagctcaagaaggattatcaagaggaaattgctattgctcaagagaacaaaatacagctccaacaaatgggagaacgacttgctaaagccagccatgaaagcaaagcatctgagattgaatacaagctgggaaaggtcaacgaccggtggcagcatctcctggacctcattgcagccagggtgaagaagctgaaggagaccctggtagccgtgcagcagcttgataagaacatgagcagcctgaggacctggctcgctcacatcgagtcagagctggccaagccaatagtctacgattcctgtaactcggaagaaatacagagaaagcttaatgagcagcaggagcttcagagagacatagagaagcacagtacaggtgttgcatctgtcctcaacctgtgtgaagtcctgctgcacgactgtgacgcctgtgccactgatgccgagtgtgactctatacagcaggctacgagaaacctggaccggcggtggagaaacatttgtgctatgtccatggaaaggaggctgaaaatcgaagagacgtggcgattgtggcagaaatttctggatgactattcacgttttgaagattggctgaagtcttcagaaaggacagctgcttttcccagctcttctggggtgatctatacagttgccaaggaagaactaaagaaatttgaggctttccagcgacaggtccacgagtgcctgacgcagctggaactgatcaacaagcagtaccgccgcctggccagggagaaccgcactgattcagcatgtagcctcaaacagatggttcacgaaggcaaccagagatgggacaacctgcaaaagcgtgtcacctccatcttgcgcagactcaagcattttattggccagcgtgaggagtttgagactgcgcgggacagcattctggtctggctcacagagatggatctgcagctcactaatattgaacatttttctgagtgtgatgttcaagctaaaataaagcaactcaaggccttccagcaggaaatttcactgaaccacaataagattgagcagataattgcccaaggagaacagctgatagaaaagagtgagcccttggatgcagcgatcatcgaggaggaactagatgagctccgacggtactgccaggaggtcttcgggcgtgtggaaagataccataagaaactgatccgcctgcctctcccagacgatgagcacgacctctcagacagggagctggagctggaagactctgcagctctgtcggacctgcactggcacgaccgctctgcagacagcctgctttctccacagccttcctccaatctctccctctcgctcgctcagcccctccggagcgagcggtcaggacgagacaccccggctagtgtggactccatccccctggagtgggatcacgactatgacctcagtcgggacctggagtctgcaatgtccagagctctgccctctgaggatgaagaaggtcaggatgacaaagatttctacctccggggagctgttggcttatcaggggaccacagtgccctagagtcacagatccgacaactgggcaaagccctggatgatagccgttttcagatacagcaaaccgaaaatatcattcgcagcaaaactcccacggggccggagctagacaccagctacaaaggctacatgaaactgctgggcgaatgcagtagcagtatagactccgtgaagagactggagcacaaactgaaggaggaagaggagagccttcctggctttgttaacctgcatagtaccgaaacccaaacggctggtgtgattgaccgatgggagcttctccaggcccaggcattgagcaaggagttgaggatgaagcagaacctccagaagtggcagcagtttaactcagacttgaacagcatctgggcctggctgggggacacggaggaggagttggaacagctccagcgtctggaactcagcactgacatccagaccatcgagctccagatcaaaaagctcaaggagctccagaaagctgtggaccaccgcaaagccatcatcctctccatcaatctctgcagccctgagttcacccaggctgacagcaaggagagccgggacctgcaggatcgcttgtcgcagatgaatgggcgctgggaccgagtgtgctctctgctggaggagtggcggggcctgctgcaggatgccctgatgcagtgccagggtttccatgaaatgagccatggtttgcttcttatgctggagaacattgacagaaggaaaaatgaaattgtccctattgattctaaccttgatgcagagatacttcaggaccatcacaaacagcttatgcaaataaagcatgagctgttggaatcccaactcagagtagcctctttgcaagacatgtcttgccaactactggtgaatgctgaaggaacagactgtttagaagccaaagaaaaagtccatgttattggaaatcggctcaaacttctcttgaaggaggtcagtcgtcatatcaaggaactggagaagttattagacgtgtcaagtagtcagcaggatttgtcttcctggtcttctgctgatgaactggacacctcagggtctgtgagtcccacatcaggaaggagcaccccaaacagacagaaaacgccacgaggcaagtgtagtctctcacagcctggaccctctgtcagcagtccacatagcaggtccacaaaaggtggctccgattcctccctttctgagccagggccaggtcggtccggccgcggcttcctgttcagagtcctccgagcagctcttccccttcagcttctcctgctcctcctcatcgggcttgcctgccttgtaccaatgtcagaggaagactacagctgtgccctctccaacaactttgcccggtcattccaccccatgctcagatacacgaatggccctcctccactctgaactaagcagatgccatctgcagaagtgctggtagcataaggaggatcgggtcataagcaatcccaaactaccaacaagaggaccttgatcttggcgaaagccctcggtgtggcagctttagccctcctccagatcacatgtgtgcaaattatggcttcagaggtggaagataaacagtgacgggggaacaaacagacaacaagaaggtttggaagaaatctggtttgagactctgaaccttagcactaaggagattgagtaaggacctccaaagttccccggactcatgaattctgggcccttggcccattctgtgcacagccaaggacttcagtagaccatctgggcagctttcccatggtgctgctccaaccatcagataaatgaccctcccaagcaccatgtcagtgtcgtacaatctaccaaccaaccagtgctgaagagattttagaaccttgtaacatacaatttttaagagcttatatggcagcttcctttttaccttgttttcctttggggcatgatgttttaacctttgctttagaagcacaagctgtaaatctaaaaggcacttttttttagaggtataaagaaaaactagatgtaataaataagatcatggaaggctttatgtgaaaaaagttgaatgttatagtaaaaaaaaaaagatatttatgtatgtacagtttgctaaagccaagttttgtttgtattgatttctttgcatttattatagatattataaaata

SEQ ID NO: 639 - protein, 3321 aa, Homo sapiens
MELDAAVQKFLEQNGQLGKPLAKKIGKLTELHQQTIRQAENRLSKLNQAASHLEEYNEMLELILKWIEKAKVLAHGTIAWNSASQLREQYILHQTLLEESKEIDSELEAMTEKLQYLTSVYCTEKMSQQVAELGRETEELRQMIKIRLQNLQDAAKDMKKFEAELKKLQAALEQAQATLTSPEVGRLSLKEQLSHRQHLLSEMESLKPKVQAVQLCQSALRIPEDVVASLPLCHAALRLQEEASRLQHTAIQQCNIMQAAVVQYEQYEQEMKHLQQLIEGAHREIEDKPVATSNIQELQAQISRHEELAQKIKGYQEQIASLNSKCKMLTMKAKHATMLLTVTEVEGLAEGTEDLDGELLPTPSAHPSVVMMTAGRCHTLLSPVTEESGEEGTNSEISSPPACRSPSPVANTDASVNQDIAYYQALSAERLQTDAAKIHPSTSASQEFYEPGLEPSATAKLGDLQRSWETLKNVISEKQRTLYEALERQQKYQDSLQSISTKMEAIELKLSESPEPGRSPESQMAEHQALMDEILMLQDEINELQSSLAEELVSESCEADPAEQLALQSTLTVLAERMSTIRMKASGKRQLLEEKLNDQLEEQRQEQALQRYRCEADELDSWLLSTKATLDTALSPPKEPMDMEAQLMDCQNMLVEIEQKVVALSELSVHNENLLLEGKAHTKDEAEQLAGKLRRLKGSLLELQRALHDKQLNMQGTAQEKEESDVDLTATQSPGVQEWLAQARTTWTQQRQSSLQQQKELEQELAEQKSLLRSVASRGEEILIQHSAAETSGDAGEKPDVLSQELGMEGEKSSAEDQMRMKWESLHQEFSTKQKLLQNVLEQEQEQVLYSRPNRLLSGVPLYKGDVPTQDKSAVTSLLDGLNQAFEEVSSQSGGAKRQSIHLEQKLYDGVSATSTWLDDVEERLFVATALLPEETETCLFNQEILAKDIKEMSEEMDKNKNLFSQAFPENGDNRDVIEDTLGCLLGRLSLLDSVVNQRCHQMKERLQQILNFQNDLKVLFTSLADNKYIILQKLANVFEQPVAEQIEAIQQAEDGLKEFDAGIIELKRRGDKLQVEQPSMQELSKLQDMYDELMMIIGSRRSGLNQNLTLKSQYERALQDLADLLETGQEKMAGDQKIIVSSKEEIQQLLDKHKEYFQGLESHMILTETLFRKIISFAVQKETQFHTELMAQASAVLKRAHKRGVELEYILETWSHLDEDQQELSRQLEVVESSIPSVGLVEENEDRLIDRITLYQHLKSSLNEYQPKLYQVLDDGKRLLISISCSDLESQLNQLGECWLSNTNKMSKELHRLETILKHWTRYQSESADLIHWLQSAKDRLEFWTQQSVTVPQELEMVRDHLNAFLEFSKEVDAQSSLKSSVLSTGNQLLRLKKVDTATLRSELSRIDSQWTDLLTNIPAVQEKLHQLQMDKLPSRHAISEVMSWISLMENVIQKDEDNIKNSIGYKAIHEYLQKYKGFKIDINCKQLTVDFVNQSVLQISSQDVESKRSDKTDFAEQLGAMNKSWQILQGLVTEKIQLLEGLLESWSEYENNVQCLKTWFETQEKRLKQQHRIGDQASVQNALKDCQDLEDLIKAKEKEVEKIEQNGLALIQNKKEDVSSIVMSTLRELGQTWANLDHMVGQLKILLKSVLDQWSSHKVAFDKINSYLMEARYSLSRFRLLTGSLEAVQVQVDNLQNLQDDLEKQERSLQKFGSITNQLLKECHPPVTETLTNTLKEVNMRWNNLLEEIAEQLQSSKALLQLWQRYKDYSKQCASTVQQQEDRTNELLKAATNKDIADDEVATWIQDCNDLLKGLGTVKDSLFFLHELGEQLKQQVDASAASAIQSDQLSLSQHLCALEQALCKQQTSLQAGVLDYETFAKSLEALEAWIVEAEEILQGQDPSHSSDLSTIQERMEELKGQMLKFSSMAPDLDRLNELGYRLPLNDKEIKRMQNLNRHWSLISSQTTERFSKLQSFLLQHQTFLEKCETWMEFLVQTEQKLAVEISGNYQHLLEQQRAHELFQAEMFSRQQILHSIIIDGQRLLEQGQVDDRDEFNLKLTLLSNQWQGVIRRAQQRRGIIDSQIRQWQRYREMAEKLRKWLVEVSYLPMSGLGSVPIPLQQARTLFDEVQFKEKVFLRQQGSYILTVEAGKQLLLSADSGAEAALQAELAEIQEKWKSASMRLEEQKKKLAFLLKDWEKCEKGIADSLEKLRTFKKKLSQSLPDHHEELHAEQMRCKELENAVGSWTDDLTQLSLLKDTLSAYISADDISILNERVELLQRQWEELCHQLSLRRQQIGERLNEWAVFSEKNKELCEWLTQMESKVSQNGDILIEEMIEKLKKDYQEEIAIAQENKIQLQQMGERLAKASHESKASEIEYKLGKVNDRWQHLLDLIAARVKKLKETLVAVQQLDKNMSSLRTWLAHIESELAKPIVYDSCNSEEIQRKLNEQQELQRDIEKHSTGVASVLNLCEVLLHDCDACATDAECDSIQQATRNLDRRWRNICAMSMERRLKIEETWRLWQKFLDDYSRFEDWLKSSERTAAFPSSSGVIYTVAKEELKKFEAFQRQVHECLTQLELINKQYRRLARENRTDSACSLKQMVHEGNQRWDNLQKRVTSILRRLKHFIGQREEFETARDSILVWLTEMDLQLTNIEHFSECDVQAKIKQLKAFQQEISLNHNKIEQIIAQGEQLIEKSEPLDAAIIEEELDELRRYCQEVFGRVERYHKKLIRLPLPDDEHDLSDRELELEDSAALSDLHWHDRSADSLLSPQPSSNLSLSLAQPLRSERSGRDTPASVDSIPLEWDHDYDLSRDLESAMSRALPSEDEEGQDDKDFYLRGAVGLSGDHSALESQIRQLGKALDDSRFQIQQTENIIRSKTPTGPELDTSYKGYMKLLGECSSSIDSVKRLEHKLKEEEESLPGFVNLHSTETQTAGVIDRWELLQAQALSKELRMKQNLQKWQQFNSDLNSIWAWLGDTEEELEQLQRLELSTDIQTIELQIKKLKELQKAVDHRKAIILSINLCSPEFTQADSKESRDLQDRLSQMNGRWDRVCSLLEEWRGLLQDALMQCQGFHEMSHGLLLMLENIDRRKNEIVPIDSNLDAEILQDHHKQLMQIKHELLESQLRVASLQDMSCQLLVNAEGTDCLEAKEKVHVIGNRLKLLLKEVSRHIKELEKLLDVSSSQQDLSSWSSADELDTSGSVSPTSGRSTPNRQKTPRGKCSLSQPGPSVSSPHSRSTKGGSDSSLSEPGPGRSGRGFLFRVLRAALPLQLLLLLLIGLACLVPMSEEDYSCALSNNFARSFHPMLRYTNGPPPL

SEQ ID NO: 640 - DNA, 27436 bp, Homo sapiens
cggccgccggccgcagcgggctgagattgttgtcctctgtcaccagggcggctgggctcccgcagtcctgcagaccgcgcccgatcccggcgacagggcgggcggacagccgcgcatccccggggtcccgccgagcctgggcgcagagagccgggaggaagcgttcgctcgcttcgccttgctgctgggaaactgaacgaggccgagagagaaggttcttgagttcatgtaagaggacagtcttaaaacggaagaagaaaaagaagcagttcagtctttgggagagctgcctccttgttgagtgctgcaaaggcctggaattcatttatgacagaatagatctagaaaagtccaagcatgttttctagagtggtgtagccctgtgctgcctccagtgaagagtctcttggtgttggcttcgtgcttccggagggaccatggcaacctccagaggggcctcccggtgtcctcgggatatcgccaatgtgatgcagaggctgcaagatgagcaagagatagtacaaaaacgaactttcacaaaatggatcaactctcatctggccaagcggaaacctccaatggtggtggacgatctttttgaagacatgaaagatggtgttaaactgcttgcccttctggaggtcctgtctgggcagaaactgccttgtgaacaaggacgccggatgaagcgaatccatgctgtggctaacattggcacggcactcaagttcctcgaaggaagaaagtccatgcacagaggatcaccgattaaattagtcaacattaactccaccgatatagctgatggccgaccctcaatagttcttggattgatgtggaccattattctatatttccagattgaagagttgaccagcaacctgccccagctccagtctttgtccagcagcgcatcctccgtggacagcatagttagctctgagactcccagcccaccaagtaaacggaaggtgaccaccaagatccaaggaaatgctaagaaggctttattaaagtgggttcagtacacagctggcaagcagactggaatagaagtaaaagattttgggaagagttggagaagcggggttgcctttcattcagttattcatgccattcgaccggaattggtggacttggagacagtgaaaggcagatccaaccgagaaaatttggaggatgctttcactatcgccgaaacagaactggggatcccaagactgctagatcctgaagacgttgatgtggataaaccagatgagaaatctattatgacctatgtagcccagtttctgaaacattatcctgacatccacaatgcaagcactgatgggcaagaggatgatgaaatacttccaggtttcccatcttttgcaaattctgtacaaaattttaagagagaagacagagtaatttttaaggaaatgaaagtttggatagaacaatttgagagagatttgacaagagcacagatggtggaatcaaatttacaggataaatatcagtcatttaagcacttcagagttcaatatgaaatgaagaggaaacagattgaacatttaatacaaccattacacagagacggtaaattgtcacttgaccaagcattggtaaaacaatcttgggatagagtgacctccaggctctttgactggcatatacagcttgataaatctcttcctgcacctctgggcaccataggtgcctggctgtacagagcggaggtggccctgagagaggaaataaccgttcaacaggtccacgaggaaacagcaaacacgatacaacggaaacttgagcaacataaggatctgcttcaaaacacggatgcccacaaaagagcattccatgaaatctaccggaccaggtctgttaacgggattccagtgccacctgatcaattagaggacatggccgagaggtttcattttgtttcctccacatcagagctacacctaatgaaaatggaatttttagaattaaagtaccgtctgctctcactgctggttcttgcagagtcaaagctgaagtcttggatcattaagtacgggaggagagagtcagtggagcagcttctacaaaactacgtgtcttttatagaaaatagcaagttctttgaacaatatgaggtgacataccagatcttgaaacagacagctgagatgtatgtcaaagcagatggttcagtggaagaagctgagaatgtgatgaaattcatgaatgaaaccaccgctcagtggaggaatctctcagtagaagtgaggagtgtgaggagcatgctggaagaagtgatctctaactgggatcgctatggcaatacagtggctagtctgcaagcctggctagaggatgctgaaaaaatgctcaatcaatcagaaaatgccaaaaaggatttttttcgaaatttacctcattggattcagcagcatactgccatgaacgatgctggcaattttctaattgaaacctgtgatgagatggtttcccgtgacctgaagcagcaattactgttgctaaatgggcggtggagggagttgtttatggaagtcaagcaatatgctcaagctgatgagatggacagaatgaagaaggaatacacagactgtgttgttaccctgtctgcttttgcaacggaagcccataagaaactttctgaacccttagaagtctcttttatgaatgtcaagctattaattcaagacttggaggatattgagcagagggtgcctgtgatggatgcccaatacaagataattacaaagacagcacacctcattaccaaagaaagcccccaagaagaaggaaaagaaatgtttgcgaccatgtcaaagctcaaagagcagctaaccaaggtcaaagaatgttactccccactcctttatgagtctcagcagctgttgattccgttggaggaattagaaaagcagatgacgtccttttatgactcacttgggaaaatcaatgaaattatcacagttcttgagcgtgaggcacaatcgagtgccctttttaaacaaaaacatcaggaactgttagcttgtcaagaaaactgtaagaaaaccttgacacttattgagaaaggcagtcaaagtgttcaaaagtttgtgaccttgagcaacgtgttaaagcattttgatcagacgaggctacaaagacagattgcagatattcatgttgcttttcagagtatggtaaagaaaactggagattggaagaagcatgtggaaaccaacagtcgcttgatgaagaagtttgaggagtctcgagcagagttggagaaggtactgcggattgctcaggagggcctggaggaaaagggggatccagaggagctcctgcggagacacactgagtttttcagtcagctggatcagagggtgctcaatgctttcctgaaagcttgtgatgaactcaccgacatccttccagagcaggagcagcaggggctgcaggaagctgttcgaaagctccacaaacaatggaaggatcttcaaggagaagccccttatcatttgcttcatctgaagattgatgtggagaagaataggttcttagcctctgtagaagaatgcagaactgagctggatcgagagaccaagctgatgccccaggaaggcagtgaaaagataattaaagagcacagggttttcttcagtgacaaaggtcctcatcatctctgtgagaaaaggttacagctcatcgaggaactctgtgtgaaactcccagtgcgggacccagtaagggacacacctggaacctgtcacgtgactctcaaagagctcagagctgccattgacagcacctacaggaagctcatggaagacccagacaagtggaaggactacactagcagattctctgagttctcatcttggatatctacaaatgagacacaattaaaggggatcaagggtgaggccatcgatactgccaaccacggagaggttaaacgtgccgttgaagagatcagaaatggtgttaccaaaaggggtgagaccctcagctggctgaaatccaggctgaaagttttgacagaagtttcttctgagaatgaagcccaaaagcagggagatgagctggcaaaattatccagctctttcaaggctcttgtgacgctgctgtcagaggttgaaaagatgctaagcaattttggggactgtgtccagtacaaagaaatagtcaaaaattctctcgaagaattaatttctggctctaaagaagtccaggaacaagctgagaagatcttggatactgaaaatctgtttgaagcacagcagttacttcttcatcaccagcaaaagacaaagcggatctcagcaaagaagagagatgtgcagcagcagatcgcgcaggcgcagcagggagaaggggggctgcctgaccgaggccacgaggagctgcggaagctggagagcacactggatggcctggagcgcagccgggagaggcaggaacgccgcatccaggtcacattaagaaaatgggagcgatttgaaacaaacaaagaaacagtagtaagatacctttttcaaacaggttccagtcatgaacgcttcttgagttttagcagtttggaaagtttatcttcagaactggaacaaacaaaggagttttctaaacggacagaaagtattgcagtccaggctgagaaccttgtaaaggaagcttcagagataccgcttgggccccaaaataagcagctgcttcaacagcaggccaagtcaatcaaagaacaagtcaaaaaattagaagacacgcttgaagaagatattaaaaccatggaaatggtgaaaaccaagtgggatcattttggcagtaattttgagactctgtccgtctggataactgagaaagaaaaagaactcaatgccttggaaacttcgtcatctgccatggacatgcaaatcagccaaattaaggtcacaattcaggaaatagaaagtaagctcagcagcattgtaggattagaagaagaagcccagtcttttgctcagtttgttaccactggagaatctgctcgaattaaagccaagttgacacaaataagaagatacggggaagagcttcgagagcatgcacagtgtctggaaggaacaatcctgggacatttatctcagcagcaaaagtttgaagagaaccttagaaagatccagcaatctgtgtctgaatttgaagataaacttgctgttccaattaaaatatgttcttcagctacagaaacatacaaagttcttcaagaacatatggatctctgccaggccctggagtcactgagcagcgcgatcactgccttctcagccagtgccaggaaggttgtgaacagagattcctgtgttcaggaggctgcggctctacagcagcaatacgaggacatcctaaggagggcgaaggagagacagacggcgctggagaatctgctggcccactggcagaggctagagaaagaactatcatcctttttgacctggttagagcggggtgaagctaaagccagttccccagaaatggacatttctgcagacagagtcaaagtggaaggtgaacttcagttaatacaggcactgcaaaatgaagttgtatcccaggcctcattctatagcaaacttttgcaattgaaggaatcattgttctcagtagcctccaaagatgatgtgaaaatgatgaaactacatttggagcagttggatgagagatggagagatttaccacagatcattaacaaaaggattaattttcttcagtctgtggttgctgaacaccagcaatttgatgagctgctgctttccttttctgtctggattaaactgtttctcagtgaattacaaactacctctgagattagcataatggaccatcaagtagcccttactcggcataaggaccacgcagcagaagtagagagcaaaaagggcgaattgcagagtctgcagggtcacttagcaaagttgggttctctgggccgtgctgaggacctccacctcctgcagggaaaggctgaggactgcttccagctgtttgaggaggccagccaggttgtggagaggcggcagcttgccctgtcccatttggcagaattcctccagagccatgcctctctgtccggcattctccgccagctgaggcaaacagtggaagcaaccaacagtatgaataagaacgagtctgatttgatagaaaaggacctcaatgatgctcttcaaaatgctaaagcattagaatctgctgccgtcagtctggatggcattctttccaaagcccaataccatctgaaaatcgggagctctgagcaaaggacttcctgcagagccacggctgatcagctctgtggagaggtagagaggatccagaaccttctgggaaccaagcagagtgaggcagatgctctggcagtgttgaaaaaagcattccaagaccagaaagaggagcttctgaaaagcattgaggacattgaagaaaggactgacaaagagcgattgaaagaacctacccgccaagctcttcagcagaggttaagagtgtttaatcagctagaagatgaattgaattctcacgagcatgaactatgttggttgaaagacaaagccaagcaaattgcccagaaagatgtagcttttgcacctgaagttgacagggagataaaccgcttagaggtcacctgggatgataccaaaagactaattcatgaaaatcagggtcagtgctgtggacttattgacttaatgagagaatatcagaacctgaaatcagctgtatctaaagtcttagaaaatgccagcagtgtgattgtaaccagaactaccataaaagatcaggaggatcttaaatgggctttttccaagcatgaaactgccaagaacaaaatgaattacaaacagaaagacttggataactttaccagcaaaggaaaacacttgttatctgagctgaagaaaattcacagtagtgatttcagcttggtgaaaacagacatggagagcaccgtggacaaatggctggatgtatcagagaaacttgaagaaaacatggataggctgagagtaagcctgtccatttgggatgatgtactgtcaactagagatgagattgagggatggtcaaacaactgcgttccacagatggcagaaaacatcagcaacctggataaccacctcagagctgaagaactgcttaaagaatttgagtctgaagttaaaaacaaagcattgagattggaagaactgcattccaaagttaatgatctgaaagaattaactaaaaatctagaaacaccgccagaccttcagtttatagaagcagacttaatgcagaaactggagcatgccaaagaaataactgaagtagcaaaaggaaccctgaaggatttcacggctcaaagtacacaagtggagaagtttattaatgacataacaacatggttcacaaaagtggaagaatcgttgatgaactgtgcccaaaatgagacttgtgaagcattgaaaaaagtcaaggatatacaaaaagaacttcaaagtcaacaaagcaacatcagctctacccaagaaaatctcaatagcttgtgccgcaagtaccactcagctgagttggagagcctgggccgtgcaatgactggtctgataaagaaacatgaagccgtgagccagttgtgctccaaaacccaggccagcctgcaggaatctctggaaaaacacttcagtgagtctatgcaggaattccaagaatggtttttgggagcaaaggcagcagcaaaagaatcatcagatcgcaccggtgacagcaaagttctagaagcaaagctccatgatcttcagaacattttggactcagtcagtgatgggcagagcaaacttgatgcagtgactcaagaaggacaaactttgtatgcacatttgtctaaacaaattgtcagtagcattcaagaacaaatcacaaaggccaatgaagagtttcaagcatttctgaaacaatgccttaaagataagcaggctcttcaagactgtgcttcagaacttggaagctttgaagatcagcacagaaaactgaacttatggatccatgaaatggaagaaaggttcaatacggaaaacttgggagagagtaaacagcacattcctgagaagaaaaatgaagttcataaagttgaaatgtttttgggagaactgctggctgcaagagagtctcttgataagctttcccagagagggcagcttctgagtgaagaaggccacggtgctgggcaggagggccgcctgtgttcccagctcctcacaagccaccagaacctacttagaatgaccaaagagaaactccggagctgccaggtggcccttcaggagcacgaagccctggaggaagcactgcaaagcatgtggttctgggtgaaggccattcaggacagactggcctgtgcagagagcactcttgggagcaaagacaccctggagaaacggctgtcacaaatacaggatattctcctgatgaaaggtgaaggggaagttaagttgaatatggccattggcaagggggaacaggccttgagaagtagcaacaaagaaggtcagagggtgattcagactcagttagagacccttaaagaagtgtgggctgacatcatgagctcctccgtccacgctcaaagcactttagagtctgtgattagccaatggaatgactatgtagagaggaaaaaccagttggagcagtggatggaatcagtggatcaaaaaatagaacatcccttacaaccacagccaggtctgaaagagaagttcgtcctgcttgaccacctccagtccatcctgtctgaggcagaagatcacacgagagcccttcaccgtctaattgcgaagtccagggagctctacgaaaagacagaggatgagtctttcaaggacacagctcaagaggagctgaaaacacagtttaatgatataatgactgttgccaaggaaaaaatgaggaaagtggaagagattgtgaaagatcatctaatgtatttagatgcggtccacgagttcacagattggctccattcagcaaaggaagaacttcaccggtggtcagatatgtctggagattcatcagccacccagaaaaagttatcaaaaattaaggagctgatagattccagagagattggtgcaagccgtctcagcagagtggagtcgctggctcccgaagtgaaacagaacacaactgccagtgggtgtgagctcatgcacacggagatgcaggccctgcgtgccgactggaagcagtgggaagacagtgtattccaaacgcagagctgtttggagaacctggtcagccagatggccctttcggagcaggaattctcaggccaagtggctcaactggagcaggccctggaacagttcagtgcccttctgaaaacctgggctcagcagttaaccctcctggaaggcaagaacacggatgaggagatagtggaatgctggcacaaaggacaagagatactggatgctttgcaaaaagcagagcctagaacagaggatctcaagtctcagctgaatgaactttgtcgattttccagagacctgagtacctacagtggaaaagtttctggcttgattaaagagtataattgtctttgtttgcaagcatccaagggctgccagaataaagaacagattttacagcaaagatttcgaaaggccttcagggatttccagcagtggttggttaatgcaaaaatcactaccgccaagtgttttgatatacctcaaaatataagtgaagtttcaactagtcttcagaaaatacaggagtttttgtcagaaagtgaaaatggacagcacaagctaaacatgatgctgtctaaaggggaacttctgagtaccctgctgaccaaagagaaagcgaaagggatccaggccaaagttacagctgcaaaagaagattggaaaaattttcattcaaatctccaccaaaaagaatctgctctagagaatctaaagatccaaatgaaggactttgaagtaagtgctgagcctatccaggactggctgagtaaaactgagaagatggtccatgaaagcagcaatcgcctctatgatctgccagcaaagaggagggagcagcagaagctccagtctgtccttgaggaaatacactgctacgagcctcagctcaacaggctgaaagagaaagctcagcagctgtgggaaggacaagctgccagcaagagctttaggcacagagtgtcgcagctgtcttctcagtatctagcgctaagcaatttaacaaaggagaaagtgtcaagactggatagaatcgttgcagaacacaatcagttctctcttgggattaaagaattacaagactggatgacggatgcgattcacatgctggattcatactgccacccgacatccgacaaaagtgtgctggacagcaggacgctcaagctcgaggctctattatcagtcaaacaggaaaaagagattcagatgaaaatgatagtgaccaggggagaatctgtccttcagaatacttctccagaaggcattcccactattcagcagcagctgcagagtgtgaaggatatgtgggcatcccttttgtctgcagggattcgttgtaaaagccaactcgaaggagctctctccaagtggacaagttatcaggatggcgttcgacagttctccggttggatggatagtatggaagccaacctgaatgaatcagaaaggcagcatgcggagctgcgggataaaacaacgatgctcggaaaagccaagttattaaatgaagaagtgctgagttacagcagcttgctggagaccatcgaagtcaaaggggctggcatgacagaacactatgtcacccagctagaactccaggatctacaggaacgatacagagccatccaagagagggccaaggaagccgtaaccaagtctgaaaaacttgtccgcctgcaccaagagtatcagagagacctaaaggcatttgaagtttggttggggcaagaacaagaaaagctcgaccagtattcagttcttgaaggtgatgcccacactcatgagacaacattgcgtgatcttcaggagctacaggtacactgtgcagaggggcaggccctgttgaactcagtgctgcacaccagagaggatgtgatcccatcaggtatcccacaggcagaggaccgggctttagagtctctccggcaagactggcaggcttaccagcacaggctgtccgagactcgaactcagttcaataacgtggtgaacaaattgaggctaatggagcaaaagtttcagcaagtagatgaatggctcaaaacagcagaggagaaaaagtggcacgaagaagtgactgcatacagagatgaagttgaggaagtgggagctagagctcaggagatactggacgagagccacgtgaacagcagaatgggttgccaggccacccagctgacttccagataccaggccctgcttctccaagtgctggaacaaataaaattcctggaggaggagattcagagtttggaggaatcagaatcatccctcagttcctattctgattggtatggctctactcataaaaacttcaagaatgtggctaccaagattgacaaagtagatacagtaatgatggggaagaaattgaagacgttggaggttttgctcaaagacatggagaaaggtcacagtttgctgaaatcagcccgggagaaaggagagagggctgttaaatacttggaggaaggcgaggcagagaggttaagaaaggagattcatgatcacatggagcagttgaaggaactgaccagcactgtccggaaagaacacatgacgctggaaaaaggtcttcatttagcaaaggaattctcagataaatgcaaagcactgacacagtggatagcagaataccaggaaattctacatgttcctgaagaacccaaaatggaattatatgagaaaaaagctcagttatctaaatacaagtcacttcaacaaacggtgctgtcccatgaaccatcagtaaagtcagtgagagagaagggtgaagctcttttggaactggtgcaggacgtcactttaaaggacaaaatagatcaacttcaaagtgattaccaggacctgtgcagcataggaaaggcaatgatggaagaaattgctggttttgaagaccgtttgaacaatcttcaaatgaaaggtgatactttgattggccaatgtgcagaccacctgcaagcgaaacttaaacaaaacgtgcatgctcatctgcagggcacaaaggacagctactcagcgatctgcagcacagctcagaggatgtaccagagtttggaacacgaacttcagaagcacgtcagccgacaagacaccctgcagcagtgccaggcctggctttctgcagtccagccggatttagagccaagtcctcaaccacctcttagtagggcagaagccattaagcaggtcaaacacttcagagctttgcaagagcaggcaaggacctacctagatctcctttgctccatgtgtgacctgtcaaatgcttcggtgaaaaccacagcaaaagacattcaacaaacagagcaaacgattgaacaaaagcttgtccaggcccagaacttaactcagggctgggaagagatcaagcacctgaagtctgagctctggatttacctgcaagatgctgatcagcaactgcagaacatgaagaggaggcactctgagctggagctgaacattgcacagaacatggtttcacaagttaaggattttgttaagaaactacagagcaaacaggcatccgtgaacaccataatagaaaaggtgaataagttaacaaagaaggaggaatcgcctgaacacaaggaaataaatcatttaaatgatcagtggctcgatttgtgccgtcagtctaacaacctgtgcttgcaaagggaagaggatcttcagagaacaagagattaccatgactgtatgaatgttgttgaagtgttcctagaaaaatttactacagaatgggataacttggccagatctgatgcagagagtacagctgtccacctggaagctttgaaaaagttagcattggcattgcaggagagaaagtatgctattgaagatctgaaagatcaaaagcagaaaatgatagagcatctgaatttagatgacaaggagttagtcaaagaacagacgagtcatttagagcaacgttggtttcagcttgaggacctcattaaaaggaaaatccaagtgtcagtcaccaacttggaggagttaaatgtggtgcagtccagatttcaggagctaatggagtgggcagaagagcaacaacccaacatcgccgaggcccttaagcagagccctcctccagatatggctcagaaccttctcatggatcacctggccatctgcagtgaactggaggccaagcagatgctcctgaaatcgcttataaaggacgcagacagggtcatggcagatcttggtctcaatgagcgacaggtcatccagaaggctctctctgatgcacaaagccacgtgaattgtctcagtgacttagtgggccagcgaagaaagtacttaaacaaagccttgtccgagaaaacccagtttctcatggcagtgttccaggccaccagccaaattcagcaacatgagcgaaagataatgttccgtgaacacatctgtctgttaccagatgatgtgagcaaacaagtcaaaacatgtaagagtgcacaagccagcctcaagacttaccaaaatgaagtcactggactttgggcccagggtcgcgaactaatgaaggaagtcacagagcaggaaaagagtgaagtgctggggaagcttcaggaattgcagagtgtctatgacagtgttttacaaaagtgcagtcaccggttacaagaactagagaagaatttggtttctaggaagcattttaaggaagattttgataaagcttgccactggctaaaacaagcagatattgttacatttcctgaaatcaacctaatgaatgagagttctgagcttcatacacaactggctaaataccaaaacattcttgaacaatctccagaatatgaaaatcttctacttacgctgcagagaactgggcagaccatattaccatcgctgaatgaagtcgatcattcctacctcagtgaaaagctaaatgctttgcctcgacaatttaatgtaattgttgccttggctaaagacaagttctataaagtccaggaagcaattcttgctcggaaggaatatgcttccttgattgagttgacaacccagtctctgagtgaacttgaagcccaattcttgaggatgagcaaagttcccaccgacctggccgttgaggaggctctttctctgcaagatggttgcagagccattctggacgaggtggcgggccttggggaggcggtggatgaactgaaccagaaaaaagaaggttttcgcagcacaggtcagccttggcagccagacaagatgctgcaccttgtcaccttatatcacaggctgaagcgacaaacagaacagagggttagcttattagaagacaccaccagtgcttaccaagaacacgagaagatgtgccaacagctggagagacaactgaagtctgtaaaagaggagcagtccaaagtgaatgaggaaacgctgcctgcagaggagaagctcaaaatgtatcactccctggcaggaagtctccaggactcagggattgtactgaaacgagtaaccatacatcttgaagatcttgccccacaccttgaccccttggcttatgagaaagccaggcatcagatccagtcctggcaaggggagttaaaactgttgacttctgccattggtgagacggtgacagaatgtgagagccgaatggtgcagagtatagacttccagactgagatgagtcgctccctggactggctgaggagagtgaaggcagagctcagtgggccggtgtacctagacctcaacctgcaggacatccaagaggaaatcagaaaaatccaaattcatcaggaagaggtccagtccagcttgagaatcatgaatgcgctgagtcacaaggaaaaggagaagttcacaaaggccaaggagctgatttctgcggatttagaacacagcctcgctgagctctcagagctggatggagacatccaggaagccttacgcaccagacaggctaccttgactgaaatatatagccagtgtcaaaggtattatcaggtatttcaagcagccaatgactggcttgaggatgcccaagaattgttacagctggcaggcaatggcctagacgtggagagcgcagaggaaaatctcaaaagccacatggaatttttcagtacagaggatcagttccatagtaacctggaggagctccacagcctggtagccaccctggacccactcatcaagccaaccggcaaagaagacctagaacagaaagtggcttctctggaactcaggagccagaggatgagccgggactctggtgcccaagtggatctcttgcagagatgcacagctcaatggcacgattaccagaaagcaagggaagaggttattgaattgatgaatgatacagaaaagaaattgtctgagttttctttgttgaagacttcgtctagtcatgaagcggaagaaaaattgtcagaacacaaggctttagtgtcagtggttaactctttccatgagaaaattgtggcccttgaggaaaaagcttcacaactggagaaaaccggaaatgatgccagcaaagccaccctgagcaggtcaatgaccaccgtctggcagcgctggacacgccttcgagctgtggcccaggaccaggagaagatcctggaagatgcagtggatgagtggacgggctttaacaacaaggttaaaaaggccactgaaatgattgatcagctgcaagataagttacctggaagttcagcagagaaagcatcgaaagcagagctcttaactcttcttgaataccacgacacgttcgttctggagctggagcagcagcagtcggccttgggcatgctgcggcagcaaaccctgagcatgctccaggatggagccgccccaacccctggggaagagcctccgctcatgcaggaaatcaccgccatgcaagatcggtgcctgaacatgcaggagaaagtgaagactaatggaaagttggtgaagcaagagctgaaggaccgagaaatggtggagactcagatcaattctgtgaaatgttgggttcaggaaacgaaagaatatttagggaatccaacaatagaaatagatgctcaacttgaagaacttcagattctcctaacagaagccacaaatcaccgacagaacattgaaaaaatggcagaagaacagaaggagaagtacttaggtctttataccatattaccttctgaactctcccttcagttggctgaagtggcgttagatctaaagatccgagatcagatccaagacaaaataaaagaagttgagcagagcaaggccacgagccaggaactcagccggcaaattcagaagttagctaaagacctcacaactattctaactaagctgaaagcgaagacagataatgtagttcaagctaaaactgaccaaaaggtgctgggagaggaattagatggctgtaattcaaagttaatggaattagatgcagcagtacagaaattcttggaacagaatggccaactgggtaagccactggccaagaagataggaaaactgactgaacttcaccagcagaccattagacaagctgagaatcggctctccaagctcaatcaggcagcatcacatttagaagaatacaatgaaatgcttgaattaattttgaagtggattgaaaaagctaaagtcttggctcatggaactattgcatggaattctgcaagccagcttcgggaacaatatattttgcatcagaccctgctagaagaatccaaagaaattgacagtgagctggaagcaatgactgagaaattacagtacctcactagcgtgtactgtacagaaaaaatgtctcagcaagtggcagaactgggacgggagactgaggagttgcgacagatgatcaaaattcgtttgcagaacctccaagatgcagctaaggatatgaaaaaatttgaagcagagttgaaaaagttacaagctgccttggagcaagcccaggcaacactgacttctccagaagttggacgtctcagtctcaaggagcagctctctcatcggcagcatttgttgtctgagatggagtcactgaagccgaaggtgcaagcagtgcagctctgccagagtgccctccggatccccgaggatgtggttgccagcttacctctctgtcatgctgctctgcggctgcaggaagaggccagccggctgcagcacaccgccatccagcagtgtaacatcatgcaggcagctgtggtacaatatgaacaatatgagcaagaaatgaaacatctccagcaactgatagaaggagctcacagagagattgaggataaacctgttgccaccagtaacatacaggagctgcaggctcagatttctcggcatgaggagctggcgcagaaaattaagggctaccaggagcagatcgcttctttgaattccaagtgcaagatgctgacgatgaaagccaagcacgccaccatgctgctgacggtgaccgaggtcgaggggctggcggaagggacagaggacctggatggggagctcctccccacgccttcggcccacccctctgtggtcatgatgactgcaggtcgctgtcacactttgctgtcaccggtcactgaggagtctggggaggagggaaccaacagtgagatttcctctccacctgcctgtcgctccccttcacctgtggctaatacagatgcttctgttaaccaggacattgcatattaccaagccttgtctgctgagaggttgcagacagatgctgcaaaaattcaccccagcacatccgcatcccaggagttctatgaaccgggattggagccatccgctactgccaaactgggtgatttgcagcgttcttgggaaaccttaaagaatgtgatcagtgagaagcagcgcacactctatgaagctttggaacgccagcagaagtaccaggactccctccagtccatctctacgaagatggaggccattgagctgaaactcagtgagagcccagagcctggcaggagtccagaaagccagatggctgaacatcaggcattgatggatgagattctcatgctccaggatgaaatcaatgagctccagtcctctctcgcagaggagctggtatccgagtcttgtgaggccgaccctgcggagcagctggccttgcagtccacgctcactgtcttagccgagcgaatgtccaccatcaggatgaaagcctcggggaaacggcagcttttggaggagaagttgaatgatcagctggaggaacaaaggcaggaacaggccctgcagaggtatcgctgtgaagccgatgagctggacagctggctcttgagtaccaaggccactctggacactgcgctgagtccacccaaggagcccatggacatggaggcccagcttatggactgccagaatatgctggtggaaatagagcagaaggtggtggctttatcagaactgtcagtccacaatgagaacctgctgctggagggcaaagctcacaccaaggacgaggccgagcagctggctggaaagctgagaaggctcaaggggagcctgctggagctgcagagagccctgcatgataagcagctcaacatgcagggaacagcacaggagaaggaggagagcgatgttgacctaacagccacgcagagccccggcgtccaggaatggctggcccaagctcgcaccacatggacccagcagcggcagagcagtctccagcaacaaaaagagttagaacaggaattagccgagcagaagagtctccttcgctcagtagccagtcgtggagaggagattctaattcaacattcggcggcagagacctctggtgatgctggcgaaaaacctgatgtgttatcccaggagttggggatggaaggggagaaatcatccgctgaagaccagatgagaatgaaatgggaaagcctacatcaagaatttagtaccaagcagaaactactacagaatgttctggaacaggaacaagagcaagtgctttatagcaggccaaatcgactcttgtctggtgtgccactgtacaaaggggacgtgccaacccaagataaatctgcagttacatctttgctggatggactgaaccaagccttcgaggaggtttcatcccagagtggaggggcaaagaggcagagtatacacttggagcagaagttgtatgatggagtctcagccacctctacttggttggatgacgttgaagaacgtttatttgttgccacagcacttttaccagaagaaacagagacttgtctcttcaaccaagagattcttgccaaagacattaaggaaatgtctgaagaaatggataagaacaaaaacttgttttcccaagcttttccagagaatggtgataatcgagatgttattgaagatactttgggttgtcttttgggcaggttatccttgctagactcagtagtgaatcaacgatgtcatcagatgaaagaaagacttcagcaaatactaaatttccagaatgatctgaaagtgctgtttacatcactggctgacaacaaatacatcattctgcaaaaactggcaaatgtgtttgaacagcccgtagcagaacaaatagaggcaatacaacaggctgaagatggactcaaagaatttgatgcaggaatcattgaattaaagaggcgtggtgacaagctacaggtcgagcagccgtccatgcaagaactctccaagctccaggacatgtatgatgagctgatgatgatcattggctcccggaggagtggtctgaatcagaaccttacactcaagagtcagtatgagagggccctacaagatctggctgacctgctagaaactggtcaggagaagatggcaggagaccagaaaatcatcgtgtcttccaaagaggaaatccagcaactacttgacaaacataaggaatactttcagggcctggaatctcatatgatcttgactgaaacactcttcagaaagataatcagctttgcagtccaaaaggaaacccagttccatacagagctgatggctcaggcttctgctgtactgaaacgggctcacaagaggggtgtggagctggagtacattctagagacgtggtcccatctggatgaggaccagcaggagctcagcagacagctggaggtggtggaaagcagcatcccaagcgtgggtctggtggaggagaacgaggacaggcttattgaccgcataacactctaccagcatttaaaatctagccttaatgaataccagcccaaattatatcaagtattagatgatgggaaacgacttctgatatccatcagctgctcagatctagaaagccaactaaatcaacttggagagtgctggctaagtaacaccaataaaatgtctaaggaacttcacagactggaaacaatattgaaacactggaccagatatcaaagtgaatctgcagatctaattcactggttacaatctgcaaaagaccggctagaattttggactcagcaatctgtgacagtcccacaagagctggaaatggtccgtgatcatctaaatgctttcctggagttttctaaagaagtggatgcccaatcttccctgaaatcatctgttctgagtactggaaatcagctccttcgactaaaaaaggtggacacagccacgctgcgctctgagctgtcgcgcattgatagccagtggactgacctgctaaccaatatcccagccgtccaggagaagctccaccagctccagatggataaactgccttcccgccatgccatttctgaagtcatgagttggatttctctaatggaaaatgttattcagaaggatgaagataatattaaaaattccataggttacaaggcaattcatgaataccttcagaaatataagggttttaagatagacattaactgtaaacagctgacagtggattttgtgaaccagtccgtgctacaaatcagcagtcaggatgtggaaagtaagcgtagtgataagactgattttgctgagcaacttggagcaatgaataaaagttggcaaattctgcaaggtctagtaactgagaagatccagctgttggaaggcttattggaatcttggtcagaatatgaaaataatgtacaatgtctgaaaacatggtttgaaacccaggaaaagagactaaaacaacagcatcgaattggagatcaggcttctgttcaaaatgcactgaaagactgtcaggatctggaagatttgattaaagcaaaagaaaaagaagtagagaaaattgagcagaatggacttgctttgattcagaacaagaaagaagacgtctctagcattgtcatgagcacactgcgagagctcggccaaacctgggcaaatttagatcacatggttggacaattaaagatactgctgaaatcagtgcttgaccaatggagtagtcacaaagtggcctttgacaagataaacagttacctcatggaggccagatactctctttcccgattccgtctgctgactggctccttagaagctgtgcaagttcaggtggacaatcttcagaatctccaagatgatctggaaaaacaggaaaggagcttacagaaatttggctctatcaccaaccaattattaaaagagtgtcacccacccgtgacagaaactcttaccaatacactgaaagaagtcaacatgagatggaataacttgctggaagagattgctgagcagctacagtccagcaaggccctacttcagctttggcaaagatacaaggactactccaaacagtgtgcttcgacagttcagcagcaggaggatcgaaccaatgagctgttgaaggcagccacaaacaaggacattgccgatgatgaggttgccacatggattcaagattgcaacgacctcctcaaaggactgggcacagttaaagattccctcttttttctccatgagctgggagagcaactgaagcaacaagtggatgcttccgcagcatcagctattcaatcggatcaactctctttgagtcaacacttgtgtgccctggagcaagctctctgcaaacagcagacttcattacaggctggagttcttgattatgaaacctttgccaagagtttagaagctttggaggcctggatagtggaagctgaagaaatactacaagggcaggaccctagccactcatctgacctctccacaatccaggaaaggatggaagaacttaagggacagatgttaaaattcagcagcatggctccagatttagaccgtctaaatgagcttggatataggttacccttgaatgataaggaaatcaaaagaatgcagaatctgaaccgccattggtctctgatctcctctcagactacagaaagattcagcaagttgcagtcatttttgctacaacatcagactttcttggaaaaatgtgaaacatggatggaattcctagttcagacagaacaaaagttagcagtagagatttcaggaaattatcagcaccttttggaacagcagagagcacacgagttgtttcaagccgagatgttcagtcgtcagcagattttgcactcaatcattattgatgggcaacgtcttctagaacaaggtcaagttgatgacagggatgaattcaacctgaaattgacactcctcagtaatcaatggcagggagtgattcgcagggcccagcagaggcgggggatcattgacagccagattcgccagtggcagcgctatagggagatggcagaaaagcttcgtaaatggttggttgaagtgtcctacctccccatgagtggtctcggaagtgttcctataccactgcaacaagcaaggaccctctttgatgaagtgcagttcaaagaaaaagtgtttctgcggcaacaaggcagctacatcctgactgtggaggctggcaagcaactccttctctcggcggacagtggcgctgaggccgccttgcaggccgaactcgctgaaatccaagagaaatggaaatcagccagcatgcggctggaagaacagaagaaaaaactagccttcttgttgaaagactgggaaaaatgtgagaaaggaatagcagattccctggagaaactacgaactttcaaaaagaagctttcgcagtctctcccggatcaccatgaagagctccatgcagaacaaatgcgttgcaaggaattagaaaatgcagttgggagctggacagatgacttgacccagttgagcctgctgaaggacaccctctctgcctatatcagtgctgatgatatctccattcttaatgaacgcgtagagcttctgcaaaggcagtgggaagaactatgccaccagctctccttaaggcggcagcaaataggtgaaagattgaatgaatgggcagtcttcagtgaaaagaacaaggaactctgtgagtggttgactcaaatggaaagcaaagtttctcagaatggagacattctcattgaagaaatgatagagaagctcaagaaggattatcaagaggaaattgctattgctcaagagaacaaaatacagctccaacaaatgggagaacgacttgctaaagccagccatgaaagcaaagcatctgagattgaatacaagctgggaaaggtcaacgaccggtggcagcatctcctggacctcattgcagccagggtgaagaagctgaaggagaccctggtagccgtgcagcagcttgataagaacatgagcagcctgaggacctggctcgctcacatcgagtcagagctggccaagccaatagtctacgattcctgtaactcggaagaaatacagagaaagcttaatgagcagcaggagcttcagagagacatagagaagcacagtacaggtgttgcatctgtcctcaacctgtgtgaagtcctgctgcacgactgtgacgcctgtgccactgatgccgagtgtgactctatacagcaggctacgagaaacctggaccggcggtggagaaacatttgtgctatgtccatggaaaggaggctgaaaatcgaagagacgtggcgattgtggcagaaatttctggatgactattcacgttttgaagattggctgaagtcttcagaaaggacagctgcttttcccagctcttctggggtgatctatacagttgccaaggaagaactaaagaaatttgaggctttccagcgacaggtccacgagtgcctgacgcagctggaactgatcaacaagcagtaccgccgcctggccagggagaaccgcactgattcagcatgtagcctcaaacagatggttcacgaaggcaaccagagatgggacaacctgcaaaagcgtgtcacctccatcttgcgcagactcaagcattttattggccagcgtgaggagtttgagactgcgcgggacagcattctggtctggctcacagagatggatctgcagctcactaatattgaacatttttctgagtgtgatgttcaagctaaaataaagcaactcaaggccttccagcaggaaatttcactgaaccacaataagattgagcagataattgcccaaggagaacagctgatagaaaagagtgagcccttggatgcagcgatcatcgaggaggaactagatgagctccgacggtactgccaggaggtcttcgggcgtgtggaaagataccataagaaactgatccgcctgcctctcccagacgatgagcacgacctctcagacagggagctggagctggaagactctgcagctctgtcggacctgcactggcacgaccgctctgcagacagcctgctttctccacagccttcctccaatctctccctctcgctcgctcagcccctccggagcgagcggtcaggacgagacaccccggctagtgtggactccatccccctggagtgggatcacgactatgacctcagtcgggacctggagtctgcaatgtccagagctctgccctctgaggatgaagaaggtcaggatgacaaagatttctacctccggggagctgttggcttatcagatgtaatgatccccgaaagccctgaggcctatgtaaaactcacagaaaatgcaatcaaaaatacctccggggaccacagtgccctagagtcacagatccgacaactgggcaaagccctggatgatagccgttttcagatacagcaaaccgaaaatatcattcgcagcaaaactcccacggggccggagctagacaccagctacaaaggctacatgaaactgctgggcgaatgcagtagcagtatagactccgtgaagagactggagcacaaactgaaggaggaagaggagagccttcctggctttgttaacctgcatagtaccgaaacccaaacggctggtgtgattgaccgatgggagcttctccaggcccaggcattgagcaaggagttgaggatgaagcagaacctccagaagtggcagcagtttaactcagacttgaacagcatctgggcctggctgggggacacggaggaggagttggaacagctccagcgtctggaactcagcactgacatccagaccatcgagctccagatcaaaaagctcaaggagctccagaaagctgtggaccaccgcaaagccatcatcctctccatcaatctctgcagccctgagttcacccaggctgacagcaaggagagccgggacctgcaggatcgcttgtcgcagatgaatgggcgctgggaccgagtgtgctctctgctggaggagtggcggggcctgctgcaggatgccctgatgcagtgccagggtttccatgaaatgagccatggtttgcttcttatgctggagaacattgacagaaggaaaaatgaaattgtccctattgattctaaccttgatgcagagatacttcaggaccatcacaaacagcttatgcaaataaagcatgagctgttggaatcccaactcagagtagcctctttgcaagacatgtcttgccaactactggtgaatgctgaaggaacagactgtttagaagccaaagaaaaagtccatgttattggaaatcggctcaaacttctcttgaaggaggtcagtcgtcatatcaaggaactggagaagttattagacgtgtcaagtagtcagcaggatttgtcttcctggtcttctgctgatgaactggacacctcagggtctgtgagtcccacatcaggaaggagcaccccaaacagacagaaaacgccacgaggcaagtgtagtctctcacagcctggaccctctgtcagcagtccacatagcaggtccacaaaaggtggctccgattcctccctttctgagccagggccaggtcggtccggccgcggcttcctgttcagagtcctccgagcagctcttccccttcagcttctcctgctcctcctcatcgggcttgcctgccttgtaccaatgtcagaggaagactacagctgtgccctctccaacaactttgcccggtcattccaccccatgctcagatacacgaatggccctcctccactctgaactaagcagatgccatctgcagaagtgctggtagcataaggaggatcgggtcataagcaatcccaaactaccaacaagaggaccttgatcttggcgaaagccctcggtgtggcagctttagccctcctccagatcacatgtgtgcaaattatggcttcagaggtggaagataaacagtgacgggggaacaaacagacaacaagaaggtttggaagaaatctggtttgagactctgaaccttagcactaaggagattgagtaaggacctccaaagttccccggactcatgaattctgggcccttggcccattctgtgcacagccaaggacttcagtagaccatctgggcagctttcccatggtgctgctccaaccatcagataaatgaccctcccaagcaccatgtcagtgtcgtacaatctaccaaccaaccagtgctgaagagattttagaaccttgtaacatacaatttttaagagcttatatggcagcttcctttttaccttgttttcctttggggcatgatgttttaacctttgctttagaagcacaagctgtaaatctaaaaggcacttttttttagaggtataaagaaaaactagatgtaataaataagatcatggaaggctttatgtgaaaaaagttgaatgttatagtaaaaaaaaaaagatatttatgtatgtacagtttgctaaagccaagttttgtttgtattgatttctttgcatttattatagatattataaaata

SEQ ID NO: 641 - protein, 8749 aa, Homo sapiens
MATSRGASRCPRDIANVMQRLQDEQEIVQKRTFTKWINSHLAKRKPPMVVDDLFEDMKDGVKLLALLEVLSGQKLPCEQGRRMKRIHAVANIGTALKFLEGRKSMHRGSPIKLVNINSTDIADGRPSIVLGLMWTIILYFQIEELTSNLPQLQSLSSSASSVDSIVSSETPSPPSKRKVTTKIQGNAKKALLKWVQYTAGKQTGIEVKDFGKSWRSGVAFHSVIHAIRPELVDLETVKGRSNRENLEDAFTIAETELGIPRLLDPEDVDVDKPDEKSIMTYVAQFLKHYPDIHNASTDGQEDDEILPGFPSFANSVQNFKREDRVIFKEMKVWIEQFERDLTRAQMVESNLQDKYQSFKHFRVQYEMKRKQIEHLIQPLHRDGKLSLDQALVKQSWDRVTSRLFDWHIQLDKSLPAPLGTIGAWLYRAEVALREEITVQQVHEETANTIQRKLEQHKDLLQNTDAHKRAFHEIYRTRSVNGIPVPPDQLEDMAERFHFVSSTSELHLMKMEFLELKYRLLSLLVLAESKLKSWIIKYGRRESVEQLLQNYVSFIENSKFFEQYEVTYQILKQTAEMYVKADGSVEEAENVMKFMNETTAQWRNLSVEVRSVRSMLEEVISNWDRYGNTVASLQAWLEDAEKMLNQSENAKKDFFRNLPHWIQQHTAMNDAGNFLIETCDEMVSRDLKQQLLLLNGRWRELFMEVKQYAQADEMDRMKKEYTDCVVTLSAFATEAHKKLSEPLEVSFMNVKLLIQDLEDIEQRVPVMDAQYKIITKTAHLITKESPQEEGKEMFATMSKLKEQLTKVKECYSPLLYESQQLLIPLEELEKQMTSFYDSLGKINEIITVLEREAQSSALFKQKHQELLACQENCKKTLTLIEKGSQSVQKFVTLSNVLKHFDQTRLQRQIADIHVAFQSMVKKTGDWKKHVETNSRLMKKFEESRAELEKVLRIAQEGLEEKGDPEELLRRHTEFFSQLDQRVLNAFLKACDELTDILPEQEQQGLQEAVRKLHKQWKDLQGEAPYHLLHLKIDVEKNRFLASVEECRTELDRETKLMPQEGSEKIIKEHRVFFSDKGPHHLCEKRLQLIEELCVKLPVRDPVRDTPGTCHVTLKELRAAIDSTYRKLMEDPDKWKDYTSRFSEFSSWISTNETQLKGIKGEAIDTANHGEVKRAVEEIRNGVTKRGETLSWLKSRLKVLTEVSSENEAQKQGDELAKLSSSFKALVTLLSEVEKMLSNFGDCVQYKEIVKNSLEELISGSKEVQEQAEKILDTENLFEAQQLLLHHQQKTKRISAKKRDVQQQIAQAQQGEGGLPDRGHEELRKLESTLDGLERSRERQERRIQVTLRKWERFETNKETVVRYLFQTGSSHERFLSFSSLESLSSELEQTKEFSKRTESIAVQAENLVKEASEIPLGPQNKQLLQQQAKSIKEQVKKLEDTLEEDIKTMEMVKTKWDHFGSNFETLSVWITEKEKELNALETSSSAMDMQISQIKVTIQEIESKLSSIVGLEEEAQSFAQFVTTGESARIKAKLTQIRRYGEELREHAQCLEGTILGHLSQQQKFEENLRKIQQSVSEFEDKLAVPIKICSSATETYKVLQEHMDLCQALESLSSAITAFSASARKVVNRDSCVQEAAALQQQYEDILRRAKERQTALENLLAHWQRLEKELSSFLTWLERGEAKASSPEMDISADRVKVEGELQLIQALQNEVVSQASFYSKLLQLKESLFSVASKDDVKMMKLHLEQLDERWRDLPQIINKRINFLQSVVAEHQQFDELLLSFSVWIKLFLSELQTTSEISIMDHQVALTRHKDHAAEVESKKGELQSLQGHLAKLGSLGRAEDLHLLQGKAEDCFQLFEEASQVVERRQLALSHLAEFLQSHASLSGILRQLRQTVEATNSMNKNESDLIEKDLNDALQNAKALESAAVSLDGILSKAQYHLKIGSSEQRTSCRATADQLCGEVERIQNLLGTKQSEADALAVLKKAFQDQKEELLKSIEDIEERTDKERLKEPTRQALQQRLRVFNQLEDELNSHEHELCWLKDKAKQIAQKDVAFAPEVDREINRLEVTWDDTKRLIHENQGQCCGLIDLMREYQNLKSAVSKVLENASSVIVTRTTIKDQEDLKWAFSKHETAKNKMNYKQKDLDNFTSKGKHLLSELKKIHSSDFSLVKTDMESTVDKWLDVSEKLEENMDRLRVSLSIWDDVLSTRDEIEGWSNNCVPQMAENISNLDNHLRAEELLKEFESEVKNKALRLEELHSKVNDLKELTKNLETPPDLQFIEADLMQKLEHAKEITEVAKGTLKDFTAQSTQVEKFINDITTWFTKVEESLMNCAQNETCEALKKVKDIQKELQSQQSNISSTQENLNSLCRKYHSAELESLGRAMTGLIKKHEAVSQLCSKTQASLQESLEKHFSESMQEFQEWFLGAKAAAKESSDRTGDSKVLEAKLHDLQNILDSVSDGQSKLDAVTQEGQTLYAHLSKQIVSSIQEQITKANEEFQAFLKQCLKDKQALQDCASELGSFEDQHRKLNLWIHEMEERFNTENLGESKQHIPEKKNEVHKVEMFLGELLAARESLDKLSQRGQLLSEEGHGAGQEGRLCSQLLTSHQNLLRMTKEKLRSCQVALQEHEALEEALQSMWFWVKAIQDRLACAESTLGSKDTLEKRLSQIQDILLMKGEGEVKLNMAIGKGEQALRSSNKEGQRVIQTQLETLKEVWADIMSSSVHAQSTLESVISQWNDYVERKNQLEQWMESVDQKIEHPLQPQPGLKEKFVLLDHLQSILSEAEDHTRALHRLIAKSRELYEKTEDESFKDTAQEELKTQFNDIMTVAKEKMRKVEEIVKDHLMYLDAVHEFTDWLHSAKEELHRWSDMSGDSSATQKKLSKIKELIDSREIGASRLSRVESLAPEVKQNTTASGCELMHTEMQALRADWKQWEDSVFQTQSCLENLVSQMALSEQEFSGQVAQLEQALEQFSALLKTWAQQLTLLEGKNTDEEIVECWHKGQEILDALQKAEPRTEDLKSQLNELCRFSRDLSTYSGKVSGLIKEYNCLCLQASKGCQNKEQILQQRFRKAFRDFQQWLVNAKITTAKCFDIPQNISEVSTSLQKIQEFLSESENGQHKLNMMLSKGELLSTLLTKEKAKGIQAKVTAAKEDWKNFHSNLHQKESALENLKIQMKDFEVSAEPIQDWLSKTEKMVHESSNRLYDLPAKRREQQKLQSVLEEIHCYEPQLNRLKEKAQQLWEGQAASKSFRHRVSQLSSQYLALSNLTKEKVSRLDRIVAEHNQFSLGIKELQDWMTDAIHMLDSYCHPTSDKSVLDSRTLKLEALLSVKQEKEIQMKMIVTRGESVLQNTSPEGIPTIQQQLQSVKDMWASLLSAGIRCKSQLEGALSKWTSYQDGVRQFSGWMDSMEANLNESERQHAELRDKTTMLGKAKLLNEEVLSYSSLLETIEVKGAGMTEHYVTQLELQDLQERYRAIQERAKEAVTKSEKLVRLHQEYQRDLKAFEVWLGQEQEKLDQYSVLEGDAHTHETTLRDLQELQVHCAEGQALLNSVLHTREDVIPSGIPQAEDRALESLRQDWQAYQHRLSETRTQFNNVVNKLRLMEQKFQQVDEWLKTAEEKKWHEEVTAYRDEVEEVGARAQEILDESHVNSRMGCQATQLTSRYQALLLQVLEQIKFLEEEIQSLEESESSLSSYSDWYGSTHKNFKNVATKIDKVDTVMMGKKLKTLEVLLKDMEKGHSLLKSAREKGERAVKYLEEGEAERLRKEIHDHMEQLKELTSTVRKEHMTLEKGLHLAKEFSDKCKALTQWIAEYQEILHVPEEPKMELYEKKAQLSKYKSLQQTVLSHEPSVKSVREKGEALLELVQDVTLKDKIDQLQSDYQDLCSIGKAMMEEIAGFEDRLNNLQMKGDTLIGQCADHLQAKLKQNVHAHLQGTKDSYSAICSTAQRMYQSLEHELQKHVSRQDTLQQCQAWLSAVQPDLEPSPQPPLSRAEAIKQVKHFRALQEQARTYLDLLCSMCDLSNASVKTTAKDIQQTEQTIEQKLVQAQNLTQGWEEIKHLKSELWIYLQDADQQLQNMKRRHSELELNIAQNMVSQVKDFVKKLQSKQASVNTIIEKVNKLTKKEESPEHKEINHLNDQWLDLCRQSNNLCLQREEDLQRTRDYHDCMNVVEVFLEKFTTEWDNLARSDAESTAVHLEALKKLALALQERKYAIEDLKDQKQKMIEHLNLDDKELVKEQTSHLEQRWFQLEDLIKRKIQVSVTNLEELNVVQSRFQELMEWAEEQQPNIAEALKQSPPPDMAQNLLMDHLAICSELEAKQMLLKSLIKDADRVMADLGLNERQVIQKALSDAQSHVNCLSDLVGQRRKYLNKALSEKTQFLMAVFQATSQIQQHERKIMFREHICLLPDDVSKQVKTCKSAQASLKTYQNEVTGLWAQGRELMKEVTEQEKSEVLGKLQELQSVYDSVLQKCSHRLQELEKNLVSRKHFKEDFDKACHWLKQADIVTFPEINLMNESSELHTQLAKYQNILEQSPEYENLLLTLQRTGQTILPSLNEVDHSYLSEKLNALPRQFNVIVALAKDKFYKVQEAILARKEYASLIELTTQSLSELEAQFLRMSKVPTDLAVEEALSLQDGCRAILDEVAGLGEAVDELNQKKEGFRSTGQPWQPDKMLHLVTLYHRLKRQTEQRVSLLEDTTSAYQEHEKMCQQLERQLKSVKEEQSKVNEETLPAEEKLKMYHSLAGSLQDSGIVLKRVTIHLEDLAPHLDPLAYEKARHQIQSWQGELKLLTSAIGETVTECESRMVQSIDFQTEMSRSLDWLRRVKAELSGPVYLDLNLQDIQEEIRKIQIHQEEVQSSLRIMNALSHKEKEKFTKAKELISADLEHSLAELSELDGDIQEALRTRQATLTEIYSQCQRYYQVFQAANDWLEDAQELLQLAGNGLDVESAEENLKSHMEFFSTEDQFHSNLEELHSLVATLDPLIKPTGKEDLEQKVASLELRSQRMSRDSGAQVDLLQRCTAQWHDYQKAREEVIELMNDTEKKLSEFSLLKTSSSHEAEEKLSEHKALVSVVNSFHEKIVALEEKASQLEKTGNDASKATLSRSMTTVWQRWTRLRAVAQDQEKILEDAVDEWTGFNNKVKKATEMIDQLQDKLPGSSAEKASKAELLTLLEYHDTFVLELEQQQSALGMLRQQTLSMLQDGAAPTPGEEPPLMQEITAMQDRCLNMQEKVKTNGKLVKQELKDREMVETQINSVKCWVQETKEYLGNPTIEIDAQLEELQILLTEATNHRQNIEKMAEEQKEKYLGLYTILPSELSLQLAEVALDLKIRDQIQDKIKEVEQSKATSQELSRQIQKLAKDLTTILTKLKAKTDNVVQAKTDQKVLGEELDGCNSKLMELDAAVQKFLEQNGQLGKPLAKKIGKLTELHQQTIRQAENRLSKLNQAASHLEEYNEMLELILKWIEKAKVLAHGTIAWNSASQLREQYILHQTLLEESKEIDSELEAMTEKLQYLTSVYCTEKMSQQVAELGRETEELRQMIKIRLQNLQDAAKDMKKFEAELKKLQAALEQAQATLTSPEVGRLSLKEQLSHRQHLLSEMESLKPKVQAVQLCQSALRIPEDVVASLPLCHAALRLQEEASRLQHTAIQQCNIMQAAVVQYEQYEQEMKHLQQLIEGAHREIEDKPVATSNIQELQAQISRHEELAQKIKGYQEQIASLNSKCKMLTMKAKHATMLLTVTEVEGLAEGTEDLDGELLPTPSAHPSVVMMTAGRCHTLLSPVTEESGEEGTNSEISSPPACRSPSPVANTDASVNQDIAYYQALSAERLQTDAAKIHPSTSASQEFYEPGLEPSATAKLGDLQRSWETLKNVISEKQRTLYEALERQQKYQDSLQSISTKMEAIELKLSESPEPGRSPESQMAEHQALMDEILMLQDEINELQSSLAEELVSESCEADPAEQLALQSTLTVLAERMSTIRMKASGKRQLLEEKLNDQLEEQRQEQALQRYRCEADELDSWLLSTKATLDTALSPPKEPMDMEAQLMDCQNMLVEIEQKVVALSELSVHNENLLLEGKAHTKDEAEQLAGKLRRLKGSLLELQRALHDKQLNMQGTAQEKEESDVDLTATQSPGVQEWLAQARTTWTQQRQSSLQQQKELEQELAEQKSLLRSVASRGEEILIQHSAAETSGDAGEKPDVLSQELGMEGEKSSAEDQMRMKWESLHQEFSTKQKLLQNVLEQEQEQVLYSRPNRLLSGVPLYKGDVPTQDKSAVTSLLDGLNQAFEEVSSQSGGAKRQSIHLEQKLYDGVSATSTWLDDVEERLFVATALLPEETETCLFNQEILAKDIKEMSEEMDKNKNLFSQAFPENGDNRDVIEDTLGCLLGRLSLLDSVVNQRCHQMKERLQQILNFQNDLKVLFTSLADNKYIILQKLANVFEQPVAEQIEAIQQAEDGLKEFDAGIIELKRRGDKLQVEQPSMQELSKLQDMYDELMMIIGSRRSGLNQNLTLKSQYERALQDLADLLETGQEKMAGDQKIIVSSKEEIQQLLDKHKEYFQGLESHMILTETLFRKIISFAVQKETQFHTELMAQASAVLKRAHKRGVELEYILETWSHLDEDQQELSRQLEVVESSIPSVGLVEENEDRLIDRITLYQHLKSSLNEYQPKLYQVLDDGKRLLISISCSDLESQLNQLGECWLSNTNKMSKELHRLETILKHWTRYQSESADLIHWLQSAKDRLEFWTQQSVTVPQELEMVRDHLNAFLEFSKEVDAQSSLKSSVLSTGNQLLRLKKVDTATLRSELSRIDSQWTDLLTNIPAVQEKLHQLQMDKLPSRHAISEVMSWISLMENVIQKDEDNIKNSIGYKAIHEYLQKYKGFKIDINCKQLTVDFVNQSVLQISSQDVESKRSDKTDFAEQLGAMNKSWQILQGLVTEKIQLLEGLLESWSEYENNVQCLKTWFETQEKRLKQQHRIGDQASVQNALKDCQDLEDLIKAKEKEVEKIEQNGLALIQNKKEDVSSIVMSTLRELGQTWANLDHMVGQLKILLKSVLDQWSSHKVAFDKINSYLMEARYSLSRFRLLTGSLEAVQVQVDNLQNLQDDLEKQERSLQKFGSITNQLLKECHPPVTETLTNTLKEVNMRWNNLLEEIAEQLQSSKALLQLWQRYKDYSKQCASTVQQQEDRTNELLKAATNKDIADDEVATWIQDCNDLLKGLGTVKDSLFFLHELGEQLKQQVDASAASAIQSDQLSLSQHLCALEQALCKQQTSLQAGVLDYETFAKSLEALEAWIVEAEEILQGQDPSHSSDLSTIQERMEELKGQMLKFSSMAPDLDRLNELGYRLPLNDKEIKRMQNLNRHWSLISSQTTERFSKLQSFLLQHQTFLEKCETWMEFLVQTEQKLAVEISGNYQHLLEQQRAHELFQAEMFSRQQILHSIIIDGQRLLEQGQVDDRDEFNLKLTLLSNQWQGVIRRAQQRRGIIDSQIRQWQRYREMAEKLRKWLVEVSYLPMSGLGSVPIPLQQARTLFDEVQFKEKVFLRQQGSYILTVEAGKQLLLSADSGAEAALQAELAEIQEKWKSASMRLEEQKKKLAFLLKDWEKCEKGIADSLEKLRTFKKKLSQSLPDHHEELHAEQMRCKELENAVGSWTDDLTQLSLLKDTLSAYISADDISILNERVELLQRQWEELCHQLSLRRQQIGERLNEWAVFSEKNKELCEWLTQMESKVSQNGDILIEEMIEKLKKDYQEEIAIAQENKIQLQQMGERLAKASHESKASEIEYKLGKVNDRWQHLLDLIAARVKKLKETLVAVQQLDKNMSSLRTWLAHIESELAKPIVYDSCNSEEIQRKLNEQQELQRDIEKHSTGVASVLNLCEVLLHDCDACATDAECDSIQQATRNLDRRWRNICAMSMERRLKIEETWRLWQKFLDDYSRFEDWLKSSERTAAFPSSSGVIYTVAKEELKKFEAFQRQVHECLTQLELINKQYRRLARENRTDSACSLKQMVHEGNQRWDNLQKRVTSILRRLKHFIGQREEFETARDSILVWLTEMDLQLTNIEHFSECDVQAKIKQLKAFQQEISLNHNKIEQIIAQGEQLIEKSEPLDAAIIEEELDELRRYCQEVFGRVERYHKKLIRLPLPDDEHDLSDRELELEDSAALSDLHWHDRSADSLLSPQPSSNLSLSLAQPLRSERSGRDTPASVDSIPLEWDHDYDLSRDLESAMSRALPSEDEEGQDDKDFYLRGAVGLSDVMIPESPEAYVKLTENAIKNTSGDHSALESQIRQLGKALDDSRFQIQQTENIIRSKTPTGPELDTSYKGYMKLLGECSSSIDSVKRLEHKLKEEEESLPGFVNLHSTETQTAGVIDRWELLQAQALSKELRMKQNLQKWQQFNSDLNSIWAWLGDTEEELEQLQRLELSTDIQTIELQIKKLKELQKAVDHRKAIILSINLCSPEFTQADSKESRDLQDRLSQMNGRWDRVCSLLEEWRGLLQDALMQCQGFHEMSHGLLLMLENIDRRKNEIVPIDSNLDAEILQDHHKQLMQIKHELLESQLRVASLQDMSCQLLVNAEGTDCLEAKEKVHVIGNRLKLLLKEVSRHIKELEKLLDVSSSQQDLSSWSSADELDTSGSVSPTSGRSTPNRQKTPRGKCSLSQPGPSVSSPHSRSTKGGSDSSLSEPGPGRSGRGFLFRVLRAALPLQLLLLLLIGLACLVPMSEEDYSCALSNNFARSFHPMLRYTNGPPPL

SEQ ID NO: 642 - DNA, 3894 bp, Homo sapiens
aaggtaaagccactagagagaaactgaaagaaaacattcttaagataaattgaattgacattttctctctaaaatatgatttatagaccacagataggaattaagagtttcctgataattttggcttcatattattttaaaggattatcaagaggaaattgctattgctcaagagaacaaaatacagctccaacaaatgggagaacgacttgctaaagccagccatgaaagcaaagcatctgagattgaatacaagctgggaaaggtcaacgaccggtggcagcatctcctggacctcattgcagccagggtgaagaagctgaaggagaccctggtagccgtgcagcagcttgataagaacatgagcagcctgaggacctggctcgctcacatcgagtcagagctggccaagccaatagtctacgattcctgtaactcggaagaaatacagagaaagcttaatgagcagcaggagcttcagagagacatagagaagcacagtacaggtgttgcatctgtcctcaacctgtgtgaagtcctgctgcacgactgtgacgcctgtgccactgatgccgagtgtgactctatacagcaggctacgagaaacctggaccggcggtggagaaacatttgtgctatgtccatggaaaggaggctgaaaatcgaagagacgtggcgattgtggcagaaatttctggatgactattcacgttttgaagattggctgaagtcttcagaaaggacagctgcttttcccagctcttctggggtgatctatacagttgccaaggaagaactaaagaaatttgaggctttccagcgacaggtccacgagtgcctgacgcagctggaactgatcaacaagcagtaccgccgcctggccagggagaaccgcactgattcagcatgtagcctcaaacagatggttcacgaaggcaaccagagatgggacaacctgcaaaagcgtgtcacctccatcttgcgcagactcaagcattttattggccagcgtgaggagtttgagactgcgcgggacagcattctggtctggctcacagagatggatctgcagctcactaatattgaacatttttctgagtgtgatgttcaagctaaaataaagcaactcaaggccttccagcaggaaatttcactgaaccacaataagattgagcagataattgcccaaggagaacagctgatagaaaagagtgagcccttggatgcagcgatcatcgaggaggaactagatgagctccgacggtactgccaggaggtcttcgggcgtgtggaaagataccataagaaactgatccgcctgcctctcccagacgatgagcacgacctctcagacagggagctggagctggaagactctgcagctctgtcggacctgcactggcacgaccgctctgcagacagcctgctttctccacagccttcctccaatctctccctctcgctcgctcagcccctccggagcgagcggtcaggacgagacaccccggctagtgtggactccatccccctggagtgggatcacgactatgacctcagtcgggacctggagtctgcaatgtccagagctctgccctctgaggatgaagaaggtcaggatgacaaagatttctacctccggggagctgttggcttatcagatgtaatgatccccgaaagccctgaggcctatgtaaaactcacagaaaatgcaatcaaaaatacctccggggaccacagtgccctagagtcacagatccgacaactgggcaaagccctggatgatagccgttttcagatacagcaaaccgaaaatatcattcgcagcaaaactcccacggggccggagctagacaccagctacaaaggctacatgaaactgctgggcgaatgcagtagcagtatagactccgtgaagagactggagcacaaactgaaggaggaagaggagagccttcctggctttgttaacctgcatagtaccgaaacccaaacggctggtgtgattgaccgatgggagcttctccaggcccaggcattgagcaaggagttgaggatgaagcagaacctccagaagtggcagcagtttaactcagacttgaacagcatctgggcctggctgggggacacggaggaggagttggaacagctccagcgtctggaactcagcactgacatccagaccatcgagctccagatcaaaaagctcaaggagctccagaaagctgtggaccaccgcaaagccatcatcctctccatcaatctctgcagccctgagttcacccaggctgacagcaaggagagccgggacctgcaggatcgcttgtcgcagatgaatgggcgctgggaccgagtgtgctctctgctggaggagtggcggggcctgctgcaggatgccctgatgcagtgccagggtttccatgaaatgagccatggtttgcttcttatgctggagaacattgacagaaggaaaaatgaaattgtccctattgattctaaccttgatgcagagatacttcaggaccatcacaaacagcttatgcaaataaagcatgagctgttggaatcccaactcagagtagcctctttgcaagacatgtcttgccaactactggtgaatgctgaaggaacagactgtttagaagccaaagaaaaagtccatgttattggaaatcggctcaaacttctcttgaaggaggtcagtcgtcatatcaaggaactggagaagttattagacgtgtcaagtagtcagcaggatttgtcttcctggtcttctgctgatgaactggacacctcagggtctgtgagtcccacatcaggaaggagcaccccaaacagacagaaaacgccacgaggcaagtgtagtctctcacagcctggaccctctgtcagcagtccacatagcaggtccacaaaaggtggctccgattcctccctttctgagccagggccaggtcggtccggccgcggcttcctgttcagagtcctccgagcagctcttccccttcagcttctcctgctcctcctcatcgggcttgcctgccttgtaccaatgtcagaggaagactacagctgtgccctctccaacaactttgcccggtcattccaccccatgctcagatacacgaatggccctcctccactctgaactaagcagatgccatctgcagaagtgctggtagcataaggaggatcgggtcataagcaatcccaaactaccaacaagaggaccttgatcttggcgaaagccctcggtgtggcagctttagccctcctccagatcacatgtgtgcaaattatggcttcagaggtggaagataaacagtgacgggggaacaaacagacaacaagaaggtttggaagaaatctggtttgagactctgaaccttagcactaaggagattgagtaaggacctccaaagttccccggactcatgaattctgggcccttggcccattctgtgcacagccaaggacttcagtagaccatctgggcagctttcccatggtgctgctccaaccatcagataaatgaccctcccaagcaccatgtcagtgtcgtacaatctaccaaccaaccagtgctgaagagattttagaaccttgtaacatacaatttttaagagcttatatggcagcttcctttttaccttgttttcctttggggcatgatgttttaacctttgctttagaagcacaagctgtaaatctaaaaggcacttttttttagaggtataaagaaaaactagatgtaataaataagatcatggaaggctttatgtgaaaaaagttgaatgttatagtaaaaaaaaaaagatatttatgtatgtacagtttgctaaagccaagttttgtttgtattgatttctttgcatttattatagatattataaaata

SEQ ID NO: 643 - protein, 982 aa, Homo sapiens
MGERLAKASHESKASEIEYKLGKVNDRWQHLLDLIAARVKKLKETLVAVQQLDKNMSSLRTWLAHIESELAKPIVYDSCNSEEIQRKLNEQQELQRDIEKHSTGVASVLNLCEVLLHDCDACATDAECDSIQQATRNLDRRWRNICAMSMERRLKIEETWRLWQKFLDDYSRFEDWLKSSERTAAFPSSSGVIYTVAKEELKKFEAFQRQVHECLTQLELINKQYRRLARENRTDSACSLKQMVHEGNQRWDNLQKRVTSILRRLKHFIGQREEFETARDSILVWLTEMDLQLTNIEHFSECDVQAKIKQLKAFQQEISLNHNKIEQIIAQGEQLIEKSEPLDAAIIEEELDELRRYCQEVFGRVERYHKKLIRLPLPDDEHDLSDRELELEDSAALSDLHWHDRSADSLLSPQPSSNLSLSLAQPLRSERSGRDTPASVDSIPLEWDHDYDLSRDLESAMSRALPSEDEEGQDDKDFYLRGAVGLSDVMIPESPEAYVKLTENAIKNTSGDHSALESQIRQLGKALDDSRFQIQQTENIIRSKTPTGPELDTSYKGYMKLLGECSSSIDSVKRLEHKLKEEEESLPGFVNLHSTETQTAGVIDRWELLQAQALSKELRMKQNLQKWQQFNSDLNSIWAWLGDTEEELEQLQRLELSTDIQTIELQIKKLKELQKAVDHRKAIILSINLCSPEFTQADSKESRDLQDRLSQMNGRWDRVCSLLEEWRGLLQDALMQCQGFHEMSHGLLLMLENIDRRKNEIVPIDSNLDAEILQDHHKQLMQIKHELLESQLRVASLQDMSCQLLVNAEGTDCLEAKEKVHVIGNRLKLLLKEVSRHIKELEKLLDVSSSQQDLSSWSSADELDTSGSVSPTSGRSTPNRQKTPRGKCSLSQPGPSVSSPHSRSTKGGSDSSLSEPGPGRSGRGFLFRVLRAALPLQLLLLLLIGLACLVPMSEEDYSCALSNNFARSFHPMLRYTNGPPPL

SEQ ID NO: 644 - DNA, 27745 bp, Homo sapiens
cccgggcagtggaaaccgtgggcaaaagttagctggcaggacagcgcagctcctccaggcagcggaggcagcgcgtcccggctctcagggacatttccttcccacctcgacccccgggaggtggtcccggtataaaggctcgctgagcgggtgggtcacagcacagctttgcagctgcggagaaacgcccaaggccgtgcatctccaggagggcggctgggctcccgcagtcctgcagaccgcgcccgatcccggcgacagggcgggcggacagccgcgcatccccggggtcccgccgagcctgggcgcagagagccgggaggaagcgttcgctcgcttcgccttgctgctgggaaactgaacgaggccgagagagaaggttcttgagttcatgtaagaggacagtcttaaaacggaagaagaaaaagaagcagttcagtctttgggagagctgcctccttgttgagtgctgcaaaggcctggaattcatttatgacagaatagatctagaaaagtccaagcatgttttctagagtggtgtagccctgtgctgcctccagtgaagagtctcttggtgttggcttcgtgcttccggagggaccatggcaacctccagaggggcctcccggtgtcctcgggatatcgccaatgtgatgcagaggctgcaagatgagcaagagatagtacaaaaacgaactttcacaaaatggatcaactctcatctggccaagcggaaacctccaatggtggtggacgatctttttgaagacatgaaagatggtgttaaactgcttgcccttctggaggtcctgtctgggcagaaactgccttgtgaacaaggacgccggatgaagcgaatccatgctgtggctaacattggcacggcactcaagttcctcgaaggaagaaagattaaattagtcaacattaactccaccgatatagctgatggccgaccctcaatagttcttggattgatgtggaccattattctatatttccagattgaagagttgaccagcaacctgccccagctccagtctttgtccagcagcgcatcctccgtggacagcatagttagctctgagactcccagcccaccaagtaaacggaaggtgaccaccaagatccaaggaaatgctaagaaggctttattaaagtgggttcagtacacagctggcaagcagactggaatagaagtaaaagattttgggaagagttggagaagcggggttgcctttcattcagttattcatgccattcgaccggaattggtggacttggagacagtgaaaggcagatccaaccgagaaaatttggaggatgctttcactatcgccgaaacagaactggggatcccaagactgctagatcctgaagacgttgatgtggataaaccagatgagaaatctattatgacctatgtagcccagtttctgaaacattatcctgacatccacaatgcaagcactgatgggcaagaggatgatgaaatacttccaggtttcccatcttttgcaaattctgtacaaaattttaagagagaagacagagtaatttttaaggaaatgaaagtttggatagaacaatttgagagagatttgacaagagcacagatggtggaatcaaatttacaggataaatatcagtcatttaagcacttcagagttcaatatgaaatgaagaggaaacagattgaacatttaatacaaccattacacagagacggtaaattgtcacttgaccaagcattggtaaaacaatcttgggatagagtgacctccaggctctttgactggcatatacagcttgataaatctcttcctgcacctctgggcaccataggtgcctggctgtacagagcggaggtggccctgagagaggaaataaccgttcaacaggtccacgaggaaacagcaaacacgatacaacggaaacttgagcaacataaggatctgcttcaaaacacggatgcccacaaaagagcattccatgaaatctaccggaccaggtctgttaacgggattccagtgccacctgatcaattagaggacatggccgagaggtttcattttgtttcctccacatcagagctacacctaatgaaaatggaatttttagaattaaagtaccgtctgctctcactgctggttcttgcagagtcaaagctgaagtcttggatcattaagtacgggaggagagagtcagtggagcagcttctacaaaactacgtgtcttttatagaaaatagcaagttctttgaacaatatgaggtgacataccagatcttgaaacagacagctgagatgtatgtcaaagcagatggttcagtggaagaagctgagaatgtgatgaaattcatgaatgaaaccaccgctcagtggaggaatctctcagtagaagtgaggagtgtgaggagcatgctggaagaagtgatctctaactgggatcgctatggcaatacagtggctagtctgcaagcctggctagaggatgctgaaaaaatgctcaatcaatcagaaaatgccaaaaaggatttttttcgaaatttacctcattggattcagcagcatactgccatgaacgatgctggcaattttctaattgaaacctgtgatgagatggtttcccgtgacctgaagcagcaattactgttgctaaatgggcggtggagggagttgtttatggaagtcaagcaatatgctcaagctgatgagatggacagaatgaagaaggaatacacagactgtgttgttaccctgtctgcttttgcaacggaagcccataagaaactttctgaacccttagaagtctcttttatgaatgtcaagctattaattcaagacttggaggatattgagcagagggtgcctgtgatggatgcccaatacaagataattacaaagacagcacacctcattaccaaagaaagcccccaagaagaaggaaaagaaatgtttgcgaccatgtcaaagctcaaagagcagctaaccaaggtcaaagaatgttactccccactcctttatgagtctcagcagctgttgattccgttggaggaattagaaaagcagatgacgtccttttatgactcacttgggaaaatcaatgaaattatcacagttcttgagcgtgaggcacaatcgagtgccctttttaaacaaaaacatcaggaactgttagcttgtcaagaaaactgtaagaaaaccttgacacttattgagaaaggcagtcaaagtgttcaaaagtttgtgaccttgagcaacgtgttaaagcattttgatcagacgaggctacaaagacagattgcagatattcatgttgcttttcagagtatggtaaagaaaactggagattggaagaagcatgtggaaaccaacagtcgcttgatgaagaagtttgaggagtctcgagcagagttggagaaggtactgcggattgctcaggagggcctggaggaaaagggggatccagaggagctcctgcggagacacactgagtttttcagtcagctggatcagagggtgctcaatgctttcctgaaagcttgtgatgaactcaccgacatccttccagagcaggagcagcaggggctgcaggaagctgttcgaaagctccacaaacaatggaaggatcttcaaggagaagccccttatcatttgcttcatctgaagattgatgtggagaagaataggttcttagcctctgtagaagaatgcagaactgagctggatcgagagaccaagctgatgccccaggaaggcagtgaaaagataattaaagagcacagggttttcttcagtgacaaaggtcctcatcatctctgtgagaaaaggttacagctcatcgaggaactctgtgtgaaactcccagtgcgggacccagtaagggacacacctggaacctgtcacgtgactctcaaagagctcagagctgccattgacagcacctacaggaagctcatggaagacccagacaagtggaaggactacactagcagattctctgagttctcatcttggatatctacaaatgagacacaattaaaggggatcaagggtgaggccatcgatactgccaaccacggagaggttaaacgtgccgttgaagagatcagaaatggtgttaccaaaaggggtgagaccctcagctggctgaaatccaggctgaaagttttgacagaagtttcttctgagaatgaagcccaaaagcagggagatgagctggcaaaattatccagctctttcaaggctcttgtgacgctgctgtcagaggttgaaaagatgctaagcaattttggggactgtgtccagtacaaagaaatagtcaaaaattctctcgaagaattaatttctggctctaaagaagtccaggaacaagctgagaagatcttggatactgaaaatctgtttgaagcacagcagttacttcttcatcaccagcaaaagacaaagcggatctcagcaaagaagagagatgtgcagcagcagatcgcgcaggcgcagcagggagaaggggggctgcctgaccgaggccacgaggagctgcggaagctggagagcacactggatggcctggagcgcagccgggagaggcaggaacgccgcatccaggtcacattaagaaaatgggagcgatttgaaacaaacaaagaaacagtagtaagatacctttttcaaacaggttccagtcatgaacgcttcttgagttttagcagtttggaaagtttatcttcagaactggaacaaacaaaggagttttctaaacggacagaaagtattgcagtccaggctgagaaccttgtaaaggaagcttcagagataccgcttgggccccaaaataagcagctgcttcaacagcaggccaagtcaatcaaagaacaagtcaaaaaattagaagacacgcttgaagaagatattaaaaccatggaaatggtgaaaaccaagtgggatcattttggcagtaattttgagactctgtccgtctggataactgagaaagaaaaagaactcaatgccttggaaacttcgtcatctgccatggacatgcaaatcagccaaattaaggtcacaattcaggaaatagaaagtaagctcagcagcattgtaggattagaagaagaagcccagtcttttgctcagtttgttaccactggagaatctgctcgaattaaagccaagttgacacaaataagaagatacggggaagagcttcgagagcatgcacagtgtctggaaggaacaatcctgggacatttatctcagcagcaaaagtttgaagagaaccttagaaagatccagcaatctgtgtctgaatttgaagataaacttgctgttccaattaaaatatgttcttcagctacagaaacatacaaagttcttcaagaacatatggatctctgccaggccctggagtcactgagcagcgcgatcactgccttctcagccagtgccaggaaggttgtgaacagagattcctgtgttcaggaggctgcggctctacagcagcaatacgaggacatcctaaggagggcgaaggagagacagacggcgctggagaatctgctggcccactggcagaggctagagaaagaactatcatcctttttgacctggttagagcggggtgaagctaaagccagttccccagaaatggacatttctgcagacagagtcaaagtggaaggtgaacttcagttaatacaggcactgcaaaatgaagttgtatcccaggcctcattctatagcaaacttttgcaattgaaggaatcattgttctcagtagcctccaaagatgatgtgaaaatgatgaaactacatttggagcagttggatgagagatggagagatttaccacagatcattaacaaaaggattaattttcttcagtctgtggttgctgaacaccagcaatttgatgagctgctgctttccttttctgtctggattaaactgtttctcagtgaattacaaactacctctgagattagcataatggaccatcaagtagcccttactcggcataaggaccacgcagcagaagtagagagcaaaaagggcgaattgcagagtctgcagggtcacttagcaaagttgggttctctgggccgtgctgaggacctccacctcctgcagggaaaggctgaggactgcttccagctgtttgaggaggccagccaggttgtggagaggcggcagcttgccctgtcccatttggcagaattcctccagagccatgcctctctgtccggcattctccgccagctgaggcaaacagtggaagcaaccaacagtatgaataagaacgagtctgatttgatagaaaaggacctcaatgatgctcttcaaaatgctaaagcattagaatctgctgccgtcagtctggatggcattctttccaaagcccaataccatctgaaaatcgggagctctgagcaaaggacttcctgcagagccacggctgatcagctctgtggagaggtagagaggatccagaaccttctgggaaccaagcagagtgaggcagatgctctggcagtgttgaaaaaagcattccaagaccagaaagaggagcttctgaaaagcattgaggacattgaagaaaggactgacaaagagcgattgaaagaacctacccgccaagctcttcagcagaggttaagagtgtttaatcagctagaagatgaattgaattctcacgagcatgaactatgttggttgaaagacaaagccaagcaaattgcccagaaagatgtagcttttgcacctgaagttgacagggagataaaccgcttagaggtcacctgggatgataccaaaagactaattcatgaaaatcagggtcagtgctgtggacttattgacttaatgagagaatatcagaacctgaaatcagctgtatctaaagtcttagaaaatgccagcagtgtgattgtaaccagaactaccataaaagatcaggaggatcttaaatgggctttttccaagcatgaaactgccaagaacaaaatgaattacaaacagaaagacttggataactttaccagcaaaggaaaacacttgttatctgagctgaagaaaattcacagtagtgatttcagcttggtgaaaacagacatggagagcaccgtggacaaatggctggatgtatcagagaaacttgaagaaaacatggataggctgagagtaagcctgtccatttgggatgatgtactgtcaactagagatgagattgagggatggtcaaacaactgcgttccacagatggcagaaaacatcagcaacctggataaccacctcagagctgaagaactgcttaaagaatttgagtctgaagttaaaaacaaagcattgagattggaagaactgcattccaaagttaatgatctgaaagaattaactaaaaatctagaaacaccgccagaccttcagtttatagaagcagacttaatgcagaaactggagcatgccaaagaaataactgaagtagcaaaaggaaccctgaaggatttcacggctcaaagtacacaagtggagaagtttattaatgacataacaacatggttcacaaaagtggaagaatcgttgatgaactgtgcccaaaatgagacttgtgaagcattgaaaaaagtcaaggatatacaaaaagaacttcaaagtcaacaaagcaacatcagctctacccaagaaaatctcaatagcttgtgccgcaagtaccactcagctgagttggagagcctgggccgtgcaatgactggtctgataaagaaacatgaagccgtgagccagttgtgctccaaaacccaggccagcctgcaggaatctctggaaaaacacttcagtgagtctatgcaggaattccaagaatggtttttgggagcaaaggcagcagcaaaagaatcatcagatcgcaccggtgacagcaaagttctagaagcaaagctccatgatcttcagaacattttggactcagtcagtgatgggcagagcaaacttgatgcagtgactcaagaaggacaaactttgtatgcacatttgtctaaacaaattgtcagtagcattcaagaacaaatcacaaaggccaatgaagagtttcaagcatttctgaaacaatgccttaaagataagcaggctcttcaagactgtgcttcagaacttggaagctttgaagatcagcacagaaaactgaacttatggatccatgaaatggaagaaaggttcaatacggaaaacttgggagagagtaaacagcacattcctgagaagaaaaatgaagttcataaagttgaaatgtttttgggagaactgctggctgcaagagagtctcttgataagctttcccagagagggcagcttctgagtgaagaaggccacggtgctgggcaggagggccgcctgtgttcccagctcctcacaagccaccagaacctacttagaatgaccaaagagaaactccggagctgccaggtggcccttcaggagcacgaagccctggaggaagcactgcaaagcatgtggttctgggtgaaggccattcaggacagactggcctgtgcagagagcactcttgggagcaaagacaccctggagaaacggctgtcacaaatacaggatattctcctgatgaaaggtgaaggggaagttaagttgaatatggccattggcaagggggaacaggccttgagaagtagcaacaaagaaggtcagagggtgattcagactcagttagagacccttaaagaagtgtgggctgacatcatgagctcctccgtccacgctcaaagcactttagagtctgtgattagccaatggaatgactatgtagagaggaaaaaccagttggagcagtggatggaatcagtggatcaaaaaatagaacatcccttacaaccacagccaggtctgaaagagaagttcgtcctgcttgaccacctccagtccatcctgtctgaggcagaagatcacacgagagcccttcaccgtctaattgcgaagtccagggagctctacgaaaagacagaggatgagtctttcaaggacacagctcaagaggagctgaaaacacagtttaatgatataatgactgttgccaaggaaaaaatgaggaaagtggaagagattgtgaaagatcatctaatgtatttagatgcggtccacgagttcacagattggctccattcagcaaaggaagaacttcaccggtggtcagatatgtctggagattcatcagccacccagaaaaagttatcaaaaattaaggagctgatagattccagagagattggtgcaagccgtctcagcagagtggagtcgctggctcccgaagtgaaacagaacacaactgccagtgggtgtgagctcatgcacacggagatgcaggccctgcgtgccgactggaagcagtgggaagacagtgtattccaaacgcagagctgtttggagaacctggtcagccagatggccctttcggagcaggaattctcaggccaagtggctcaactggagcaggccctggaacagttcagtgcccttctgaaaacctgggctcagcagttaaccctcctggaaggcaagaacacggatgaggagatagtggaatgctggcacaaaggacaagagatactggatgctttgcaaaaagcagagcctagaacagaggatctcaagtctcagctgaatgaactttgtcgattttccagagacctgagtacctacagtggaaaagtttctggcttgattaaagagtataattgtctttgtttgcaagcatccaagggctgccagaataaagaacagattttacagcaaagatttcgaaaggccttcagggatttccagcagtggttggttaatgcaaaaatcactaccgccaagtgttttgatatacctcaaaatataagtgaagtttcaactagtcttcagaaaatacaggagtttttgtcagaaagtgaaaatggacagcacaagctaaacatgatgctgtctaaaggggaacttctgagtaccctgctgaccaaagagaaagcgaaagggatccaggccaaagttacagctgcaaaagaagattggaaaaattttcattcaaatctccaccaaaaagaatctgctctagagaatctaaagatccaaatgaaggactttgaagtaagtgctgagcctatccaggactggctgagtaaaactgagaagatggtccatgaaagcagcaatcgcctctatgatctgccagcaaagaggagggagcagcagaagctccagtctgtccttgaggaaatacactgctacgagcctcagctcaacaggctgaaagagaaagctcagcagctgtgggaaggacaagctgccagcaagagctttaggcacagagtgtcgcagctgtcttctcagtatctagcgctaagcaatttaacaaaggagaaagtgtcaagactggatagaatcgttgcagaacacaatcagttctctcttgggattaaagaattacaagactggatgacggatgcgattcacatgctggattcatactgccacccgacatccgacaaaagtgtgctggacagcaggacgctcaagctcgaggctctattatcagtcaaacaggaaaaagagattcagatgaaaatgatagtgaccaggggagaatctgtccttcagaatacttctccagaaggcattcccactattcagcagcagctgcagagtgtgaaggatatgtgggcatcccttttgtctgcagggattcgttgtaaaagccaactcgaaggagctctctccaagtggacaagttatcaggatggcgttcgacagttctccggttggatggatagtatggaagccaacctgaatgaatcagaaaggcagcatgcggagctgcgggataaaacaacgatgctcggaaaagccaagttattaaatgaagaagtgctgagttacagcagcttgctggagaccatcgaagtcaaaggggctggcatgacagaacactatgtcacccagctagaactccaggatctacaggaacgatacagagccatccaagagagggccaaggaagccgtaaccaagtctgaaaaacttgtccgcctgcaccaagagtatcagagagacctaaaggcatttgaagtttggttggggcaagaacaagaaaagctcgaccagtattcagttcttgaaggtgatgcccacactcatgagacaacattgcgtgatcttcaggagctacaggtacactgtgcagaggggcaggccctgttgaactcagtgctgcacaccagagaggatgtgatcccatcaggtatcccacaggcagaggaccgggctttagagtctctccggcaagactggcaggcttaccagcacaggctgtccgagactcgaactcagttcaataacgtggtgaacaaattgaggctaatggagcaaaagtttcagcaagtagatgaatggctcaaaacagcagaggagaaagttagtcccaggaccagacgtcagtctaacagggcaaccaaggagatacaattacatcagatgaagaagtggcacgaagaagtgactgcatacagagatgaagttgaggaagtgggagctagagctcaggagatactggacgagagccacgtgaacagcagaatgggttgccaggccacccagctgacttccagataccaggccctgcttctccaagtgctggaacaaataaaattcctggaggaggagattcagagtttggaggaatcagaatcatccctcagttcctattctgattggtatggctctactcataaaaacttcaagaatgtggctaccaagattgacaaagtagatacagtaatgatggggaagaaattgaagacgttggaggttttgctcaaagacatggagaaaggtcacagtttgctgaaatcagcccgggagaaaggagagagggctgttaaatacttggaggaaggcgaggcagagaggttaagaaaggagattcatgatcacatggagcagttgaaggaactgaccagcactgtccggaaagaacacatgacgctggaaaaaggtcttcatttagcaaaggaattctcagataaatgcaaagcactgacacagtggatagcagaataccaggaaattctacatgttcctgaagaacccaaaatggaattatatgagaaaaaagctcagttatctaaatacaagtcacttcaacaaacggtgctgtcccatgaaccatcagtaaagtcagtgagagagaagggtgaagctcttttggaactggtgcaggacgtcactttaaaggacaaaatagatcaacttcaaagtgattaccaggacctgtgcagcataggaaaggagcatgtcttcagtctggaggcgaaagtcaaagaccatgaagactacaacagtgagctccaagaggtcgaaaagtggctgctgcagatgtctggcagactggtggcacctgacctcctggagacaagcagcctggagacaatcacccagcaattggcccaccacaaggcaatgatggaagaaattgctggttttgaagaccgtttgaacaatcttcaaatgaaaggtgatactttgattggccaatgtgcagaccacctgcaagcgaaacttaaacaaaacgtgcatgctcatctgcagggcacaaaggacagctactcagcgatctgcagcacagctcagaggatgtaccagagtttggaacacgaacttcagaagcacgtcagccgacaagacaccctgcagcagtgccaggcctggctttctgcagtccagccggatttagagccaagtcctcaaccacctcttagtagggcagaagccattaagcaggtcaaacacttcagagctttgcaagagcaggcaaggacctacctagatctcctttgctccatgtgtgacctgtcaaatgcttcggtgaaaaccacagcaaaagacattcaacaaacagagcaaacgattgaacaaaagcttgtccaggcccagaacttaactcagggctgggaagagatcaagcacctgaagtctgagctctggatttacctgcaagatgctgatcagcaactgcagaacatgaagaggaggcactctgagctggagctgaacattgcacagaacatggtttcacaagttaaggattttgttaagaaactacagagcaaacaggcatccgtgaacaccataatagaaaaggtgaataagttaacaaagaaggaggaatcgcctgaacacaaggaaataaatcatttaaatgatcagtggctcgatttgtgccgtcagtctaacaacctgtgcttgcaaagggaagaggatcttcagagaacaagagattaccatgactgtatgaatgttgttgaagtgttcctagaaaaatttactacagaatgggataacttggccagatctgatgcagagagtacagctgtccacctggaagctttgaaaaagttagcattggcattgcaggagagaaagtatgctattgaagatctgaaagatcaaaagcagaaaatgatagagcatctgaatttagatgacaaggagttagtcaaagaacagacgagtcatttagagcaacgttggtttcagcttgaggacctcattaaaaggaaaatccaagtgtcagtcaccaacttggaggagttaaatgtggtgcagtccagatttcaggagctaatggagtgggcagaagagcaacaacccaacatcgccgaggcccttaagcagagccctcctccagatatggctcagaaccttctcatggatcacctggccatctgcagtgaactggaggccaagcagatgctcctgaaatcgcttataaaggacgcagacagggtcatggcagatcttggtctcaatgagcgacaggtcatccagaaggctctctctgatgcacaaagccacgtgaattgtctcagtgacttagtgggccagcgaagaaagtacttaaacaaagccttgtccgagaaaacccagtttctcatggcagtgttccaggccaccagccaaattcagcaacatgagcgaaagataatgttccgtgaacacatctgtctgttaccagatgatgtgagcaaacaagtcaaaacatgtaagagtgcacaagccagcctcaagacttaccaaaatgaagtcactggactttgggcccagggtcgcgaactaatgaaggaagtcacagagcaggaaaagagtgaagtgctggggaagcttcaggaattgcagagtgtctatgacagtgttttacaaaagtgcagtcaccggttacaagaactagagaagaatttggtttctaggaagcattttaaggaagattttgataaagcttgccactggctaaaacaagcagatattgttacatttcctgaaatcaacctaatgaatgagagttctgagcttcatacacaactggctaaataccaaaacattcttgaacaatctccagaatatgaaaatcttctacttacgctgcagagaactgggcagaccatattaccatcgctgaatgaagtcgatcattcctacctcagtgaaaagctaaatgctttgcctcgacaatttaatgtaattgttgccttggctaaagacaagttctataaagtccaggaagcaattcttgctcggaaggaatatgcttccttgattgagttgacaacccagtctctgagtgaacttgaagcccaattcttgaggatgagcaaagttcccaccgacctggccgttgaggaggctctttctctgcaagatggttgcagagccattctggacgaggtggcgggccttggggaggcggtggatgaactgaaccagaaaaaagaaggttttcgcagcacaggtcagccttggcagccagacaagatgctgcaccttgtcaccttatatcacaggctgaagcgacaaacagaacagagggttagcttattagaagacaccaccagtgcttaccaagaacacgagaagatgtgccaacagctggagagacaactgaagtctgtaaaagaggagcagtccaaagtgaatgaggaaacgctgcctgcagaggagaagctcaaaatgtatcactccctggcaggaagtctccaggactcagggattgtactgaaacgagtaaccatacatcttgaagatcttgccccacaccttgaccccttggcttatgagaaagccaggcatcagatccagtcctggcaaggggagttaaaactgttgacttctgccattggtgagacggtgacagaatgtgagagccgaatggtgcagagtatagacttccagactgagatgagtcgctccctggactggctgaggagagtgaaggcagagctcagtgggccggtgtacctagacctcaacctgcaggacatccaagaggaaatcagaaaaatccaaattcatcaggaagaggtccagtccagcttgagaatcatgaatgcgctgagtcacaaggaaaaggagaagttcacaaaggccaaggagctgatttctgcggatttagaacacagcctcgctgagctctcagagctggatggagacatccaggaagccttacgcaccagacaggctaccttgactgaaatatatagccagtgtcaaaggtattatcaggtatttcaagcagccaatgactggcttgaggatgcccaagaattgttacagctggcaggcaatggcctagacgtggagagcgcagaggaaaatctcaaaagccacatggaatttttcagtacagaggatcagttccatagtaacctggaggagctccacagcctggtagccaccctggacccactcatcaagccaaccggcaaagaagacctagaacagaaagtggcttctctggaactcaggagccagaggatgagccgggactctggtgcccaagtggatctcttgcagagatgcacagctcaatggcacgattaccagaaagcaagggaagaggttattgaattgatgaatgatacagaaaagaaattgtctgagttttctttgttgaagacttcgtctagtcatgaagcggaagaaaaattgtcagaacacaaggctttagtgtcagtggttaactctttccatgagaaaattgtggcccttgaggaaaaagcttcacaactggagaaaaccggaaatgatgccagcaaagccaccctgagcaggtcaatgaccaccgtctggcagcgctggacacgccttcgagctgtggcccaggaccaggagaagatcctggaagatgcagtggatgagtggacgggctttaacaacaaggttaaaaaggccactgaaatgattgatcagctgcaagataagttacctggaagttcagcagagaaagcatcgaaagcagagctcttaactcttcttgaataccacgacacgttcgttctggagctggagcagcagcagtcggccttgggcatgctgcggcagcaaaccctgagcatgctccaggatggagccgccccaacccctggggaagagcctccgctcatgcaggaaatcaccgccatgcaagatcggtgcctgaacatgcaggagaaagtgaagactaatggaaagttggtgaagcaagagctgaaggaccgagaaatggtggagactcagatcaattctgtgaaatgttgggttcaggaaacgaaagaatatttagggaatccaacaatagaaatagatgctcaacttgaagaacttcagattctcctaacagaagccacaaatcaccgacagaacattgaaaaaatggcagaagaacagaaggagaagtacttaggtctttataccatattaccttctgaactctcccttcagttggctgaagtggcgttagatctaaagatccgagatcagatccaagacaaaataaaagaagttgagcagagcaaggccacgagccaggaactcagccggcaaattcagaagttagctaaagacctcacaactattctaactaagctgaaagcgaagacagataatgtagttcaagctaaaactgaccaaaaggtgctgggagaggaattagatggctgtaattcaaagttaatggaattagatgcagcagtacagaaattcttggaacagaatggccaactgggtaagccactggccaagaagataggaaaactgactgaacttcaccagcagaccattagacaagctgagaatcggctctccaagctcaatcaggcagcatcacatttagaagaatacaatgaaatgcttgaattaattttgaagtggattgaaaaagctaaagtcttggctcatggaactattgcatggaattctgcaagccagcttcgggaacaatatattttgcatcagaccctgctagaagaatccaaagaaattgacagtgagctggaagcaatgactgagaaattacagtacctcactagcgtgtactgtacagaaaaaatgtctcagcaagtggcagaactgggacgggagactgaggagttgcgacagatgatcaaaattcgtttgcagaacctccaagatgcagctaaggatatgaaaaaatttgaagcagagttgaaaaagttacaagctgccttggagcaagcccaggcaacactgacttctccagaagttggacgtctcagtctcaaggagcagctctctcatcggcagcatttgttgtctgagatggagtcactgaagccgaaggtgcaagcagtgcagctctgccagagtgccctccggatccccgaggatgtggttgccagcttacctctctgtcatgctgctctgcggctgcaggaagaggccagccggctgcagcacaccgccatccagcagtgtaacatcatgcaggcagctgtggtacaatatgaacaatatgagcaagaaatgaaacatctccagcaactgatagaaggagctcacagagagattgaggataaacctgttgccaccagtaacatacaggagctgcaggctcagatttctcggcatgaggagctggcgcagaaaattaagggctaccaggagcagatcgcttctttgaattccaagtgcaagatgctgacgatgaaagccaagcacgccaccatgctgctgacggtgaccgaggtcgaggggctggcggaagggacagaggacctggatggggagctcctccccacgccttcggcccacccctctgtggtcatgatgactgcaggtcgctgtcacactttgctgtcaccggtcactgaggagtctggggaggagggaaccaacagtgagatttcctctccacctgcctgtcgctccccttcacctgtggctaatacagatgcttctgttaaccaggacattgcatattaccaagccttgtctgctgagaggttgcagacagatgctgcaaaaattcaccccagcacatccgcatcccaggagttctatgaaccgggattggagccatccgctactgccaaactgggtgatttgcagcgttcttgggaaaccttaaagaatgtgatcagtgagaagcagcgcacactctatgaagctttggaacgccagcagaagtaccaggactccctccagtccatctctacgaagatggaggccattgagctgaaactcagtgagagcccagagcctggcaggagtccagaaagccagatggctgaacatcaggcattgatggatgagattctcatgctccaggatgaaatcaatgagctccagtcctctctcgcagaggagctggtatccgagtcttgtgaggccgaccctgcggagcagctggccttgcagtccacgctcactgtcttagccgagcgaatgtccaccatcaggatgaaagcctcggggaaacggcagcttttggaggagaagttgaatgatcagctggaggaacaaaggcaggaacaggccctgcagaggtatcgctgtgaagccgatgagctggacagctggctcttgagtaccaaggccactctggacactgcgctgagtccacccaaggagcccatggacatggaggcccagcttatggactgccagaatatgctggtggaaatagagcagaaggtggtggctttatcagaactgtcagtccacaatgagaacctgctgctggagggcaaagctcacaccaaggacgaggccgagcagctggctggaaagctgagaaggctcaaggggagcctgctggagctgcagagagccctgcatgataagcagctcaacatgcagggaacagcacaggagaaggaggagagcgatgttgacctaacagccacgcagagccccggcgtccaggaatggctggcccaagctcgcaccacatggacccagcagcggcagagcagtctccagcaacaaaaagagttagaacaggaattagccgagcagaagagtctccttcgctcagtagccagtcgtggagaggagattctaattcaacattcggcggcagagacctctggtgatgctggcgaaaaacctgatgtgttatcccaggagttggggatggaaggggagaaatcatccgctgaagaccagatgagaatgaaatgggaaagcctacatcaagaatttagtaccaagcagaaactactacagaatgttctggaacaggaacaagagcaagtgctttatagcaggccaaatcgactcttgtctggtgtgccactgtacaaaggggacgtgccaacccaagataaatctgcagttacatctttgctggatggactgaaccaagccttcgaggaggtttcatcccagagtggaggggcaaagaggcagagtatacacttggagcagaagttgtatgatggagtctcagccacctctacttggttggatgacgttgaagaacgtttatttgttgccacagcacttttaccagaagaaacagagacttgtctcttcaaccaagagattcttgccaaagacattaaggaaatgtctgaagaaatggataagaacaaaaacttgttttcccaagcttttccagagaatggtgataatcgagatgttattgaagatactttgggttgtcttttgggcaggttatccttgctagactcagtagtgaatcaacgatgtcatcagatgaaagaaagacttcagcaaatactaaatttccagaatgatctgaaagtgctgtttacatcactggctgacaacaaatacatcattctgcaaaaactggcaaatgtgtttgaacagcccgtagcagaacaaatagaggcaatacaacaggctgaagatggactcaaagaatttgatgcaggaatcattgaattaaagaggcgtggtgacaagctacaggtcgagcagccgtccatgcaagaactctccaagctccaggacatgtatgatgagctgatgatgatcattggctcccggaggagtggtctgaatcagaaccttacactcaagagtcagtatgagagggccctacaagatctggctgacctgctagaaactggtcaggagaagatggcaggagaccagaaaatcatcgtgtcttccaaagaggaaatccagcaactacttgacaaacataaggaatactttcagggcctggaatctcatatgatcttgactgaaacactcttcagaaagataatcagctttgcagtccaaaaggaaacccagttccatacagagctgatggctcaggcttctgctgtactgaaacgggctcacaagaggggtgtggagctggagtacattctagagacgtggtcccatctggatgaggaccagcaggagctcagcagacagctggaggtggtggaaagcagcatcccaagcgtgggtctggtggaggagaacgaggacaggcttattgaccgcataacactctaccagcatttaaaatctagccttaatgaataccagcccaaattatatcaagtattagatgatgggaaacgacttctgatatccatcagctgctcagatctagaaagccaactaaatcaacttggagagtgctggctaagtaacaccaataaaatgtctaaggaacttcacagactggaaacaatattgaaacactggaccagatatcaaagtgaatctgcagatctaattcactggttacaatctgcaaaagaccggctagaattttggactcagcaatctgtgacagtcccacaagagctggaaatggtccgtgatcatctaaatgctttcctggagttttctaaagaagtggatgcccaatcttccctgaaatcatctgttctgagtactggaaatcagctccttcgactaaaaaaggtggacacagccacgctgcgctctgagctgtcgcgcattgatagccagtggactgacctgctaaccaatatcccagccgtccaggagaagctccaccagctccagatggataaactgccttcccgccatgccatttctgaagtcatgagttggatttctctaatggaaaatgttattcagaaggatgaagataatattaaaaattccataggttacaaggcaattcatgaataccttcagaaatataagggttttaagatagacattaactgtaaacagctgacagtggattttgtgaaccagtccgtgctacaaatcagcagtcaggatgtggaaagtaagcgtagtgataagactgattttgctgagcaacttggagcaatgaataaaagttggcaaattctgcaaggtctagtaactgagaagatccagctgttggaaggcttattggaatcttggtcagaatatgaaaataatgtacaatgtctgaaaacatggtttgaaacccaggaaaagagactaaaacaacagcatcgaattggagatcaggcttctgttcaaaatgcactgaaagactgtcaggatctggaagatttgattaaagcaaaagaaaaagaagtagagaaaattgagcagaatggacttgctttgattcagaacaagaaagaagacgtctctagcattgtcatgagcacactgcgagagctcggccaaacctgggcaaatttagatcacatggttggacaattaaagatactgctgaaatcagtgcttgaccaatggagtagtcacaaagtggcctttgacaagataaacagttacctcatggaggccagatactctctttcccgattccgtctgctgactggctccttagaagctgtgcaagttcaggtggacaatcttcagaatctccaagatgatctggaaaaacaggaaaggagcttacagaaatttggctctatcaccaaccaattattaaaagagtgtcacccacccgtgacagaaactcttaccaatacactgaaagaagtcaacatgagatggaataacttgctggaagagattgctgagcagctacagtccagcaaggccctacttcagctttggcaaagatacaaggactactccaaacagtgtgcttcgacagttcagcagcaggaggatcgaaccaatgagctgttgaaggcagccacaaacaaggacattgccgatgatgaggttgccacatggattcaagattgcaacgacctcctcaaaggactgggcacagttaaagattccctcttttttctccatgagctgggagagcaactgaagcaacaagtggatgcttccgcagcatcagctattcaatcggatcaactctctttgagtcaacacttgtgtgccctggagcaagctctctgcaaacagcagacttcattacaggctggagttcttgattatgaaacctttgccaagagtttagaagctttggaggcctggatagtggaagctgaagaaatactacaagggcaggaccctagccactcatctgacctctccacaatccaggaaaggatggaagaacttaagggacagatgttaaaattcagcagcatggctccagatttagaccgtctaaatgagcttggatataggttacccttgaatgataaggaaatcaaaagaatgcagaatctgaaccgccattggtctctgatctcctctcagactacagaaagattcagcaagttgcagtcatttttgctacaacatcagactttcttggaaaaatgtgaaacatggatggaattcctagttcagacagaacaaaagttagcagtagagatttcaggaaattatcagcaccttttggaacagcagagagcacacgagttgtttcaagccgagatgttcagtcgtcagcagattttgcactcaatcattattgatgggcaacgtcttctagaacaaggtcaagttgatgacagggatgaattcaacctgaaattgacactcctcagtaatcaatggcagggagtgattcgcagggcccagcagaggcgggggatcattgacagccagattcgccagtggcagcgctatagggagatggcagaaaagcttcgtaaatggttggttgaagtgtcctacctccccatgagtggtctcggaagtgttcctataccactgcaacaagcaaggaccctctttgatgaagtgcagttcaaagaaaaagtgtttctgcggcaacaaggcagctacatcctgactgtggaggctggcaagcaactccttctctcggcggacagtggcgctgaggccgccttgcaggccgaactcgctgaaatccaagagaaatggaaatcagccagcatgcggctggaagaacagaagaaaaaactagccttcttgttgaaagactgggaaaaatgtgagaaaggaatagcagattccctggagaaactacgaactttcaaaaagaagctttcgcagtctctcccggatcaccatgaagagctccatgcagaacaaatgcgttgcaaggaattagaaaatgcagttgggagctggacagatgacttgacccagttgagcctgctgaaggacaccctctctgcctatatcagtgctgatgatatctccattcttaatgaacgcgtagagcttctgcaaaggcagtgggaagaactatgccaccagctctccttaaggcggcagcaaataggtgaaagattgaatgaatgggcagtcttcagtgaaaagaacaaggaactctgtgagtggttgactcaaatggaaagcaaagtttctcagaatggagacattctcattgaagaaatgatagagaagctcaagaaggattatcaagaggaaattgctattgctcaagagaacaaaatacagctccaacaaatgggagaacgacttgctaaagccagccatgaaagcaaagcatctgagattgaatacaagctgggaaaggtcaacgaccggtggcagcatctcctggacctcattgcagccagggtgaagaagctgaaggagaccctggtagccgtgcagcagcttgataagaacatgagcagcctgaggacctggctcgctcacatcgagtcagagctggccaagccaatagtctacgattcctgtaactcggaagaaatacagagaaagcttaatgagcagcaggagcttcagagagacatagagaagcacagtacaggtgttgcatctgtcctcaacctgtgtgaagtcctgctgcacgactgtgacgcctgtgccactgatgccgagtgtgactctatacagcaggctacgagaaacctggaccggcggtggagaaacatttgtgctatgtccatggaaaggaggctgaaaatcgaagagacgtggcgattgtggcagaaatttctggatgactattcacgttttgaagattggctgaagtcttcagaaaggacagctgcttttcccagctcttctggggtgatctatacagttgccaaggaagaactaaagaaatttgaggctttccagcgacaggtccacgagtgcctgacgcagctggaactgatcaacaagcagtaccgccgcctggccagggagaaccgcactgattcagcatgtagcctcaaacagatggttcacgaaggcaaccagagatgggacaacctgcaaaagcgtgtcacctccatcttgcgcagactcaagcattttattggccagcgtgaggagtttgagactgcgcgggacagcattctggtctggctcacagagatggatctgcagctcactaatattgaacatttttctgagtgtgatgttcaagctaaaataaagcaactcaaggccttccagcaggaaatttcactgaaccacaataagattgagcagataattgcccaaggagaacagctgatagaaaagagtgagcccttggatgcagcgatcatcgaggaggaactagatgagctccgacggtactgccaggaggtcttcgggcgtgtggaaagataccataagaaactgatccgcctgcctctcccagacgatgagcacgacctctcagacagggagctggagctggaagactctgcagctctgtcggacctgcactggcacgaccgctctgcagacagcctgctttctccacagccttcctccaatctctccctctcgctcgctcagcccctccggagcgagcggtcaggacgagacaccccggctagtgtggactccatccccctggagtgggatcacgactatgacctcagtcgggacctggagtctgcaatgtccagagctctgccctctgaggatgaagaaggtcaggatgacaaagatttctacctccggggagctgttggcttatcaggggaccacagtgccctagagtcacagatccgacaactgggcaaagccctggatgatagccgttttcagatacagcaaaccgaaaatatcattcgcagcaaaactcccacggggccggagctagacaccagctacaaaggctacatgaaactgctgggcgaatgcagtagcagtatagactccgtgaagagactggagcacaaactgaaggaggaagaggagagccttcctggctttgttaacctgcatagtaccgaaacccaaacggctggtgtgattgaccgatgggagcttctccaggcccaggcattgagcaaggagttgaggatgaagcagaacctccagaagtggcagcagtttaactcagacttgaacagcatctgggcctggctgggggacacggaggaggagttggaacagctccagcgtctggaactcagcactgacatccagaccatcgagctccagatcaaaaagctcaaggagctccagaaagctgtggaccaccgcaaagccatcatcctctccatcaatctctgcagccctgagttcacccaggctgacagcaaggagagccgggacctgcaggatcgcttgtcgcagatgaatgggcgctgggaccgagtgtgctctctgctggaggagtggcggggcctgctgcaggatgccctgatgcagtgccagggtttccatgaaatgagccatggtttgcttcttatgctggagaacattgacagaaggaaaaatgaaattgtccctattgattctaaccttgatgcagagatacttcaggaccatcacaaacagcttatgcaaataaagcatgagctgttggaatcccaactcagagtagcctctttgcaagacatgtcttgccaactactggtgaatgctgaaggaacagactgtttagaagccaaagaaaaagtccatgttattggaaatcggctcaaacttctcttgaaggaggtcagtcgtcatatcaaggaactggagaagttattagacgtgtcaagtagtcagcaggatttgtcttcctggtcttctgctgatgaactggacacctcagggtctgtgagtcccacatcaggaaggagcaccccaaacagacagaaaacgccacgaggcaagtgtagtctctcacagcctggaccctctgtcagcagtccacatagcaggtccacaaaaggtggctccgattcctccctttctgagccagggccaggtcggtccggccgcggcttcctgttcagagtcctccgagcagctcttccccttcagcttctcctgctcctcctcatcgggcttgcctgccttgtaccaatgtcagaggaagactacagctgtgccctctccaacaactttgcccggtcattccaccccatgctcagatacacgaatggccctcctccactctgaactaagcagatgccatctgcagaagtgctggtagcataaggaggatcgggtcataagcaatcccaaactaccaacaagaggaccttgatcttggcgaaagccctcggtgtggcagctttagccctcctccagatcacatgtgtgcaaattatggcttcagaggtggaagataaacagtgacgggggaacaaacagacaacaagaaggtttggaagaaatctggtttgagactctgaaccttagcactaaggagattgagtaaggacctccaaagttccccggactcatgaattctgggcccttggcccattctgtgcacagccaaggacttcagtagaccatctgggcagctttcccatggtgctgctccaaccatcagataaatgaccctcccaagcaccatgtcagtgtcgtacaatctaccaaccaaccagtgctgaagagattttagaaccttgtaacatacaatttttaagagcttatatggcagcttcctttttaccttgttttcctttggggcatgatgttttaacctttgctttagaagcacaagctgtaaatctaaaaggcacttttttttagaggtataaagaaaaactagatgtaataaataagatcatggaaggctttatgtgaaaaaagttgaatgttatagtaaaaaaaaaaagatatttatgtatgtacagtttgctaaagccaagttttgtttgtattgatttctttgcatttattatagatattataaaata

SEQ ID NO: 645 - protein, 8797 aa, Homo sapiens
MATSRGASRCPRDIANVMQRLQDEQEIVQKRTFTKWINSHLAKRKPPMVVDDLFEDMKDGVKLLALLEVLSGQKLPCEQGRRMKRIHAVANIGTALKFLEGRKIKLVNINSTDIADGRPSIVLGLMWTIILYFQIEELTSNLPQLQSLSSSASSVDSIVSSETPSPPSKRKVTTKIQGNAKKALLKWVQYTAGKQTGIEVKDFGKSWRSGVAFHSVIHAIRPELVDLETVKGRSNRENLEDAFTIAETELGIPRLLDPEDVDVDKPDEKSIMTYVAQFLKHYPDIHNASTDGQEDDEILPGFPSFANSVQNFKREDRVIFKEMKVWIEQFERDLTRAQMVESNLQDKYQSFKHFRVQYEMKRKQIEHLIQPLHRDGKLSLDQALVKQSWDRVTSRLFDWHIQLDKSLPAPLGTIGAWLYRAEVALREEITVQQVHEETANTIQRKLEQHKDLLQNTDAHKRAFHEIYRTRSVNGIPVPPDQLEDMAERFHFVSSTSELHLMKMEFLELKYRLLSLLVLAESKLKSWIIKYGRRESVEQLLQNYVSFIENSKFFEQYEVTYQILKQTAEMYVKADGSVEEAENVMKFMNETTAQWRNLSVEVRSVRSMLEEVISNWDRYGNTVASLQAWLEDAEKMLNQSENAKKDFFRNLPHWIQQHTAMNDAGNFLIETCDEMVSRDLKQQLLLLNGRWRELFMEVKQYAQADEMDRMKKEYTDCVVTLSAFATEAHKKLSEPLEVSFMNVKLLIQDLEDIEQRVPVMDAQYKIITKTAHLITKESPQEEGKEMFATMSKLKEQLTKVKECYSPLLYESQQLLIPLEELEKQMTSFYDSLGKINEIITVLEREAQSSALFKQKHQELLACQENCKKTLTLIEKGSQSVQKFVTLSNVLKHFDQTRLQRQIADIHVAFQSMVKKTGDWKKHVETNSRLMKKFEESRAELEKVLRIAQEGLEEKGDPEELLRRHTEFFSQLDQRVLNAFLKACDELTDILPEQEQQGLQEAVRKLHKQWKDLQGEAPYHLLHLKIDVEKNRFLASVEECRTELDRETKLMPQEGSEKIIKEHRVFFSDKGPHHLCEKRLQLIEELCVKLPVRDPVRDTPGTCHVTLKELRAAIDSTYRKLMEDPDKWKDYTSRFSEFSSWISTNETQLKGIKGEAIDTANHGEVKRAVEEIRNGVTKRGETLSWLKSRLKVLTEVSSENEAQKQGDELAKLSSSFKALVTLLSEVEKMLSNFGDCVQYKEIVKNSLEELISGSKEVQEQAEKILDTENLFEAQQLLLHHQQKTKRISAKKRDVQQQIAQAQQGEGGLPDRGHEELRKLESTLDGLERSRERQERRIQVTLRKWERFETNKETVVRYLFQTGSSHERFLSFSSLESLSSELEQTKEFSKRTESIAVQAENLVKEASEIPLGPQNKQLLQQQAKSIKEQVKKLEDTLEEDIKTMEMVKTKWDHFGSNFETLSVWITEKEKELNALETSSSAMDMQISQIKVTIQEIESKLSSIVGLEEEAQSFAQFVTTGESARIKAKLTQIRRYGEELREHAQCLEGTILGHLSQQQKFEENLRKIQQSVSEFEDKLAVPIKICSSATETYKVLQEHMDLCQALESLSSAITAFSASARKVVNRDSCVQEAAALQQQYEDILRRAKERQTALENLLAHWQRLEKELSSFLTWLERGEAKASSPEMDISADRVKVEGELQLIQALQNEVVSQASFYSKLLQLKESLFSVASKDDVKMMKLHLEQLDERWRDLPQIINKRINFLQSVVAEHQQFDELLLSFSVWIKLFLSELQTTSEISIMDHQVALTRHKDHAAEVESKKGELQSLQGHLAKLGSLGRAEDLHLLQGKAEDCFQLFEEASQVVERRQLALSHLAEFLQSHASLSGILRQLRQTVEATNSMNKNESDLIEKDLNDALQNAKALESAAVSLDGILSKAQYHLKIGSSEQRTSCRATADQLCGEVERIQNLLGTKQSEADALAVLKKAFQDQKEELLKSIEDIEERTDKERLKEPTRQALQQRLRVFNQLEDELNSHEHELCWLKDKAKQIAQKDVAFAPEVDREINRLEVTWDDTKRLIHENQGQCCGLIDLMREYQNLKSAVSKVLENASSVIVTRTTIKDQEDLKWAFSKHETAKNKMNYKQKDLDNFTSKGKHLLSELKKIHSSDFSLVKTDMESTVDKWLDVSEKLEENMDRLRVSLSIWDDVLSTRDEIEGWSNNCVPQMAENISNLDNHLRAEELLKEFESEVKNKALRLEELHSKVNDLKELTKNLETPPDLQFIEADLMQKLEHAKEITEVAKGTLKDFTAQSTQVEKFINDITTWFTKVEESLMNCAQNETCEALKKVKDIQKELQSQQSNISSTQENLNSLCRKYHSAELESLGRAMTGLIKKHEAVSQLCSKTQASLQESLEKHFSESMQEFQEWFLGAKAAAKESSDRTGDSKVLEAKLHDLQNILDSVSDGQSKLDAVTQEGQTLYAHLSKQIVSSIQEQITKANEEFQAFLKQCLKDKQALQDCASELGSFEDQHRKLNLWIHEMEERFNTENLGESKQHIPEKKNEVHKVEMFLGELLAARESLDKLSQRGQLLSEEGHGAGQEGRLCSQLLTSHQNLLRMTKEKLRSCQVALQEHEALEEALQSMWFWVKAIQDRLACAESTLGSKDTLEKRLSQIQDILLMKGEGEVKLNMAIGKGEQALRSSNKEGQRVIQTQLETLKEVWADIMSSSVHAQSTLESVISQWNDYVERKNQLEQWMESVDQKIEHPLQPQPGLKEKFVLLDHLQSILSEAEDHTRALHRLIAKSRELYEKTEDESFKDTAQEELKTQFNDIMTVAKEKMRKVEEIVKDHLMYLDAVHEFTDWLHSAKEELHRWSDMSGDSSATQKKLSKIKELIDSREIGASRLSRVESLAPEVKQNTTASGCELMHTEMQALRADWKQWEDSVFQTQSCLENLVSQMALSEQEFSGQVAQLEQALEQFSALLKTWAQQLTLLEGKNTDEEIVECWHKGQEILDALQKAEPRTEDLKSQLNELCRFSRDLSTYSGKVSGLIKEYNCLCLQASKGCQNKEQILQQRFRKAFRDFQQWLVNAKITTAKCFDIPQNISEVSTSLQKIQEFLSESENGQHKLNMMLSKGELLSTLLTKEKAKGIQAKVTAAKEDWKNFHSNLHQKESALENLKIQMKDFEVSAEPIQDWLSKTEKMVHESSNRLYDLPAKRREQQKLQSVLEEIHCYEPQLNRLKEKAQQLWEGQAASKSFRHRVSQLSSQYLALSNLTKEKVSRLDRIVAEHNQFSLGIKELQDWMTDAIHMLDSYCHPTSDKSVLDSRTLKLEALLSVKQEKEIQMKMIVTRGESVLQNTSPEGIPTIQQQLQSVKDMWASLLSAGIRCKSQLEGALSKWTSYQDGVRQFSGWMDSMEANLNESERQHAELRDKTTMLGKAKLLNEEVLSYSSLLETIEVKGAGMTEHYVTQLELQDLQERYRAIQERAKEAVTKSEKLVRLHQEYQRDLKAFEVWLGQEQEKLDQYSVLEGDAHTHETTLRDLQELQVHCAEGQALLNSVLHTREDVIPSGIPQAEDRALESLRQDWQAYQHRLSETRTQFNNVVNKLRLMEQKFQQVDEWLKTAEEKVSPRTRRQSNRATKEIQLHQMKKWHEEVTAYRDEVEEVGARAQEILDESHVNSRMGCQATQLTSRYQALLLQVLEQIKFLEEEIQSLEESESSLSSYSDWYGSTHKNFKNVATKIDKVDTVMMGKKLKTLEVLLKDMEKGHSLLKSAREKGERAVKYLEEGEAERLRKEIHDHMEQLKELTSTVRKEHMTLEKGLHLAKEFSDKCKALTQWIAEYQEILHVPEEPKMELYEKKAQLSKYKSLQQTVLSHEPSVKSVREKGEALLELVQDVTLKDKIDQLQSDYQDLCSIGKEHVFSLEAKVKDHEDYNSELQEVEKWLLQMSGRLVAPDLLETSSLETITQQLAHHKAMMEEIAGFEDRLNNLQMKGDTLIGQCADHLQAKLKQNVHAHLQGTKDSYSAICSTAQRMYQSLEHELQKHVSRQDTLQQCQAWLSAVQPDLEPSPQPPLSRAEAIKQVKHFRALQEQARTYLDLLCSMCDLSNASVKTTAKDIQQTEQTIEQKLVQAQNLTQGWEEIKHLKSELWIYLQDADQQLQNMKRRHSELELNIAQNMVSQVKDFVKKLQSKQASVNTIIEKVNKLTKKEESPEHKEINHLNDQWLDLCRQSNNLCLQREEDLQRTRDYHDCMNVVEVFLEKFTTEWDNLARSDAESTAVHLEALKKLALALQERKYAIEDLKDQKQKMIEHLNLDDKELVKEQTSHLEQRWFQLEDLIKRKIQVSVTNLEELNVVQSRFQELMEWAEEQQPNIAEALKQSPPPDMAQNLLMDHLAICSELEAKQMLLKSLIKDADRVMADLGLNERQVIQKALSDAQSHVNCLSDLVGQRRKYLNKALSEKTQFLMAVFQATSQIQQHERKIMFREHICLLPDDVSKQVKTCKSAQASLKTYQNEVTGLWAQGRELMKEVTEQEKSEVLGKLQELQSVYDSVLQKCSHRLQELEKNLVSRKHFKEDFDKACHWLKQADIVTFPEINLMNESSELHTQLAKYQNILEQSPEYENLLLTLQRTGQTILPSLNEVDHSYLSEKLNALPRQFNVIVALAKDKFYKVQEAILARKEYASLIELTTQSLSELEAQFLRMSKVPTDLAVEEALSLQDGCRAILDEVAGLGEAVDELNQKKEGFRSTGQPWQPDKMLHLVTLYHRLKRQTEQRVSLLEDTTSAYQEHEKMCQQLERQLKSVKEEQSKVNEETLPAEEKLKMYHSLAGSLQDSGIVLKRVTIHLEDLAPHLDPLAYEKARHQIQSWQGELKLLTSAIGETVTECESRMVQSIDFQTEMSRSLDWLRRVKAELSGPVYLDLNLQDIQEEIRKIQIHQEEVQSSLRIMNALSHKEKEKFTKAKELISADLEHSLAELSELDGDIQEALRTRQATLTEIYSQCQRYYQVFQAANDWLEDAQELLQLAGNGLDVESAEENLKSHMEFFSTEDQFHSNLEELHSLVATLDPLIKPTGKEDLEQKVASLELRSQRMSRDSGAQVDLLQRCTAQWHDYQKAREEVIELMNDTEKKLSEFSLLKTSSSHEAEEKLSEHKALVSVVNSFHEKIVALEEKASQLEKTGNDASKATLSRSMTTVWQRWTRLRAVAQDQEKILEDAVDEWTGFNNKVKKATEMIDQLQDKLPGSSAEKASKAELLTLLEYHDTFVLELEQQQSALGMLRQQTLSMLQDGAAPTPGEEPPLMQEITAMQDRCLNMQEKVKTNGKLVKQELKDREMVETQINSVKCWVQETKEYLGNPTIEIDAQLEELQILLTEATNHRQNIEKMAEEQKEKYLGLYTILPSELSLQLAEVALDLKIRDQIQDKIKEVEQSKATSQELSRQIQKLAKDLTTILTKLKAKTDNVVQAKTDQKVLGEELDGCNSKLMELDAAVQKFLEQNGQLGKPLAKKIGKLTELHQQTIRQAENRLSKLNQAASHLEEYNEMLELILKWIEKAKVLAHGTIAWNSASQLREQYILHQTLLEESKEIDSELEAMTEKLQYLTSVYCTEKMSQQVAELGRETEELRQMIKIRLQNLQDAAKDMKKFEAELKKLQAALEQAQATLTSPEVGRLSLKEQLSHRQHLLSEMESLKPKVQAVQLCQSALRIPEDVVASLPLCHAALRLQEEASRLQHTAIQQCNIMQAAVVQYEQYEQEMKHLQQLIEGAHREIEDKPVATSNIQELQAQISRHEELAQKIKGYQEQIASLNSKCKMLTMKAKHATMLLTVTEVEGLAEGTEDLDGELLPTPSAHPSVVMMTAGRCHTLLSPVTEESGEEGTNSEISSPPACRSPSPVANTDASVNQDIAYYQALSAERLQTDAAKIHPSTSASQEFYEPGLEPSATAKLGDLQRSWETLKNVISEKQRTLYEALERQQKYQDSLQSISTKMEAIELKLSESPEPGRSPESQMAEHQALMDEILMLQDEINELQSSLAEELVSESCEADPAEQLALQSTLTVLAERMSTIRMKASGKRQLLEEKLNDQLEEQRQEQALQRYRCEADELDSWLLSTKATLDTALSPPKEPMDMEAQLMDCQNMLVEIEQKVVALSELSVHNENLLLEGKAHTKDEAEQLAGKLRRLKGSLLELQRALHDKQLNMQGTAQEKEESDVDLTATQSPGVQEWLAQARTTWTQQRQSSLQQQKELEQELAEQKSLLRSVASRGEEILIQHSAAETSGDAGEKPDVLSQELGMEGEKSSAEDQMRMKWESLHQEFSTKQKLLQNVLEQEQEQVLYSRPNRLLSGVPLYKGDVPTQDKSAVTSLLDGLNQAFEEVSSQSGGAKRQSIHLEQKLYDGVSATSTWLDDVEERLFVATALLPEETETCLFNQEILAKDIKEMSEEMDKNKNLFSQAFPENGDNRDVIEDTLGCLLGRLSLLDSVVNQRCHQMKERLQQILNFQNDLKVLFTSLADNKYIILQKLANVFEQPVAEQIEAIQQAEDGLKEFDAGIIELKRRGDKLQVEQPSMQELSKLQDMYDELMMIIGSRRSGLNQNLTLKSQYERALQDLADLLETGQEKMAGDQKIIVSSKEEIQQLLDKHKEYFQGLESHMILTETLFRKIISFAVQKETQFHTELMAQASAVLKRAHKRGVELEYILETWSHLDEDQQELSRQLEVVESSIPSVGLVEENEDRLIDRITLYQHLKSSLNEYQPKLYQVLDDGKRLLISISCSDLESQLNQLGECWLSNTNKMSKELHRLETILKHWTRYQSESADLIHWLQSAKDRLEFWTQQSVTVPQELEMVRDHLNAFLEFSKEVDAQSSLKSSVLSTGNQLLRLKKVDTATLRSELSRIDSQWTDLLTNIPAVQEKLHQLQMDKLPSRHAISEVMSWISLMENVIQKDEDNIKNSIGYKAIHEYLQKYKGFKIDINCKQLTVDFVNQSVLQISSQDVESKRSDKTDFAEQLGAMNKSWQILQGLVTEKIQLLEGLLESWSEYENNVQCLKTWFETQEKRLKQQHRIGDQASVQNALKDCQDLEDLIKAKEKEVEKIEQNGLALIQNKKEDVSSIVMSTLRELGQTWANLDHMVGQLKILLKSVLDQWSSHKVAFDKINSYLMEARYSLSRFRLLTGSLEAVQVQVDNLQNLQDDLEKQERSLQKFGSITNQLLKECHPPVTETLTNTLKEVNMRWNNLLEEIAEQLQSSKALLQLWQRYKDYSKQCASTVQQQEDRTNELLKAATNKDIADDEVATWIQDCNDLLKGLGTVKDSLFFLHELGEQLKQQVDASAASAIQSDQLSLSQHLCALEQALCKQQTSLQAGVLDYETFAKSLEALEAWIVEAEEILQGQDPSHSSDLSTIQERMEELKGQMLKFSSMAPDLDRLNELGYRLPLNDKEIKRMQNLNRHWSLISSQTTERFSKLQSFLLQHQTFLEKCETWMEFLVQTEQKLAVEISGNYQHLLEQQRAHELFQAEMFSRQQILHSIIIDGQRLLEQGQVDDRDEFNLKLTLLSNQWQGVIRRAQQRRGIIDSQIRQWQRYREMAEKLRKWLVEVSYLPMSGLGSVPIPLQQARTLFDEVQFKEKVFLRQQGSYILTVEAGKQLLLSADSGAEAALQAELAEIQEKWKSASMRLEEQKKKLAFLLKDWEKCEKGIADSLEKLRTFKKKLSQSLPDHHEELHAEQMRCKELENAVGSWTDDLTQLSLLKDTLSAYISADDISILNERVELLQRQWEELCHQLSLRRQQIGERLNEWAVFSEKNKELCEWLTQMESKVSQNGDILIEEMIEKLKKDYQEEIAIAQENKIQLQQMGERLAKASHESKASEIEYKLGKVNDRWQHLLDLIAARVKKLKETLVAVQQLDKNMSSLRTWLAHIESELAKPIVYDSCNSEEIQRKLNEQQELQRDIEKHSTGVASVLNLCEVLLHDCDACATDAECDSIQQATRNLDRRWRNICAMSMERRLKIEETWRLWQKFLDDYSRFEDWLKSSERTAAFPSSSGVIYTVAKEELKKFEAFQRQVHECLTQLELINKQYRRLARENRTDSACSLKQMVHEGNQRWDNLQKRVTSILRRLKHFIGQREEFETARDSILVWLTEMDLQLTNIEHFSECDVQAKIKQLKAFQQEISLNHNKIEQIIAQGEQLIEKSEPLDAAIIEEELDELRRYCQEVFGRVERYHKKLIRLPLPDDEHDLSDRELELEDSAALSDLHWHDRSADSLLSPQPSSNLSLSLAQPLRSERSGRDTPASVDSIPLEWDHDYDLSRDLESAMSRALPSEDEEGQDDKDFYLRGAVGLSGDHSALESQIRQLGKALDDSRFQIQQTENIIRSKTPTGPELDTSYKGYMKLLGECSSSIDSVKRLEHKLKEEEESLPGFVNLHSTETQTAGVIDRWELLQAQALSKELRMKQNLQKWQQFNSDLNSIWAWLGDTEEELEQLQRLELSTDIQTIELQIKKLKELQKAVDHRKAIILSINLCSPEFTQADSKESRDLQDRLSQMNGRWDRVCSLLEEWRGLLQDALMQCQGFHEMSHGLLLMLENIDRRKNEIVPIDSNLDAEILQDHHKQLMQIKHELLESQLRVASLQDMSCQLLVNAEGTDCLEAKEKVHVIGNRLKLLLKEVSRHIKELEKLLDVSSSQQDLSSWSSADELDTSGSVSPTSGRSTPNRQKTPRGKCSLSQPGPSVSSPHSRSTKGGSDSSLSEPGPGRSGRGFLFRVLRAALPLQLLLLLLIGLACLVPMSEEDYSCALSNNFARSFHPMLRYTNGPPPL

SEQ ID NO: 646 - DNA, 3066 bp, Homo sapiens
ttccttttatgcgaacacaagtatatgaggggttgtgtaaaaattatttttctcttgctgtactacaaagagatagaatcaaactgctttttttcgacatactggtttttctttctgtttttcttctctttcttctatttcttgtggatattatggctaataacacaacaagtttagggagtccatggccagaaaacttttgggaggaccttatcatgtccttcactgtatccatggcaatcgggctggtacttggaggatttatttgggctgtgttcatttgtctgtctcgaagaagaagagccagtgctcccatctcacagtggagttcaagcaggagatctaggtcttcttacacccacggcctcaacagaactggattttaccgccacagtggctgtgaacgtcgaagcaacctcagcctggccagtctcaccttccagcgacaagcttccctggaacaagcaaattcctttccaagaaaatcaagtttcagagcttctactttccatccctttctgcaatgtccaccacttcctgtggaaactgagagtcagctggtgactctcccttcttccaatatctctcccaccatcagcacttcccacagtctgagccgtcctgactactggtccagtaacagtcttcgagtgggcctttcaacaccgcccccacctgcctatgagtccatcatcaaggcattcccagattcctgagtagggtggcttttggtttttgtttctttcttgtcttgtcttttattgaaaggaaatcaaaaataggctaaacagaattttgagggcatggcccaaataactcatgagttccaagttgaaacatggttgtgcaagttggacattacaatgtaaaacacattttcttcaaacacgttttcccttttgtttcaaaaaatgtaatattttcccccaagcgttttatatttatgtattttgtattcaatgtgaggcttattaaaaatagtgattctaatgtaagaatcagctaagatgcattatatatattttaattaaaattaaaacttcagatatttgtggattacaatcctcatttacttccaatgtgactaaaaagagaaaaaaaatcactgtgtcactttaaagaaaaatcttctaagggatttggattttactttctttagaatgacaagtgaatcatattgacattttacaatcttagatttttctttttttttcttttgagacagggtcttgatccgtcgcccaggcgggagttgcagtagcatgatcaggactcactgcagcctctatctcccaggctcaagtaatcctcccatcttagtgccccaagtagctgggactacaggggtgcactaccacaccgggttgaatttttttttaattttagtagagatgaagtgtcactatgttaccaaggctggtctcaaactcctaaactcagatgatcctcctgcctcggcctcccaaagtgctggaattagcctggccaatcttggatttttaatggaatatgtgggcacaaaatgacagaacataggacattctaaagttccttgatttgatcattataagaagtgtgggactcaagcacaggaaactgaactcttttggtgtcattggatgtttcatttttgacactaattttttctggacaaactctttatgtgtttttcccaagaatagttatctacttcctggaggcaaaatccttggatttactaacatgatgatttaccttttcttcaccgttgtcgttacattgttagaaaagcaacaggaaaaaatccaattcatttgacctaaaaacaagcctcaagtttaaaaccaagctcacgtttttcttaagggaaaaattttctttcttaaacttacatctagcaacttggaaagcactttctctggggatcttcttttgtaactttgcagacaaataagtatgagtcactggggagagagtttgttattgaaatagatgttgcccatgaagaattctccttcctggattgactcttaatcatcaggcatcattcctggtttgcttctctacgaatctcaattccaacttctctgcagagtctgtacagtgattaagccatgccagatggtctttggtgcacacagttatttaagaatccacttccacaggtggctgcccttgtaaggaagaatgcatccctaaatgtggccaccagagagttccagtgggcagatgtctgtggctgcccttctcatttaaggacatgagttcactggagtattactcaaaaagtctgtggttcatttccagtattgtgaatatttagtttatgtggccgtttctttgtttctttgaacagtgggattttcagtgaaaaagtaccctctttttcatttcctattgcagtggtcacagctaatagtgtctgaacatggttcaagaataagagattccatgtagcattttctttattattttcatttcccttatattatccatcattccttaaggacaattattcttaataatgcttatagaaaatgttctctaattaaacatgccaaaaggaaaaagtaagagaaagagggagcaagaagaaaatggaagaaaaagggaaaaaagctaaccggataaccaatttgttataagttggttttcaacaaagaaatttagcagccaagtaaggtttcaagggaatattaacttggtatcagggctacttttttttttttttttttacttgcatgtcatccttaatgtctaacatgaaaaatcagcaaagagtatggtttttatcaagaatttgtgttgggagtaaaaactgctttatagctcccaaattaggaagagaagagcagaaatcctctggggcatttaaccatctggcagaattgttgctgcacccttatcccagttataagacagtcaaaatgactatttcctaaatattgtgagtgtatgaaatgtgaaattaaagcaaaaactggagacttttaatgtatttctttaatttgaaatgttttgtggattgtgaaataaaaataaatttatgtcaagttttattcaaaaaaaaaaaaaaaaaaaaaaaaa

SEQ ID NO: 647 - protein, 235 aa, Homo sapiens
MRTQVYEGLCKNYFSLAVLQRDRIKLLFFDILVFLSVFLLFLLFLVDIMANNTTSLGSPWPENFWEDLIMSFTVSMAIGLVLGGFIWAVFICLSRRRRASAPISQWSSSRRSRSSYTHGLNRTGFYRHSGCERRSNLSLASLTFQRQASLEQANSFPRKSSFRASTFHPFLQCPPLPVETESQLVTLPSSNISPTISTSHSLSRPDYWSSNSLRVGLSTPPPPAYESIIKAFPDS

SEQ ID NO: 648 - DNA, 1618 bp, Homo sapiens
gggtagagtgagaagcaccagcaggcagtaacagccaacccttagccattgctaagggcagagaactggtggagcctttctcttactcccaggacttcagcacctaagacagctccaaaacaaaccagaacagtcagctccgggggagcacgactgggcgagaggcacagaaatggacaccagaaataaggcccagctccttgtgctcctgactcttctcagtgtgctcttctcacagacttcggcatggcctctttacagggcaccttctgctctcaggttgggtgacagaataccctttgagggagcaaatgaacctgatcaagtttcattaaaagaagacattgacatgttgcaaaatgcattagctgaaaatgacacaccctattatgatgtatccagaaatgccaggcatgctgatggagttttcaccagtgacttcagtaaactcttgggtcaactttctgccaaaaagtaccttgagtctcttatgggaaaacgtgttagcagtaacatctcagaagaccctgtaccagtcaaacgtcactcagatgcagtcttcactgacaactatacccgccttagaaaacaaatggctgtaaagaaatatttgaactcaattctgaatggaaagaggagcagtgagggagaatctcccgactttccagaagagttagaaaaatgatgaaaaagacctttggagcaaagctgatgacaacttcccagtgaattcttgaaggaaaatgatacgcaacataattaaattttgagttctacataagtaattcaagaaaacaacttcaatatccaaaccaaataaaaatattgtgttgtgaatgttgtgatgtattctagctaatgtaataactgtgaagtttacattgtaaatagtatttgagagttctaaattttgtctttaactcataaaaagcctgcaatttcatatgctgtatatcctttctaacaaaaaaatatatttaatgataagtaaatgctaggttaattccaattatatgagacgtttttggaagagtagtaatagagcaaaattgatgtgtttatttatagagtgtacttaactattcaggagagtagaacagataatcagtgtgtctaaatttgaatgttaagcagatggaatgctgtgttaaataaacctcaaaatgtctaagatagtaacaatgaagataaaaagacattcttccaaaaagattttcagaaaatattatgtgtttccatattttataggcaacctttatttttaatggtgttttaaaaaatctcaaatttggattgctaatcaccaaaggctctctcctgatagtctttcagttaaggagaacgacccctgcttctgacactgaaacttccctttctgcttgtgttaagtatgtgtaaaatgtgaagtgaatgaaacactcagttgttcaataataaatatttttgccataatgactcagaatattgctttggtcatatgagcttccttctgtgaaagtacatttggagacacaactatttttccaaaataattttaagaaatcaaagagagaaaataaagaccttgcttatgattgcagataaaaaaaaaaaaaaaaaaaaaaaaaaaaaaaaaaaa

SEQ ID NO: 649 - protein, 170 aa, Homo sapiens
MDTRNKAQLLVLLTLLSVLFSQTSAWPLYRAPSALRLGDRIPFEGANEPDQVSLKEDIDMLQNALAENDTPYYDVSRNARHADGVFTSDFSKLLGQLSAKKYLESLMGKRVSSNISEDPVPVKRHSDAVFTDNYTRLRKQMAVKKYLNSILNGKRSSEGESPDFPEELEK

SEQ ID NO: 650 - DNA, 1615 bp, Homo sapiens
gggtagagtgagaagcaccagcaggcagtaacagccaacccttagccattgctaagggcagagaactggtggagcctttctcttactcccaggacttcagcacctaagacagctccaaaacaaaccagaacagtcagctccgggggagcacgactgggcgagaggcacagaaatggacaccagaaataaggcccagctccttgtgctcctgactcttctcagtgtgctcttctcacagacttcggcatggcctctttacagggcaccttctgctctcaggttgggtgacagaataccctttgagggagcaaatgaacctgatcaagtttcattaaaagaagacattgacatgttgcaaaatgcattagctgaaaatgacacaccctattatgatgtatccagaaatgccaggcatgctgatggagttttcaccagtgacttcagtaaactcttgggtcaactttctgccaaaaagtaccttgagtctcttatgggaaaacgtgttagtaacatctcagaagaccctgtaccagtcaaacgtcactcagatgcagtcttcactgacaactatacccgccttagaaaacaaatggctgtaaagaaatatttgaactcaattctgaatggaaagaggagcagtgagggagaatctcccgactttccagaagagttagaaaaatgatgaaaaagacctttggagcaaagctgatgacaacttcccagtgaattcttgaaggaaaatgatacgcaacataattaaattttgagttctacataagtaattcaagaaaacaacttcaatatccaaaccaaataaaaatattgtgttgtgaatgttgtgatgtattctagctaatgtaataactgtgaagtttacattgtaaatagtatttgagagttctaaattttgtctttaactcataaaaagcctgcaatttcatatgctgtatatcctttctaacaaaaaaatatatttaatgataagtaaatgctaggttaattccaattatatgagacgtttttggaagagtagtaatagagcaaaattgatgtgtttatttatagagtgtacttaactattcaggagagtagaacagataatcagtgtgtctaaatttgaatgttaagcagatggaatgctgtgttaaataaacctcaaaatgtctaagatagtaacaatgaagataaaaagacattcttccaaaaagattttcagaaaatattatgtgtttccatattttataggcaacctttatttttaatggtgttttaaaaaatctcaaatttggattgctaatcaccaaaggctctctcctgatagtctttcagttaaggagaacgacccctgcttctgacactgaaacttccctttctgcttgtgttaagtatgtgtaaaatgtgaagtgaatgaaacactcagttgttcaataataaatatttttgccataatgactcagaatattgctttggtcatatgagcttccttctgtgaaagtacatttggagacacaactatttttccaaaataattttaagaaatcaaagagagaaaataaagaccttgcttatgattgcagataaaaaaaaaaaaaaaaaaaaaaaaaaaaaaaaaaaa

SEQ ID NO: 651 - protein, 169 aa, Homo sapiens
MDTRNKAQLLVLLTLLSVLFSQTSAWPLYRAPSALRLGDRIPFEGANEPDQVSLKEDIDMLQNALAENDTPYYDVSRNARHADGVFTSDFSKLLGQLSAKKYLESLMGKRVSNISEDPVPVKRHSDAVFTDNYTRLRKQMAVKKYLNSILNGKRSSEGESPDFPEELEK

SEQ ID NO: 652 - DNA, 3277 bp, Homo sapiens
gccagggcggcacgggagggcggcgcaggaggtgggacctgcgccgggaaggctccgggacgccagcgcacgcggagcggggaccccggagagccagcaggcgagaagaccggccgagggagagccgatcgcgcctcgagagatccgaggaagtggtcgcgggccgggaggctcccgtgccgagccgaggccaggggtctggggtcgcagcccggcgtgcctgcagctgccgtcgctcgggagcagcagctgtgcccgggatcccggcggcggcgggggaaggaggagctgcagctggactgtggcagctggagggagagggccgggctcccctggcggagccgcgctgggacgactggctgaccgcggccatgcagtcttgacggagtcgctcgggcgcaggggagcagccgcgggcgcgccctcccgggaaggggcaccggagcgcaggcagcagcactttatctgcgactctccagcccagcgagaggcgaagcggtttaccatggaacccgtgaccaagtggagccccaaacaagtggtggactggactagagggttggatgactgcctgcaacaatatgtccacaagtttgaacgagagaagatcaacggcgagcagctgctgcagatttcccatcaggacctggaggagctgggggtcacacggattggacaccaggagcttgtgttggaggctgtggaccttctctgtgcactgaattatggcctcgaaactgataacatgaagaacttggttctgaaactgagagcatcttcccacaatttacagaattacataagtagccgacggaaaagtcccgcttacgatggcaacacctcccgcaaggcccccaatgagttcctgacctcggtggtggagctcatcggcgccgccaaggccctgctggcgtggctggaccgggctccgtttacagggatcactgatttctcagtcacgaagaacaaaattatccagctttgcttggacctgaccactacagtccagaaggattgctttgtagcggaaatggaggataaagttttaactgtggtcaaggttttaaatggcatctgtgacaaaacaatccgatctaccacagatcctgtgatgagccagtgtgcatgtctggaggaagttcacttaccaaacattaaacctggggaaggcctgggcatgtacatcaaatcaacctatgatgggttacacgtgattactggaaccacagaaaattctcctgcagacagatctcagaagattcatgctggtgacgaagtcattcaagttaatcagcaaactgtggtgggatggcagctgaaaaatctggtgaagaaattgagagagaatcccaccggagttgtgttactgcttaagaagcgccccaccgggtctttcaactttactcctgctcccctgaaaaacctacggtggaagccacctcttgtacagacctcacctccacccgcgacaacccagtcccctgaaagcactatggatacctcactgaagaaggagaagtcagccatcctggatctttatattcctcctccgcctgctgttccctactctccccgggatgagaatggcagttttgtttatggagggtccagtaagtgcaaacaaccattgcctggtcctaagggttcagagtccccgaattccttcttggaccaggaaagccggagacgaagattcaccattgcagactcggatcagttgcctgggtactcggtggaaaccaacattctgcccacaaaaatgagagagaaaacaccatcttatggcaagccacggcctttgtccatgcctgctgatgggaactggatggggattgtggacccttttgccagacctcgaggtcatggcaggaaaggggaggatgccctttgccggtatttcagtaacgagcggattcctccgatcattgaagagagctcctctcccccataccggttctccagacccacgaccgagcggcatctggtccggggtgcggactacatccgaggaagcaggtgctacatcaactcagatctccacagcagcgccacgattccattccaggaggaagggaccaaaaagaaatctggctcctcagctacgaagtcctcgtccacagaaccgtccctcctggtcagctggtttacgcgcctcaaactgttgactcactgagagggaccctgctcaggccacctgcctggctcctgccccaagtgccttgcttttacagtggacagcctcttctcgtttcagcctcagtattatgtagggaccttatgcaatttctttttcttttgaaaagttatctactgcccttcttggaagtttgcaggattggatgggaacaaattcagaggatcttaggtgctggcttgtggagacaaaaggagggaaatgggtagagcctgtttgtcttgcttccccagagatagaatgtgaagacacgcgctagaaatcgcagtcctggccagagacgttatggtcattgtgagggactggtggcattgttcctttttgaggggctggggggactcaaattggtggctgttttcacacagatgtgttggtttgtggtccaacttctttatctgaaaaagccagtgagaaaacatttttgatttgatttttctaaactatctaccatattttaagtgtagcagctttgactttgcaataacgtggcaagtatctgatttctcctttgaggcagaggtttaagtgtaggcctgttacacttgtttgatacctttttcatgacagtctcagtatagatcagttggtacagaaatacatgaacacattttgatagggcttatttcacacaaagaagtttatggttatttgtgtggggtggtgttgttatatattattgtctttaagggaaaagaagctataagattcgctgacagccaaagtatcatttagaaaagtgaagcaacaagatttaggttgatgaaagatacatgagtttgcattttgacctgttcagtgtctgtcttccagcacggtgtgtacacttcttcaaaattgtacacagtttgctaattagaaatatcttggaaagcctcatggtcactaattttcaactagcatcaggtattttgaaaacgtgtgtctggatattaactcttgtttaaactgaatgtatgatattttgttagaatggaaaagtactatcttgttaatttaagtattttaaatatagttgtatatttttcttactcttaaaaaaaaaaaaaaaaaaaaaaaaaaaaaaaattaaaaaaaaaaaaaaaa

SEQ ID NO: 653 - protein, 555 aa, Homo sapiens
MEPVTKWSPKQVVDWTRGLDDCLQQYVHKFEREKINGEQLLQISHQDLEELGVTRIGHQELVLEAVDLLCALNYGLETDNMKNLVLKLRASSHNLQNYISSRRKSPAYDGNTSRKAPNEFLTSVVELIGAAKALLAWLDRAPFTGITDFSVTKNKIIQLCLDLTTTVQKDCFVAEMEDKVLTVVKVLNGICDKTIRSTTDPVMSQCACLEEVHLPNIKPGEGLGMYIKSTYDGLHVITGTTENSPADRSQKIHAGDEVIQVNQQTVVGWQLKNLVKKLRENPTGVVLLLKKRPTGSFNFTPAPLKNLRWKPPLVQTSPPPATTQSPESTMDTSLKKEKSAILDLYIPPPPAVPYSPRDENGSFVYGGSSKCKQPLPGPKGSESPNSFLDQESRRRRFTIADSDQLPGYSVETNILPTKMREKTPSYGKPRPLSMPADGNWMGIVDPFARPRGHGRKGEDALCRYFSNERIPPIIEESSSPPYRFSRPTTERHLVRGADYIRGSRCYINSDLHSSATIPFQEEGTKKKSGSSATKSSSTEPSLLVSWFTRLKLLTH

SEQ ID NO: 654 - DNA, 9093 bp, Homo sapiens
cgagcccagtcgagccgcgctcacctcgggctcccgctccgtctccacctccgcctttgccctggcggcgcgaccccgtcccgggcgcggcccccagcagtcgcgcgccgttagcctcgcgcccgccgcgcagtccgggcccggcgcgatgggggccgccgccggccggagcccccacctggggcccgcgcccgcccgccgcccgcagcgctctctgctcctgctgcagctgctgctgctcgtcgctgccccggggtccacgcaggcccaggccgccccgttccccgagctgtgcagttatacatgggaagctgttgataccaaaaataatgtactttataaaatcaacatctgtggaagtgtggatattgtccagtgcgggccatcaagtgctgtttgtatgcacgacttgaagacacgcacttatcattcagtgggtgactctgttttgagaagtgcaaccagatctctcctggaattcaacacaacagtgagctgtgaccagcaaggcacaaatcacagagtccagagcagcattgccttcctgtgtgggaaaaccctgggaactcctgaatttgtaactgcaacagaatgtgtgcactactttgagtggaggaccactgcagcctgcaagaaagacatatttaaagcaaataaggaggtgccatgctatgtgtttgatgaagagttgaggaagcatgatctcaatcctctgatcaagcttagtggtgcctacttggtggatgactccgatccggacacttctctattcatcaatgtttgtagagacatagacacactacgagacccaggttcacagctgcgggcctgtccccccggcactgccgcctgcctggtaagaggacaccaggcgtttgatgttggccagccccgggacggactgaagctggtgcgcaaggacaggcttgtcctgagttacgtgagggaagaggcaggaaagctagacttttgtgatggtcacagccctgcggtgactattacatttgtttgcccgtcggagcggagagagggcaccattcccaaactcacagctaaatccaactgccgctatgaaattgagtggattactgagtatgcctgccacagagattacctggaaagtaaaacttgttctctgagcggcgagcagcaggatgtctccatagacctcacaccacttgcccagagcggaggttcatcctatatttcagatggaaaagaatatttgttttatttgaatgtctgtggagaaactgaaatacagttctgtaataaaaaacaagctgcagtttgccaagtgaaaaagagcgatacctctcaagtcaaagcagcaggaagataccacaatcagaccctccgatattcggatggagacctcaccttgatatattttggaggtgatgaatgcagctcagggtttcagcggatgagcgtcataaactttgagtgcaataaaaccgcaggtaacgatgggaaaggaactcctgtattcacaggggaggttgactgcacctacttcttcacatgggacacggaatacgcctgtgttaaggagaaggaagacctcctctgcggtgccaccgacgggaagaagcgctatgacctgtccgcgctggtccgccatgcagaaccagagcagaattgggaagctgtggatggcagtcagacggaaacagagaagaagcattttttcattaatatttgtcacagagtgctgcaggaaggcaaggcacgagggtgtcccgaggacgcggcagtgtgtgcagtggataaaaatggaagtaaaaatctgggaaaatttatttcctctcccatgaaagagaaaggaaacattcaactctcttattcagatggtgatgattgtggtcatggcaagaaaattaaaactaatatcacacttgtatgcaagccaggtgatctggaaagtgcaccagtgttgagaacttctggggaaggcggttgcttttatgagtttgagtggcacacagctgcggcctgtgtgctgtctaagacagaaggggagaactgcacggtctttgactcccaggcagggttttcttttgacttatcacctctcacaaagaaaaatggtgcctataaagttgagacaaagaagtatgacttttatataaatgtgtgtggcccggtgtctgtgagcccctgtcagccagactcaggagcctgccaggtggcaaaaagtgatgagaagacttggaacttgggtctgagtaatgcgaagctttcatattatgatgggatgatccaactgaactacagaggcggcacaccctataacaatgaaagacacacaccgagagctacgctcatcacctttctctgtgatcgagacgcgggagtgggcttccctgaatatcaggaagaggataactccacctacaacttccggtggtacaccagctatgcctgcccggaggagcccctggaatgcgtagtgaccgacccctccacgctggagcagtacgacctctccagtctggcaaaatctgaaggtggccttggaggaaactggtatgccatggacaactcaggggaacatgtcacgtggaggaaatactacattaacgtgtgtcggcctctgaatccagtgccgggctgcaaccgatatgcatcggcttgccagatgaagtatgaaaaagatcagggctccttcactgaagtggtttccatcagtaacttgggaatggcaaagaccggcccggtggttgaggacagcggcagcctccttctggaatacgtgaatgggtcggcctgcaccaccagcgatggcagacagaccacatataccacgaggatccatctcgtctgctccaggggcaggctgaacagccaccccatcttttctctcaactgggagtgtgtggtcagtttcctgtggaacacagaggctgcctgtcccattcagacaacgacggatacagaccaggcttgctctataagggatcccaacagtggatttgtgtttaatcttaatccgctaaacagttcgcaaggatataacgtctctggcattgggaagatttttatgtttaatgtctgcggcacaatgcctgtctgtgggaccatcctgggaaaacctgcttctggctgtgaggcagaaacccaaactgaagagctcaagaattggaagccagcaaggccagtcggaattgagaaaagcctccagctgtccacagagggcttcatcactctgacctacaaagggcctctctctgccaaaggtaccgctgatgcttttatcgtccgctttgtttgcaatgatgatgtttactcagggcccctcaaattcctgcatcaagatatcgactctgggcaagggatccgaaacacttactttgagtttgaaaccgcgttggcctgtgttccttctccagtggactgccaagtcaccgacctggctggaaatgagtacgacctgactggcctaagcacagtcaggaaaccttggacggctgttgacacctctgtcgatgggagaaagaggactttctatttgagcgtttgcaatcctctcccttacattcctggatgccagggcagcgcagtggggtcttgcttagtgtcagaaggcaatagctggaatctgggtgtggtgcagatgagtccccaagccgcggcgaatggatctttgagcatcatgtatgtcaacggtgacaagtgtgggaaccagcgcttctccaccaggatcacgtttgagtgtgctcagatatcgggctcaccagcatttcagcttcaggatggttgtgagtacgtgtttatctggagaactgtggaagcctgtcccgttgtcagagtggaaggggacaactgtgaggtgaaagacccaaggcatggcaacttgtatgacctgaagcccctgggcctcaacgacaccatcgtgagcgctggcgaatacacttattacttccgggtctgtgggaagctttcctcagacgtctgccccacaagtgacaagtccaaggtggtctcctcatgtcaggaaaagcgggaaccgcagggatttcacaaagtggcaggtctcctgactcagaagctaacttatgaaaatggcttgttaaaaatgaacttcacggggggggacacttgccataaggtttatcagcgctccacagccatcttcttctactgtgaccgcggcacccagcggccagtatttctaaaggagacttcagattgttcctacttgtttgagtggcgaacgcagtatgcctgcccacctttcgatctgactgaatgttcattcaaagatggggctggcaactccttcgacctctcgtccctgtcaaggtacagtgacaactgggaagccatcactgggacgggggacccggagcactacctcatcaatgtctgcaagtctctggccccgcaggctggcactgagccgtgccctccagaagcagccgcgtgtctgctgggtggctccaagcccgtgaacctcggcagggtaagggacggacctcagtggagagatggcataattgtcctgaaatacgttgatggcgacttatgtccagatgggattcggaaaaagtcaaccaccatccgattcacctgcagcgagagccaagtgaactccaggcccatgttcatcagcgccgtggaggactgtgagtacacctttgcctggcccacagccacagcctgtcccatgaagagcaacgagcatgatgactgccaggtcaccaacccaagcacaggacacctgtttgatctgagctccttaagtggcagggcgggattcacagctgcttacagcgagaaggggttggtttacatgagcatctgtggggagaatgaaaactgccctcctggcgtgggggcctgctttggacagaccaggattagcgtgggcaaggccaacaagaggctgagatacgtggaccaggtcctgcagctggtgtacaaggatgggtccccttgtccctccaaatccggcctgagctataagagtgtgatcagtttcgtgtgcaggcctgaggccgggccaaccaataggcccatgctcatctccctggacaagcagacatgcactctcttcttctcctggcacacgccgctggcctgcgagcaagcgaccgaatgttccgtgaggaatggaagctctattgttgacttgtctccccttattcatcgcactggtggttatgaggcttatgatgagagtgaggatgatgcctccgataccaaccctgatttctacatcaatatttgtcagccactaaatcccatgcacggagtgccctgtcctgccggagccgctgtgtgcaaagttcctattgatggtccccccatagatatcggccgggtagcaggaccaccaatactcaatccaatagcaaatgagatttacttgaattttgaaagcagtactccttgcttagcggacaagcatttcaactacacctcgctcatcgcgtttcactgtaagagaggtgtgagcatgggaacgcctaagctgttaaggaccagcgagtgcgactttgtgttcgaatgggagactcctgtcgtctgtcctgatgaagtgaggatggatggctgtaccctgacagatgagcagctcctctacagcttcaacttgtccagcctttccacgagcacctttaaggtgactcgcgactcgcgcacctacagcgttggggtgtgcacctttgcagtcgggccagaacaaggaggctgtaaggacggaggagtctgtctgctctcaggcaccaagggggcatcctttggacggctgcaatcaatgaaactggattacaggcaccaggatgaagcggtcgttttaagttacgtgaatggtgatcgttgccctccagaaaccgatgacggcgtcccctgtgtcttccccttcatattcaatgggaagagctacgaggagtgcatcatagagagcagggcgaagctgtggtgtagcacaactgcggactacgacagagaccacgagtggggcttctgcagacactcaaacagctaccggacatccagcatcatatttaagtgtgatgaagatgaggacattgggaggccacaagtcttcagtgaagtgcgtgggtgtgatgtgacatttgagtggaaaacaaaagttgtctgccctccaaagaagttggagtgcaaattcgtccagaaacacaaaacctacgacctgcggctgctctcctctctcaccgggtcctggtccctggtccacaacggagtctcgtactatataaatctgtgccagaaaatatataaagggcccctgggctgctctgaaagggccagcatttgcagaaggaccacaactggtgacgtccaggtcctgggactcgttcacacgcagaagctgggtgtcataggtgacaaagttgttgtcacgtactccaaaggttatccgtgtggtggaaataagaccgcatcctccgtgatagaattgacctgtacaaagacggtgggcagacctgcattcaagaggtttgatatcgacagctgcacttactacttcagctgggactcccgggctgcctgcgccgtgaagcctcaggaggtgcagatggtgaatgggaccatcaccaaccctataaatggcaagagcttcagcctcggagatatttattttaagctgttcagagcctctggggacatgaggaccaatggggacaactacctgtatgagatccaactttcctccatcacaagctccagaaacccggcgtgctctggagccaacatatgccaggtgaagcccaacgatcagcacttcagtcggaaagttggaacctctgacaagaccaagtactaccttcaagacggcgatctcgatgtcgtgtttgcctcttcctctaagtgcggaaaggataagaccaagtctgtttcttccaccatcttcttccactgtgaccctctggtggaggacgggatccccgagttcagtcacgagactgccgactgccagtacctcttctcttggtacacctcagccgtgtgtcctctgggggtgggctttgacagcgagaatcccggggacgacgggcagatgcacaaggggctgtcagaacggagccaggcagtcggcgcggtgctcagcctgctgctggtggcgctcacctgctgcctgctggccctgttgctctacaagaaggagaggagggaaacagtgataagtaagctgaccacttgctgtaggagaagttccaacgtgtcctacaaatactcaaaggtgaataaggaagaagagacagatgagaatgaaacagagtggctgatggaagagatccagctgcctcctccacggcagggaaaggaagggcaggagaacggccatattaccaccaagtcagtgaaagccctcagctccctgcatggggatgaccaggacagtgaggatgaggttctgaccatcccagaggtgaaagttcactcgggcaggggagctggggcagagagctcccacccagtgagaaacgcacagagcaatgcccttcaggagcgtgaggacgatagggtggggctggtcaggggtgagaaggcgaggaaagggaagtccagctctgcacagcagaagacagtgagctccaccaagctggtgtccttccatgacgacagcgacgaggacctcttacacatctgactccgcagtgcctgcaggggagcacggagccgcgggacagccaagcacctccaaccaaataagacttccactcgatgatgcttctataattttgcctttaacagaaactttcaaaagggaagagtttttgtgatgggggagagggtgaaggaggtcaggccccactccttcctgattgtttacagtcattggaataaggcatggctcagatcggccacagggcggtaccttgtgcccagggttttgccccaagtcctcatttaaaagcataaggccggacgcatctcaaaacagagggctgcattcgaagaaacccttgctgctttagtcccgatagggtatttgaccccgatatattttagcattttaattctctccccctatttattgactttgacaattactcaggtttgagaaaaaggaaaaaaaaacagccaccgtttcttcctgccagcaggggtgtgatgtaccagtttgtccatcttgagatggtgaggctgtcagtgtatggggcagcttccggcgggatgttgaactggtcattaatgtgtcccctgagttggagctcattctgtctcttttctcttttgctttctgtttcttaagggcacacacacgtgcgtgcgagcacacacacacatacgtgcacagggtccccgagtgcctaggttttggagagtttgcctgttctatgcctttagtcaggaatggctgcacctttttgcatgatatcttcaagcctgggcgtacagagcacatttgtcagtatttttgccggctggtgaattcaaacaacctgcccaaagattgatttgtgtgtttgtgtgtgtgtgtgtgtgtgtgtgtgtgtgtgtgagtggagttgaggtgtcagagaaaatgaattttttccagatttggggtataggtctcatctcttcaggttctcatgataccacctttactgtgcttatttttttaagaaaaaagtgttgatcaaccattcgacctataagaagccttaatttgcacagtgtgtgacttacagaaactgcatgaaaaatcatgggccagagcctcggccctagcattgcacttggcctcatgctggagggaggctgggcgggtacagcgcggaggaggagggaggccaggcgggcatggcgtggaggaggagggaggccgggcggtcacagcatggaggaggagggaggcgctgctggtgttcttattctggcggcagcgcctttcctgccatgtttagtgaatgacttttctcgcattgtagaattgtatatagactctggtgttctattgctgagaagcaaaccgccctgcagcatccctcagcctgtaccggtttggctggcttgtttgatttcaacatgagtgtattttttaaaattgatttttctcttcatttttttttcaatcaactttactgtaatataaagtattcaacaatttcaataaaagataaattattaaaa

SEQ ID NO: 655 - protein, 2491 aa, Homo sapiens
MGAAAGRSPHLGPAPARRPQRSLLLLQLLLLVAAPGSTQAQAAPFPELCSYTWEAVDTKNNVLYKINICGSVDIVQCGPSSAVCMHDLKTRTYHSVGDSVLRSATRSLLEFNTTVSCDQQGTNHRVQSSIAFLCGKTLGTPEFVTATECVHYFEWRTTAACKKDIFKANKEVPCYVFDEELRKHDLNPLIKLSGAYLVDDSDPDTSLFINVCRDIDTLRDPGSQLRACPPGTAACLVRGHQAFDVGQPRDGLKLVRKDRLVLSYVREEAGKLDFCDGHSPAVTITFVCPSERREGTIPKLTAKSNCRYEIEWITEYACHRDYLESKTCSLSGEQQDVSIDLTPLAQSGGSSYISDGKEYLFYLNVCGETEIQFCNKKQAAVCQVKKSDTSQVKAAGRYHNQTLRYSDGDLTLIYFGGDECSSGFQRMSVINFECNKTAGNDGKGTPVFTGEVDCTYFFTWDTEYACVKEKEDLLCGATDGKKRYDLSALVRHAEPEQNWEAVDGSQTETEKKHFFINICHRVLQEGKARGCPEDAAVCAVDKNGSKNLGKFISSPMKEKGNIQLSYSDGDDCGHGKKIKTNITLVCKPGDLESAPVLRTSGEGGCFYEFEWHTAAACVLSKTEGENCTVFDSQAGFSFDLSPLTKKNGAYKVETKKYDFYINVCGPVSVSPCQPDSGACQVAKSDEKTWNLGLSNAKLSYYDGMIQLNYRGGTPYNNERHTPRATLITFLCDRDAGVGFPEYQEEDNSTYNFRWYTSYACPEEPLECVVTDPSTLEQYDLSSLAKSEGGLGGNWYAMDNSGEHVTWRKYYINVCRPLNPVPGCNRYASACQMKYEKDQGSFTEVVSISNLGMAKTGPVVEDSGSLLLEYVNGSACTTSDGRQTTYTTRIHLVCSRGRLNSHPIFSLNWECVVSFLWNTEAACPIQTTTDTDQACSIRDPNSGFVFNLNPLNSSQGYNVSGIGKIFMFNVCGTMPVCGTILGKPASGCEAETQTEELKNWKPARPVGIEKSLQLSTEGFITLTYKGPLSAKGTADAFIVRFVCNDDVYSGPLKFLHQDIDSGQGIRNTYFEFETALACVPSPVDCQVTDLAGNEYDLTGLSTVRKPWTAVDTSVDGRKRTFYLSVCNPLPYIPGCQGSAVGSCLVSEGNSWNLGVVQMSPQAAANGSLSIMYVNGDKCGNQRFSTRITFECAQISGSPAFQLQDGCEYVFIWRTVEACPVVRVEGDNCEVKDPRHGNLYDLKPLGLNDTIVSAGEYTYYFRVCGKLSSDVCPTSDKSKVVSSCQEKREPQGFHKVAGLLTQKLTYENGLLKMNFTGGDTCHKVYQRSTAIFFYCDRGTQRPVFLKETSDCSYLFEWRTQYACPPFDLTECSFKDGAGNSFDLSSLSRYSDNWEAITGTGDPEHYLINVCKSLAPQAGTEPCPPEAAACLLGGSKPVNLGRVRDGPQWRDGIIVLKYVDGDLCPDGIRKKSTTIRFTCSESQVNSRPMFISAVEDCEYTFAWPTATACPMKSNEHDDCQVTNPSTGHLFDLSSLSGRAGFTAAYSEKGLVYMSICGENENCPPGVGACFGQTRISVGKANKRLRYVDQVLQLVYKDGSPCPSKSGLSYKSVISFVCRPEAGPTNRPMLISLDKQTCTLFFSWHTPLACEQATECSVRNGSSIVDLSPLIHRTGGYEAYDESEDDASDTNPDFYINICQPLNPMHGVPCPAGAAVCKVPIDGPPIDIGRVAGPPILNPIANEIYLNFESSTPCLADKHFNYTSLIAFHCKRGVSMGTPKLLRTSECDFVFEWETPVVCPDEVRMDGCTLTDEQLLYSFNLSSLSTSTFKVTRDSRTYSVGVCTFAVGPEQGGCKDGGVCLLSGTKGASFGRLQSMKLDYRHQDEAVVLSYVNGDRCPPETDDGVPCVFPFIFNGKSYEECIIESRAKLWCSTTADYDRDHEWGFCRHSNSYRTSSIIFKCDEDEDIGRPQVFSEVRGCDVTFEWKTKVVCPPKKLECKFVQKHKTYDLRLLSSLTGSWSLVHNGVSYYINLCQKIYKGPLGCSERASICRRTTTGDVQVLGLVHTQKLGVIGDKVVVTYSKGYPCGGNKTASSVIELTCTKTVGRPAFKRFDIDSCTYYFSWDSRAACAVKPQEVQMVNGTITNPINGKSFSLGDIYFKLFRASGDMRTNGDNYLYEIQLSSITSSRNPACSGANICQVKPNDQHFSRKVGTSDKTKYYLQDGDLDVVFASSSKCGKDKTKSVSSTIFFHCDPLVEDGIPEFSHETADCQYLFSWYTSAVCPLGVGFDSENPGDDGQMHKGLSERSQAVGAVLSLLLVALTCCLLALLLYKKERRETVISKLTTCCRRSSNVSYKYSKVNKEEETDENETEWLMEEIQLPPPRQGKEGQENGHITTKSVKALSSLHGDDQDSEDEVLTIPEVKVHSGRGAGAESSHPVRNAQSNALQEREDDRVGLVRGEKARKGKSSSAQQKTVSSTKLVSFHDDSDEDLLHI

SEQ ID NO: 656 - DNA, 1152 bp, Homo sapiens
atggctggcgttaataagaacgccggcccctcatttcagaactttctctggtttcctgatttggatatgaatgagatgacagtaataagaggccaccgagatcgcagactcattgaaacacgttctttagttgaagtggagaaaggcttggagaggcgccttctgaaagagcgtcggtcctcctcggcatcttgctcagtggagcactgttggctgggaggaaacatggccttcgatgttgcccacttggcagtttccaccattgttgactcacttaggctgatggcagctgcctctgctgggaaggaagcgtttttcccacaacatattaaatgcggcactggaggatggctggctggtccaggggccggatctggctctgttgctcacaatgattctgtttggcaagcgtttttaaaaagccttggtaagttccagatggtgaccacttgcctcatttatcctccatttgaaaaatttcaaaaactattcatttgtttgcataccaaggcagtacagaatcttctacagtggcacttcgatgttcctgtcaccatcctgttggaacggatgcctgcccaccatgatccgcagattctggacggagactcaggagaggaagccgagacaacgacgccacagtgcagaacggagcctccctcttccgggctgaagatctcagccattccggctgcatccaggagcggcccgggagcttccccaacagtgaacacagacccagggctcctacccaaatggggacgtgaacaagccgcttcccgcgagactggggagcccacggggtttcctcggcttcagcgcctggtggaggcctcagctcttcaggtgcctgtccccgcggctaccagggagtgcggcaccagaagcagcccaaccctcgctgtctttgctgccattactggtttcgcaggcttgtcctgggctaaccatgggcttccccaccctgctcaacagctgcccagggctgctgtgcaccgggccgccaccgcgccctgctcaccagagaacataccgccattacgagagacctcaccccactcaggagaagccgcgagccgctcaccagaggcctcaccccactcaccagagacctcatccagttcaccagaggccatccgcaccctttcatga

SEQ ID NO: 657 - protein, 383 aa, Homo sapiens
MAGVNKNAGPSFQNFLWFPDLDMNEMTVIRGHRDRRLIETRSLVEVEKGLERRLLKERRSSSASCSVEHCWLGGNMAFDVAHLAVSTIVDSLRLMAAASAGKEAFFPQHIKCGTGGWLAGPGAGSGSVAHNDSVWQAFLKSLGKFQMVTTCLIYPPFEKFQKLFICLHTKAVQNLLQWHFDVPVTILLERMPAHHDPQILDGDSGEEAETTTPQCRTEPPSSGLKISAIPAASRSGPGASPTVNTDPGLLPKWGREQAASRETGEPTGFPRLQRLVEASALQVPVPAATRECGTRSSPTLAVFAAITGFAGLSWANHGLPHPAQQLPRAAVHRAATAPCSPENIPPLRETSPHSGEAASRSPEASPHSPETSSSSPEAIRTLS

SEQ ID NO: 658 - DNA, 3481 bp, Homo sapiens
aaaggggcgtgggcgcgaggggcggcgggctagtaaccatagcggctcgcgtgggtcggctggcaagtaaccatagcggcgagcgtggggcggagtgtggctcggtagtcctctgcgtgccctcctgggagctgggtgctgtgagtcctcccctagcgggctggtctcggcgcggagtcggcgccgaacccgagctgctgctctggggcgtgtgcctagggcgcagggctggagcgcgggggctgcgcggttgctcgcggctccgctgaggtctctaggaaagggggcgatttgagggttccgccgtgaccgcttccaacggcggacacgcgcgctctggaccagagccgttgcccgctgtctcgtcacccgaagcctcctcctgacgccgtgctagtgcgagggtctccaggggaattcggggcacaagtcgggccggagcatccgggcggccgcttgagatcggcgctttgagaactgagcgcatgtggagttcggaggaaaagggctcagattgaagatggaaaatccccaagacattttctcaagtaatggtggctgtctaagtgatatagttatagaaaaatacctggttgaatccaaggagtctgtgtctcatgttcagcttgcttgcagcatgcaggactgtgctttccctttggatggaactgaactttgtatatggaacactaaggatccttctcatcagcttctaatcctacgaggacaccatcagccaattactgctatggcttttggaaataaagtgaacccacttctaatctgctcagcatcactggattatgttataatgtggaacctggatgaatgtagagagaaagtacttcaagggctggtccctcgagggactgtcatgggctcgcttttgggaaaggtgctgtgtttacagttgagcctggatgatcatgttgttgccgtgtgtgctggaaacaaaatattcatgctggatattgagcagcgattttctgtgacatacatagaacgtcctgatgttaataaccgccacaaagtcccaccaccgaccttcctgcacacattctctcagactcaggctgttcgggccgagctgcagggccacctgggcccggtgactgcggtggagttctgtccctggcgagcaggcaccctcatctcggcgtctgaggacagaggctttaaggtctgggaccattgtacaggatcattaatatacagttcatctgtgttatcagcatatcctcttctcagtttattcattgatgcagaaagcaggcagctggtcaccgggtgtgctgacggccagctttggatcttcagtttgatggatggacaccattatcgtcgtgtggcacgggttgacctaaggaagaagacagagactttctccacaagaagggttaagtctgggctgtgcagccagccagaagaaagccagcttccctctacaagtgctctgggaaaaggagagcaggttgaagtaacatttcctgtactgagacttgcaccctgtgatctctcactcatcccaaattctgcatgtggatgtctttcttctgagaacacccgatgtgtgtggatcggaagctcagtgggcttattcgtatttaacctggcaaacctggaagtggaagctgctttgtattacaaggatttccagagcctcagcatcctgctggccggatcgtgtgccctgaggaaccgcactgcggatcaaaaggtgctgtgcttgctggcctccctctttggcgggaagattgccgtgttggagatcaacccggccgcgctagtcagggctcagcagtgccccagcatggggcagagcctctcggtgccagccagctcctgtgtcctaccgacctctccactgtatctgggaattgccaaggagaagagtaccaaggctgctagtgaacagcgacgtgctgcacggaacgtcatgaaggaccaacgcctggttttccatagtaaagttaggtcatctggttatgcgtcagcaccacatgtaactatgttttcaccaaagaccaacatcaagagtgaggggaaaggatcttcaaggagcaggagcagctgcgcacgggaggcataccccgtggagtgcgctgtgcccaccaagcccggcccccaggtcgctgccgcccccacctgcacacgtgtatgctgcatccagtactcaggagatgggcagtggctggcctgtgggttggccaaccatctgttactcgtttttgatgccagcctgactgggacacctgctgtgttttcaggtcacgacggggcagtgaatgccgtgtgctggagccaggaccggaggtggctgctctctgcggcccgggacgggaccctgcgaatgtggtcggctcgtggggcagagctcgcactgcttctgggcaaagacatgttttctaaacctatacagtctgcacagttctattatatagatgcctttatattgttatcttctggccctgaatttcagctactgaggtatcacattgacacttgcaaagatgagattaagagatataaacagaagagcaagtccaagctgatttgcaggctctccacgacgggtgcagtagacatgaccagtttatcggcagtcaacgacttttattcccacatcgtactcgcagctggccggaacaggaccgtggaagtgtttgacctcaacgccggctgcagtgcagcggtgatagcggaagcccactcacggcctgtccatcaaatctgccaaaataaaggttcatcatttacaacccaacagcctcaggcttataaccttttcctgaccacggccattggcgatgggatgagactgtgggacctgagaaccctgaggtgtgagcgccactttgaagggcatccaacccgcggctatccatgtggaatcgctttcagtccttgtggacgattcgcggcttgtggggccgaggacagacacgcttacgtgtatgaaatgggctcaagcacgttttctcaccggctggctgggcacacagacactgtcactggagtggccttcaacccatcagcgccccagcttgccacagctaccttggatggtaaactccagctctttctagctgagtaaccactgacctgtgagctgggtccaggaatgctgtgaggaacaacttaaaagtaagaagtagtggttcatccatcagggggccagaagcagcaactgtttttcatattttgagacttgcctcagatttcccccgtttgcaagctcctcccctctgtgtgtgccatgtcagagttttatgtctttctgctcctcaaaagggatccccttcattgggaaaatggaaatggcgtccagtacttctgcacagaatttggtaaagttaaaacaaaatatctttcaataaaacataatatagtatttgtttgataattagagttggaagaaaaaagagagaatttcttttgggcagtgaaaataaagcagttaacagtcaaaaaaaaaaaaaaa

SEQ ID NO: 659 - protein, 857 aa, Homo sapiens
MENPQDIFSSNGGCLSDIVIEKYLVESKESVSHVQLACSMQDCAFPLDGTELCIWNTKDPSHQLLILRGHHQPITAMAFGNKVNPLLICSASLDYVIMWNLDECREKVLQGLVPRGTVMGSLLGKVLCLQLSLDDHVVAVCAGNKIFMLDIEQRFSVTYIERPDVNNRHKVPPPTFLHTFSQTQAVRAELQGHLGPVTAVEFCPWRAGTLISASEDRGFKVWDHCTGSLIYSSSVLSAYPLLSLFIDAESRQLVTGCADGQLWIFSLMDGHHYRRVARVDLRKKTETFSTRRVKSGLCSQPEESQLPSTSALGKGEQVEVTFPVLRLAPCDLSLIPNSACGCLSSENTRCVWIGSSVGLFVFNLANLEVEAALYYKDFQSLSILLAGSCALRNRTADQKVLCLLASLFGGKIAVLEINPAALVRAQQCPSMGQSLSVPASSCVLPTSPLYLGIAKEKSTKAASEQRRAARNVMKDQRLVFHSKVRSSGYASAPHVTMFSPKTNIKSEGKGSSRSRSSCAREAYPVECAVPTKPGPQVAAAPTCTRVCCIQYSGDGQWLACGLANHLLLVFDASLTGTPAVFSGHDGAVNAVCWSQDRRWLLSAARDGTLRMWSARGAELALLLGKDMFSKPIQSAQFYYIDAFILLSSGPEFQLLRYHIDTCKDEIKRYKQKSKSKLICRLSTTGAVDMTSLSAVNDFYSHIVLAAGRNRTVEVFDLNAGCSAAVIAEAHSRPVHQICQNKGSSFTTQQPQAYNLFLTTAIGDGMRLWDLRTLRCERHFEGHPTRGYPCGIAFSPCGRFAACGAEDRHAYVYEMGSSTFSHRLAGHTDTVTGVAFNPSAPQLATATLDGKLQLFLAE

SEQ ID NO: 660 - DNA, 3926 bp, Homo sapiens
atgacaaaccaggaaaaatgggcccacctcagcccttcggaattttcccaacttcagaaatatgctgagtattctacaaagaaattaaaggatgttcttgaagaattccatggtaatggtgtgcttgcaaagtataatcctgaagggaaacaagacattcttaaccaaacaatagattttgaaggtttcaaactattcatgaagacattcctggaagccgagcttcctgatgatttcactgcacaccttttcatgtcatttagcaacaagtttcctcattctagtccaatggtaaaaagtaagcctgctctcctatcaggcggtctgagaatgaataaaggtgccatcacccctccccgaactacttctcctgcaaatacgtgttccccagaagtaatccatctgaaggacattgtctgttacctgtctctgcttgaaagaggaagacctgaggataagcttgagtttatgtttcgcctttatgacacggatgggaatggcttcctggacagctcggagctagaaaatatcatcagtcagatgatgcatgttgcagaataccttgagtgggatgtcactgaacttaatccaatcctccatgaaatgatggaagaaattgactatgatcatgatggaaccgtgtctctggaggaatggattcaaggaggaatgacaacgattccacttcttgtgctcctgggcttagaaaataacgtgaaggatgatggacagcacgtgtggcgactgaagcactttaacaaacctgcctattgcaacctttgcctgaacatgctgattggcgtggggaagcagggcctctgctgttccttctgcaagtacacagtccatgagcgctgtgtggctcgagcacctccctcttgcatcaagacctatgtgaagtccaaaaggaacactgatgtcatgcaccattactgggttgaaggtaactgcccaaccaagtgtgataagtgccacaaaactgttaaatgttaccagggcctgacaggactgcattgtgtttggtgtcagatcacactgcataataaatgtgcttctcatctaaaacctgaatgtgactgtggacctttgaaggaccatattttaccacccacaacaatctgtccagtggtactgcagactctgcccacttcaggagtttcagttcctgaggaaagacaatcaacagtgaaaaaggaaaagagtggttcccagcagccaaacaaagtgattgacaagaataaaatgcaaagagccaactctgttactgtagatggacaaggcctgcaggtcactcctgtgcctggtactcacccacttttagtttttgtgaaccccaaaagtggtggaaaacaaggagaacgaatttacagaaaattccagtatctattaaatcctcgtcaggtttacagtctttctggaaatggaccaatgccagggttaaactttttccgtgatgttcctgacttcagagtgttagcctgtggtggagatggaaccgtgggctgggttttggattgcatagaaaaggccaatgtaggcaagcatcctccagttgcgattctgcctcttgggactggcaatgatctagcaagatgcctgcgatggggaggaggttacgaaggtgagaatctgatgaaaattctaaaagacattgaaaacagcacagaaatcatgttggacaggtggaagtttgaagtcatacctaatgacaaagatgagaaaggagacccagtgccttacagtatcatcaataattacttttccattggcgtggatgcctccattgcacacagattccacatcatgagagaaaaacacccagagaaattcaacagtagaatgaagaacaaattttggtattttgagtttggcacatctgaaactttctcagccacctgcaagaagctacatgaatctgtagaaatagaatgtgatggagtacagatagatttaataaacatctctctggaaggaattgctattttgaatataccaagcatgcatggaggatccaatctttggggagagtctaagaaaagacgaagccatcgacgaatagagaaaaaagggtctgacaaaaggaccaccgtcacagatgccaaagagttgaagtttgcaagtcaagatctcagtgaccagctgctggaggtggtcggcttggaaggagccatggagatggggcaaatatacacaggcctgaaaagtgctggccggcggctggctcagtgctcctgcgtggtcatcaggacgagcaagtctctgccaatgcaaattgatggggagccatggatgcagaccccatgcacaataaaaattacacacaagaaccaagccccaatgctgatgggcccgcctccaaaaaccggtttattctgctccctcgtcaaaaggacaagaaaccgaagcaaggaataatcctgtgttgtttcactcttagaaattgaattagcataattgggccatggaacacatatgctggaaatctttgaaccatttcaagtctcctgctcatgcaaaatcatggaagtggtttaacagtttttgttactaagctaatgtaaaattcagctattagaaaatttattgtctcagtttttataggcatctttgcatgaagaaagcagaagtttacctgaagtgatactgcatatttttggtgcatgcattcccatagatttttacatctcccacccaactcttccccaatttccttttactaacctgtgagaaaaacccgtgaaacatgaaaaaggaaataccatgggaaacgtgattctcagtgtgattccaattattacgaagcactaatcagtaacgctacaatgatcataattgcagattgctatacgtttcccttttagaatcagtgtatcagtgacctatgacttgaggagaaacttttaattcgaagattttattaaatagttgactacaataccttgctatatatacatagtttttcttcaacatcttaactcttctgagtggaaataaaaatatcaggcataaggttttctcatgctgaaaaatagaacgcggtttttattttgcttagttttctttttaattccagaaataagtgaaaacatgttacttgacagtcaagtgtggtaatatggcaagccttgttcctttctgcatgagaatctaggagagaattcataaccacaccaataacgaaatagaagttttaaactatgtgcctaatcaatgtgtttcccaccaaagattcagaaaacaatgcttgagagaaatgggttaatgcataattaattaagcattgtggagcaaatttagggttcctgtgattaattttgtgatgactaaaatgctggaaagcaagtgagttgcccattaattatgattaaaattctcacctttcacagacagacaataagccagacaacacaatcaaagctcaatagatgatttcttgcttttttcagtcatttataaatataggtgtaatttttcatggatcagttaagtacacttgaaggaagtaaatgattgtatcagtttatttctagtataaatgggtacctgtaataatactgagctcttggaagcgaatcatgcatgcaattagctccctcctcctcacctactccactcccatctttatgacatttcaaatgtttatttggaaacaacagcctagatcactgttgaaggtgttcatggcatagttggagtctctgactgtttaaagaaatcacagaacagtacttttcttttagtgtttcattaagcctatgatgtaaaatgaaatgcttctgagcagtcttgtaatattgttcattcatattgacctgcatctcatcattgcatgttttatgttttcaaacatgccataaggaaaacgagtgcctgaactgcatgatttattagtttctctccactctgcattaaagtgctaatgattt

SEQ ID NO: 661 - protein, 804 aa, Homo sapiens [sequence omitted]

SEQ ID NO: 662 - DNA, 3172 bp, Homo sapiens
atgacaaaccaggaaaaatgggcccacctcagcccttcggaattttcccaacttcagaaatatgctgagtattctacaaagaaattaaaggatgttcttgaagaattccatggtaatggtgtgcttgcaaagtataatcctgaagggaaacaagacattcttaaccaaacaatagattttgaaggtttcaaactattcatgaagacattcctggaagccgagcttcctgatgatttcactgcacaccttttcatgtcatttagcaacaagtttcctcattctagtccaatggtaaaaagtaagcctgctctcctatcaggcggtctgagaatgaataaaggtgccatcacccctccccgaactacttctcctgcaaatacgtgttccccagaagtaatccatctgaaggacattgtctgttacctgtctctgcttgaaagaggaagacctgaggataagcttgagtttatgtttcgcctttatgacacggatgggaatggcttcctggacagctcggagctagaaaatatcatcagtcagatgatgcatgttgcagaataccttgagtgggatgtcactgaacttaatccaatcctccatgaaatgatggaagaaattgactatgatcatgatggaaccgtgtctctggaggaatggattcaaggaggaatgacaacgattccacttcttgtgctcctgggcttagaaaataacgtgaaggatgatggacagcacgtgtggcgactgaagcactttaacaaacctgcctattgcaacctttgcctgaacatgctgattggcgtggggaagcagggcctctgctgttccttctgcaagtacacagtccatgagcgctgtgtggctcgagcacctccctcttgcatcaagacctatgtgaagtccaaaaggaacactgatgtcatgcaccattactgggttgaaggtaactgcccaaccaagtgtgataagtgccacaaaactgttaaatgttaccagggcctgacaggactgcattgtgtttggtgtcagatcacactgcataataaatgtgcttctcatctaaaacctgaatgtgactgtggacctttgaaggaccatattttaccacccacaacaatctgtccagtggtactgcagactctgcccacttcaggagtttcagttcctgaggaaagacaatcaacagtgaaaaaggaaaagagtggttcccagcagccaaacaaagtgattgacaagaataaaatgcaaagagccaactctgttactgtagatggacaaggcctgcaggtcactcctgtgcctggtactcacccacttttagtttttgtgaaccccaaaagtggtggaaaacaaggagaacgaatttacagaaaattccagtatctattaaatcctcgtcaggtttacagtctttctggaaatggaccaatgccagggttaaactttttccgtgatgttcctgacttcagagtgttagcctgtggtggagatggaaccgtgggctgggttttggattgcatagaaaaggccaatgtaggcaagcatcctccagttgcgattctgcctcttgggactggcaatgatctagcaagatgcctgcgatggggaggaggttacgaaggtgagaatctgatgaaaattctaaaagacattgaaaacagcacagaaatcatgttggacaggtggaagtttgaagtcatacctaatgacaaagatgagaaaggagacccagtgccttacagtatcatcaataattacttttccattggcgtggatgcctccattgcacacagattccacatcatgagagaaaaacacccagagaaattcaacagtagaatgaagaacaaattttggtattttgagtttggcacatctgaaactttctcagccacctgcaagaagctacatgaatctgtagaaatagaatgtgatggagtacagatagatttaataaacatctctctggaaggaattgctattttgaatataccaagcatgcatggaggatccaatctttggggagagtctaagaaaagacgaagccatcgacgaatagagaaaaaagggtctgacaaaaggaccaccgtcacagatgccaaagagttgaagtttgcaagtcaagatctcagtgaccagctgctggaggtggtcggcttggaaggagccatggagatggggcaaatatacacaggcctgaaaagtgctggccggcggctggctcagtgctcctgcgtggtcatcaggacgagcaagtctctgccaatgcaaattgatggggagccatggatgcagaccccatgcacagtgagtacagagtagttgatatgctatgtcaatctcagttttgctttcctctttgactaaataaccacaataactgatttttttctttatttcttttcaacctatcagcaaatagtctttttgttgttgttgttatgtgtgtgtcagagccactacatttaggctgtagacattatatacccttggcaatgatttagctcttgaatgtttgtgctagcctaagtataaatagatcttttaaatagatcaattataaaccatagatcaattataaactatggagctaaacaaaatattaataaaagtttatctgaaacttttttgtttatttcagagcacattattagaatattatttgcgagaaatgcagacctaagcttatatgtgaacttatttctcagcttttctatgcctccatttggggatttgagggctttcttctccataagaaaaaaatttctctccagtttctaccataattaattgtgttttccagaatgaggtattatttaaggcagacactgcccctctcaaaaaaaatcagttttcatttgcatagtgaatattttattgcatttcaaaaacatgctaggaactgcttttggcactgggagtagacacatgaacaagaccaacagtgtaatttccttcaagttacttacattcctataatagaggaccgaataaataaacaactacatgataaatataacttcagactgtgagagttattaaaaaataaggtgaaatgatgataagaagctggattaggtgtggagaataaatactacttgagataagggagacctctttgaaaggacatagccaaaagcttagtataaaattaaaaaaaataaaaaaaaaa

SEQ ID NO: 663 - protein, 773 aa, Homo sapiens
MTNQEKWAHLSPSEFSQLQKYAEYSTKKLKDVLEEFHGNGVLAKYNPEGKQDILNQTIDFEGFKLFMKTFLEAELPDDFTAHLFMSFSNKFPHSSPMVKSKPALLSGGLRMNKGAITPPRTTSPANTCSPEVIHLKDIVCYLSLLERGRPEDKLEFMFRLYDTDGNGFLDSSELENIISQMMHVAEYLEWDVTELNPILHEMMEEIDYDHDGTVSLEEWIQGGMTTIPLLVLLGLENNVKDDGQHVWRLKHFNKPAYCNLCLNMLIGVGKQGLCCSFCKYTVHERCVARAPPSCIKTYVKSKRNTDVMHHYWVEGNCPTKCDKCHKTVKCYQGLTGLHCVWCQITLHNKCASHLKPECDCGPLKDHILPPTTICPVVLQTLPTSGVSVPEERQSTVKKEKSGSQQPNKVIDKNKMQRANSVTVDGQGLQVTPVPGTHPLLVFVNPKSGGKQGERIYRKFQYLLNPRQVYSLSGNGPMPGLNFFRDVPDFRVLACGGDGTVGWVLDCIEKANVGKHPPVAILPLGTGNDLARCLRWGGGYEGENLMKILKDIENSTEIMLDRWKFEVIPNDKDEKGDPVPYSIINNYFSIGVDASIAHRFHIMREKHPEKFNSRMKNKFWYFEFGTSETFSATCKKLHESVEIECDGVQIDLINISLEGIAILNIPSMHGGSNLWGESKKRRSHRRIEKKGSDKRTTVTDAKELKFASQDLSDQLLEVVGLEGAMEMGQIYTGLKSAGRRLAQCSCVVIRTSKSLPMQIDGEPWMQTPCTVSTE

SEQ ID NO: 664 - DNA, 4238 bp, Homo sapiens
ggggaagagaggcacagacacagataggagaagggcaccggctggagccacttgcaggactgagggtttttgcaacaaaaccctagcagcctgaagaactctaagccagatggggtggctggacgagagcagctcttggctcagcaaagaatgcacagtatgatcagctcagtggatgtgaagtcagaagttcctgtgggcctggagcccatctcacctttagacctaaggacagacctcaggatgatgatgcccgtggtggaccctgttgtccgtgagaagcaattgcagcaggaattacttcttatccagcagcagcaacaaatccagaagcagcttctgatagcagagtttcagaaacagcatgagaacttgacacggcagcaccaggctcagcttcaggagcatatcaaggaacttctagccataaaacagcaacaagaactcctagaaaaggagcagaaactggagcagcagaggcaagaacaggaagtagagaggcatcgcagagaacagcagcttcctcctctcagaggcaaagatagaggacgagaaagggcagtggcaagtacagaagtaaagcagaagcttcaagagttcctactgagtaaatcagcaacgaaagacactccaactaatggaaaaaatcattccgtgagccgccatcccaagctctggtacacggctgcccaccacacatcattggatcaaagctctccaccccttagtggaacatctccatcctacaagtacacattaccaggagcacaagatgcaaaggatgatttcccccttcgaaaaactgcctctgagcccaacttgaaggtgcggtccaggttaaaacagaaagtggcagagaggagaagcagccccttactcaggcggaaggatggaaatgttgtcacttcattcaagaagcgaatgtttgaggtgacagaatcctcagtcagtagcagttctccaggctctggtcccagttcaccaaacaatgggccaactggaagtgttactgaaaatgagacttcggttttgccccctacccctcatgccgagcaaatggtttcacagcaacgcattctaattcatgaagattccatgaacctgctaagtctttatacctctccttctttgcccaacattaccttggggcttcccgcagtgccatcccagctcaatgcttcgaattcactcaaagaaaagcagaagtgtgagacgcagacgcttaggcaaggtgttcctctgcctgggcagtatggaggcagcatcccggcatcttccagccaccctcatgttactttagagggaaagccacccaacagcagccaccaggctctcctgcagcatttattattgaaagaacaaatgcgacagcaaaagcttcttgtagctggtggagttcccttacatcctcagtctcccttggcaacaaaagagagaatttcacctggcattagaggtacccacaaattgccccgtcacagacccctgaaccgaacccagtctgcacctttgcctcagagcacgttggctcagctggtcattcaacagcaacaccagcaattcttggagaagcagaagcaataccagcagcagatccacatgaacaaactgctttcgaaatctattgaacaactgaagcaaccaggcagtcaccttgaggaagcagaggaagagcttcagggggaccaggcgatgcaggaagacagagcgccctctagtggcaacagcactaggagcgacagcagtgcttgtgtggatgacacactgggacaagttggggctgtgaaggtcaaggaggaaccagtggacagtgatgaagatgctcagatccaggaaatggaatctggggagcaggctgcttttatgcaacaggtaataggcaaagatttagctccaggatttgtaattaaagtcattatctgaacatgaaatgcattgcaggtttggtaaatggatatgatttcctatcagtttatatttctctatgatttgagttcagtgtttaaggattctacctaatgcagatatatgtatatatctatatagaggtctttctatatactgatctctatatagatatcaatgtttcattgaaaatccactggtaaggaaatacctgttatactaaaattatgatacataatatctgagcagttaataggctttaaatttatcccaaagcctgctacaccaattacttctaaagaaaacaaattcactgttattttgagtttatgtgttgagatcagtgactgctggatagtctcccagtctgatcaatgaagcattcgattagtttttgattttttgcaacatctagaatttaattttcacatcactgtacataatgtatcatactatagtcttgaacactgttaaaggtagtctgccccttccttcctctctctttttttagttaagtagaaatgttctggtcaccatgccagtagtcctaggttattgtgtaggttgcaattgaacatattaggaatacaggtggttttaaatatatagatgcaaattgcagcactactttaaatattagattatgtctcacatagcactgctcattttacttttattttgtgtaatttgatgacactgtctatcaaaaaagagcaaatgaagcagatgcaaatgttagtgagaagtaatgtgcagcattatggtccaatcagatacaatattgtgtctacaattgcaaaaaacacagtaacaggatgaatattatctgatatcaagtcaaaatcagtttgaaaagaaggtgtatcatattttatattgtcactagaatctcttaagtataattccataatgacatgggcatataccgtaacattctggcaaataacaattagaaaagataggtttaacaaaaaaatttacttgtatataatgcaccttcaggaggactatgtcctttgatgctataaaatacaaacaactttgaaggcaacagaagacactgtttattcaagtcagttctttgtcaggttcctgctgttctcctacagaaaagtgattctgtgagggtgaacaggaaatgccttgtggaaacaggaagtccaagtgattcatgtactgaggaatgtaggaaaaaaaatctgaggatagtgctttactctttctgtttttaaagggcactctatgaattgatttattgtctaagaaaataacaccacaagtagggaaattgttacggaagcttttcactggaacatttccttcatattcccttttgatatgtttaccttgttttataggtttacttttgttaagctagttaaaggttcgttgtattaagacccctttaatatggataatccaaattgacctagaatctttgtgaggttttttctattaaaatatttatatttctaaatccgaggtatttcaaggtgtagtatcctatttcaaaggagatatagcagttttgccaaatgtagacattgttcaactgtatgttattggcacgtgttgtttacattttgctgtgacatttaaaaatatttctttaaaaatgttactgctaaagatacattatccttttttaaaaagtctccattcaaattaaattaacataactagaagttagaaagtttaaaagttttccacataatgaaagtccttctgataatttgacaaatagctataataggaacactccctatcaccaacatattttggttagtatattccttcatattaaaatgactttttgtcagttgttttgcattaaaaatatggcatgcctaagataaaattgtatattttttccatctcataaatattcattttcttcaaagtcttttttcaatctcataaaaaagggatagtgcatcttttaaaatacattttatttggggaggaacatgtggctgagcagacttttgtataatattacttcaaagatatgtaatcacaaacaaaaaaaactattttttataatgtcatttgagagagtttcatcagtacagttggtggacgttaattgtttgaatttgatagtctttgaatttaatcaagaaactacctggaaccagtgaaaaggaaagctggacttaaataatcttagaattaattgataaatgtctcttttaaaatctactgtatttattataatttacacccttgaaggtgatctcttgttttgtgttgtaaatatattgtttgtatgtttcccttcttgccttctgttataagtctcttcctttctcaaataaagttttttttaaaag

SEQ ID NO: 665 - protein, 590 aa, Homo sapiens
MHSMISSVDVKSEVPVGLEPISPLDLRTDLRMMMPVVDPVVREKQLQQELLLIQQQQQIQKQLLIAEFQKQHENLTRQHQAQLQEHIKELLAIKQQQELLEKEQKLEQQRQEQEVERHRREQQLPPLRGKDRGRERAVASTEVKQKLQEFLLSKSATKDTPTNGKNHSVSRHPKLWYTAAHHTSLDQSSPPLSGTSPSYKYTLPGAQDAKDDFPLRKTASEPNLKVRSRLKQKVAERRSSPLLRRKDGNVVTSFKKRMFEVTESSVSSSSPGSGPSSPNNGPTGSVTENETSVLPPTPHAEQMVSQQRILIHEDSMNLLSLYTSPSLPNITLGLPAVPSQLNASNSLKEKQKCETQTLRQGVPLPGQYGGSIPASSSHPHVTLEGKPPNSSHQALLQHLLLKEQMRQQKLLVAGGVPLHPQSPLATKERISPGIRGTHKLPRHRPLNRTQSAPLPQSTLAQLVIQQQHQQFLEKQKQYQQQIHMNKLLSKSIEQLKQPGSHLEEAEEELQGDQAMQEDRAPSSGNSTRSDSSACVDDTLGQVGAVKVKEEPVDSDEDAQIQEMESGEQAAFMQQVIGKDLAPGFVIKVII

SEQ ID NO: 666 - DNA, 3149 bp, Homo sapiens
atggggtggctggacgagagcagctcttggctcagcaaagaatgcacagtatgatcagctcagtggatgtgaagtcagaagttcctgtgggcctggagcccatctcacctttagacctaaggacagacctcaggatgatgatgcccgtggtggaccctgttgtccgtgagaagcaattgcagcaggaattacttcttatccagcagcagcaacaaatccagaagcagcttctgatagcagagtttcagaaacagcatgagaacttgacacggcagcaccaggctcagcttcaggagcatatcaaggaacttctagccataaaacagcaacaagaactcctagaaaaggagcagaaactggagcagcagaggcaagaacaggaagtagagaggcatcgcagagaacagcagcttcctcctctcagaggcaaagatagaggacgagaaagggcagtggcaagtacagaagtaaagcagaagcttcaagagttcctactgagtaaatcagcaacgaaagacactccaactaatggaaaaaatcattccgtgagccgccatcccaagctctggtacacggctgcccaccacacatcattggatcaaagctctccaccccttagtggaacatctccatcctacaagtacacattaccaggagcacaagatgcaaaggatgatttcccccttcgaaaaactgcctctgagcccaacttgaaggtgcggtccaggttaaaacagaaagtggcagagaggagaagcagccccttactcaggcggaaggatggaaatgttgtcacttcattcaagaagcgaatgtttgaggtgacagaatcctcagtcagtagcagttctccaggctctggtcccagttcaccaaacaatgggccaactggaagtgttactgaaaatgagacttcggttttgccccctacccctcatgccgagcaaatggtttcacagcaacgcattctaattcatgaagattccatgaacctgctaagtctttatacctctccttctttgcccaacattaccttggggcttcccgcagtgccatcccagctcaatgcttcgaattcactcaaagaaaagcagaagtgtgagacgcagacgcttaggcaaggtgttcctctgcctgggcagtatggaggcagcatcccggcatcttccagccaccctcatgttactttagagggaaagccacccaacagcagccaccaggctctcctgcagcatttattattgaaagaacaaatgcgacagcaaaagcttcttgtagctggtggagttcccttacatcctcagtctcccttggcaacaaaagagagaatttcacctggcattagaggtacccacaaattgccccgtcacagacccctgaaccgaacccagtctgcacctttgcctcagagcacgttggctcagctggtcattcaacagcaacaccagcaattcttggagaagcagaagcaataccagcagcagatccacatgaacaaactgctttcgaaatctattgaacaactgaagcaaccaggcagtcaccttgaggaagcagaggaagagcttcagggggaccaggcgatgcaggaagacagagcgccctctagtggcaacagcactaggagcgacagcagtgcttgtgtggatgacacactgggacaagttggggctgtgaaggtcaaggaggaaccagtggacagtgatgaagatgctcagatccaggaaatggaatctggggagcaggctgcttttatgcaacagcctttcctggaacccacgcacacacgtgcgctctctgtgcgccaagctccgctggctgcggttggcatggatggattagagaaacaccgtctcgtctccaggactcactcttcccctgctgcctctgttttacctcacccagcaatggaccgccccctccagcctggctctgcaactggaattgcctatgaccccttgatgctgaaacaccagtgcgtttgtggcaattccaccacccaccctgagcatgctggacgaatacagagtatctggtcacgactgcaagaaactgggctgctaaataaatgtgagcgaattcaaggtcgaaaagccagcctggaggaaatacagcttgttcattctgaacatcactcactgttgtatggcaccaaccccctggacggacagaagctggaccccaggatactcctaggtgatgactctcaaaagtttttttcctcattaccttgtggtggacttggggtggacagtgacaccatttggaatgagctacactcgtccggtgctgcacgcatggctgttggctgtgtcatcgagctggcttccaaagtggcctcaggagagctgaagaatgggtttgctgttgtgaggccccctggccatcacgctgaagaatccacagccatggggttctgcttttttaattcagttgcaattaccgccaaatacttgagagaccaactaaatataagcaagatattgattgtagatctggatgttcaccatggaaacggtacccagcaggccttttatgctgaccccagcatcctgtacatttcactccatcgctatgatgaagggaactttttccctggcagtggagccccaaatgaggttggaacaggccttggagaagggtacaatataaatattgcctggacaggtggccttgatcctcccatgggagatgttgagtaccttgaagcattcaggaccatcgtgaagcctgtggccaaagagtttgatccagacatggtcttagtatctgctggatttgatgcattggaaggccacacccctcctctaggagggtacaaagtgacggcaaaatgttttggtcatttgacgaagcaattgatgacattggctgatggacgtgtggtgttggctctagaaggaggacatgatctcacagccatctgtgatgcatcagaagcctgtgtaaatgcccttctaggaaatgagctggagccacttgcagaagatattctccaccaaagcccgaatatgaatgctgttatttctttacagaagatcattgaaattcaaagtatgtctttaaagttctcttaaaaattctaagcaggtaaaactaactaaaattatattgaaaattatagtacaaagaaacatttaaaaaaaaaa

SEQ ID NO: 667 - protein, 1011 aa, Homo sapiens
MHSMISSVDVKSEVPVGLEPISPLDLRTDLRMMMPVVDPVVREKQLQQELLLIQQQQQIQKQLLIAEFQKQHENLTRQHQAQLQEHIKELLAIKQQQELLEKEQKLEQQRQEQEVERHRREQQLPPLRGKDRGRERAVASTEVKQKLQEFLLSKSATKDTPTNGKNHSVSRHPKLWYTAAHHTSLDQSSPPLSGTSPSYKYTLPGAQDAKDDFPLRKTASEPNLKVRSRLKQKVAERRSSPLLRRKDGNVVTSFKKRMFEVTESSVSSSSPGSGPSSPNNGPTGSVTENETSVLPPTPHAEQMVSQQRILIHEDSMNLLSLYTSPSLPNITLGLPAVPSQLNASNSLKEKQKCETQTLRQGVPLPGQYGGSIPASSSHPHVTLEGKPPNSSHQALLQHLLLKEQMRQQKLLVAGGVPLHPQSPLATKERISPGIRGTHKLPRHRPLNRTQSAPLPQSTLAQLVIQQQHQQFLEKQKQYQQQIHMNKLLSKSIEQLKQPGSHLEEAEEELQGDQAMQEDRAPSSGNSTRSDSSACVDDTLGQVGAVKVKEEPVDSDEDAQIQEMESGEQAAFMQQPFLEPTHTRALSVRQAPLAAVGMDGLEKHRLVSRTHSSPAASVLPHPAMDRPLQPGSATGIAYDPLMLKHQCVCGNSTTHPEHAGRIQSIWSRLQETGLLNKCERIQGRKASLEEIQLVHSEHHSLLYGTNPLDGQKLDPRILLGDDSQKFFSSLPCGGLGVDSDTIWNELHSSGAARMAVGCVIELASKVASGELKNGFAVVRPPGHHAEESTAMGFCFFNSVAITAKYLRDQLNISKILIVDLDVHHGNGTQQAFYADPSILYISLHRYDEGNFFPGSGAPNEVGTGLGEGYNINIAWTGGLDPPMGDVEYLEAFRTIVKPVAKEFDPDMVLVSAGFDALEGHTPPLGGYKVTAKCFGHLTKQLMTLADGRVVLALEGGHDLTAICDASEACVNALLGNELEPLAEDILHQSPNMNAVISLQKIIEIQSMSLKFS

SEQ ID NO: 668 - DNA, 2681 bp, Homo sapiens
atggggtggctggacgagagcagctcttggctcagcaaagaatgcacagtatgatcagctcagtggatgtgaagtcagaagttcctgtgggcctggagcccatctcacctttagacctaaggacagacctcaggatgatgatgcccgtggtggaccctgttgtccgtgagaagcaattgcagcaggaattacttcttatccagcagcagcaacaaatccagaagcagcttctgatagcagagtttcagaaacagcatgagaacttgacacggcagcaccaggctcagcttcaggagcatatcaaggaacttctagccataaaacagcaacaagaactcctagaaaaggagcagaaactggagcagcagaggcaagaacaggaagtagagaggcatcgcagagaacagcagcttcctcctctcagaggcaaagatagaggacgagaaagggcagtggcaagtacagaagtaaagcagaagcttcaagagttcctactgagtaaatcagcaacgaaagacactccaactaatggaaaaaatcattccgtgagccgccatcccaagctctggtacacggctgcccaccacacatcattggatcaaagctctccaccccttagtggaacatctccatcctacaagtacacattaccaggagcacaagatgcaaaggatgatttcccccttcgaaaaactgcctctgagcccaacttgaaggtgcggtccaggttaaaacagaaagtggcagagaggagaagcagccccttactcaggcggaaggatggaaatgttgtcacttcattcaagaagcgaatgtttgaggtgacagaatcctcagtcagtagcagttctccaggctctggtcccagttcaccaaacaatgggccaactggaagtgttactgaaaatgagacttcggttttgccccctacccctcatgccgagcaaatggtttcacagcaacgcattctaattcatgaagattccatgaacctgctaagtctttatacctctccttctttgcccaacattaccttggggcttcccgcagtgccatcccagctcaatgcttcgaattcactcaaagaaaagcagaagtgtgagacgcagacgcttaggcaaggtgttcctctgcctgggcagtatggaggcagcatcccggcatcttccagccaccctcatgttactttagagggaaagccacccaacagcagccaccaggctctcctgcagcatttattattgaaagaacaaatgcgacagcaaaagcttcttgtagctggtggagttcccttacatcctcagtctcccttggcaacaaaagagagaatttcacctggcattagaggtacccacaaattgccccgtcacagacccctgaaccgaacccagtctgcacctttgcctcagagcacgttggctcagctggtcattcaacagcaacaccagcaattcttggagaagcagaagcaataccagcagcagatccacatgaacaaactgctttcgaaatctattgaacaactgaagcaaccaggcagtcaccttgaggaagcagaggaagagcttcagggggaccaggcgatgcaggaagacagagcgccctctagtggcaacagcactaggagcgacagcagtgcttgtgtggatgacacactgggacaagttggggctgtgaaggtcaaggaggaaccagtggacagtgatgaagatgctcagatccaggaaatggaatctggggagcaggctgcttttatgcaacagcctttcctggaacccacgcacacacgtgcgctctctgtgcgccaagctccgctggctgcggttggcatggatggattagagaaacaccgtctcgtctccaggactcactcttcccctgctgcctctgttttacctcacccagcaatggaccgccccctccagcctggctctgcaactggaattgcctatgaccccttgatgctgaaacaccagtgcgtttgtggcaattccaccacccaccctgagcatgctggacgaatacagagtatctggtcacgactgcaagaaactgggctgctaaataaatgtgagcgaattcaaggtcgaaaagccagcctggaggaaatacagcttgttcattctgaacatcactcactgttgtatggcaccaaccccctggacggacagaagctggaccccaggatactcctaggtgatgactctcaaaagtttttttcctcattaccttgtggtggacttggggtggacagtgacaccatttggaatgagctacactcgtccggtgctgcacgcatggctgttggctgtgtcatcgagctggcttccaaagtggcctcaggagagctgaagaatgggtttgctgttgtgaggccccctggccatcacgctgaagaatccacagccatggggttctgcttttttaattcagttgcaattaccgccaaatacttgagagaccaactaaatataagcaagatattgattgtagatctggatgttcaccatggaaacggtacccagcaggccttttatgctgaccccagcatcctgtacatttcactccatcgctatgatgaagggaactttttccctggcagtggagccccaaatgaggttcggtttatttctttagagccccacttttatttgtatctttcaggtaattgcattgcatga

SEQ ID NO: 669 - protein, 879 aa, Homo sapiens
MHSMISSVDVKSEVPVGLEPISPLDLRTDLRMMMPVVDPVVREKQLQQELLLIQQQQQIQKQLLIAEFQKQHENLTRQHQAQLQEHIKELLAIKQQQELLEKEQKLEQQRQEQEVERHRREQQLPPLRGKDRGRERAVASTEVKQKLQEFLLSKSATKDTPTNGKNHSVSRHPKLWYTAAHHTSLDQSSPPLSGTSPSYKYTLPGAQDAKDDFPLRKTASEPNLKVRSRLKQKVAERRSSPLLRRKDGNVVTSFKKRMFEVTESSVSSSSPGSGPSSPNNGPTGSVTENETSVLPPTPHAEQMVSQQRILIHEDSMNLLSLYTSPSLPNITLGLPAVPSQLNASNSLKEKQKCETQTLRQGVPLPGQYGGSIPASSSHPHVTLEGKPPNSSHQALLQHLLLKEQMRQQKLLVAGGVPLHPQSPLATKERISPGIRGTHKLPRHRPLNRTQSAPLPQSTLAQLVIQQQHQQFLEKQKQYQQQIHMNKLLSKSIEQLKQPGSHLEEAEEELQGDQAMQEDRAPSSGNSTRSDSSACVDDTLGQVGAVKVKEEPVDSDEDAQIQEMESGEQAAFMQQPFLEPTHTRALSVRQAPLAAVGMDGLEKHRLVSRTHSSPAASVLPHPAMDRPLQPGSATGIAYDPLMLKHQCVCGNSTTHPEHAGRIQSIWSRLQETGLLNKCERIQGRKASLEEIQLVHSEHHSLLYGTNPLDGQKLDPRILLGDDSQKFFSSLPCGGLGVDSDTIWNELHSSGAARMAVGCVIELASKVASGELKNGFAVVRPPGHHAEESTAMGFCFFNSVAITAKYLRDQLNISKILIVDLDVHHGNGTQQAFYADPSILYISLHRYDEGNFFPGSGAPNEVRFISLEPHFYLYLSGNCIA

SEQ ID NO: 670 - DNA, 4659 bp, Homo sapiens
ggggaagagaggcacagacacagataggagaagggcaccggctggagccacttgcaggactgagggtttttgcaacaaaaccctagcagcctgaagaactctaagccagatggggtggctggacgagagcagctcttggctcagcaaagaatgcacagtatgatcagctcagtggatgtgaagtcagaagttcctgtgggcctggagcccatctcacctttagacctaaggacagacctcaggatgatgatgcccgtggtggaccctgttgtccgtgagaagcaattgcagcaggaattacttcttatccagcagcagcaacaaatccagaagcagcttctgatagcagagtttcagaaacagcatgagaacttgacacggcagcaccaggctcagcttcaggagcatatcaaggaacttctagccataaaacagcaacaagaactcctagaaaaggagcagaaactggagcagcagaggcaagaacaggaagtagagaggcatcgcagagaacagcagcttcctcctctcagaggcaaagatagaggacgagaaagggcagtggcaagtacagaagtaaagcagaagcttcaagagttcctactgagtaaatcagcaacgaaagacactccaactaatggaaaaaatcattccgtgagccgccatcccaagctctggtacacggctgcccaccacacatcattggatcaaagctctccaccccttagtggaacatctccatcctacaagtacacattaccaggagcacaagatgcaaaggatgatttcccccttcgaaaaactgcctctgagcccaacttgaaggtgcggtccaggttaaaacagaaagtggcagagaggagaagcagccccttactcaggcggaaggatggaaatgttgtcacttcattcaagaagcgaatgtttgaggtgacagaatcctcagtcagtagcagttctccaggctctggtcccagttcaccaaacaatgggccaactggaagtgttactgaaaatgagacttcggttttgccccctacccctcatgccgagcaaatggtttcacagcaacgcattctaattcatgaagattccatgaacctgctaagtctttatacctctccttctttgcccaacattaccttggggcttcccgcagtgccatcccagctcaatgcttcgaattcactcaaagaaaagcagaagtgtgagacgcagacgcttaggcaaggtgttcctctgcctgggcagtatggaggcagcatcccggcatcttccagccaccctcatgttactttagagggaaagccacccaacagcagccaccaggctctcctgcagcatttattattgaaagaacaaatgcgacagcaaaagcttcttgtagctggtggagttcccttacatcctcagtctcccttggcaacaaaagagagaatttcacctggcattagaggtacccacaaattgccccgtcacagacccctgaaccgaacccagtctgcacctttgcctcagagcacgttggctcagctggtcattcaacagcaacaccagcaattcttggagaagcagaagcaataccagcagcagatccacatgaacaaactgctttcgaaatctattgaacaactgaagcaaccaggcagtcaccttgaggaagcagaggaagagcttcagggggaccaggcgatgcaggaagacagagcgccctctagtggcaacagcactaggagcgacagcagtgcttgtgtggatgacacactgggacaagttggggctgtgaaggtcaaggaggaaccagtggacagtgatgaagatgctcagatccaggaaatggaatctggggagcaggctgcttttatgcaacagcctttcctggaacccacgcacacacgtgcgctctctgtgcgccaagctccgctggctgcggttggcatggatggattagagaaacaccgtctcgtctccaggactcactcttcccctgctgcctctgttttacctcacccagcaatggaccgccccctccagcctggctctgcaactggaattgcctatgaccccttgatgctgaaacaccagtgcgtttgtggcaattccaccacccaccctgagcatgctggacgaatacagagtatctggtcacgactgcaagaaactgggctgctaaataaatgtgagcgaattcaaggtcgaaaagccagcctggaggaaatacagcttgttcattctgaacatcactcactgttgtatggcaccaaccccctggacggacagaagctggaccccaggatactcctaggtgatgactctcaaaagtttttttcctcattaccttgtggtggacttggggtggacagtgacaccatttggaatgagctacactcgtccggtgctgcacgcatggctgttggctgtgtcatcgagctggcttccaaagtggcctcaggagagctgaagaatgggtttgctgttgtgaggccccctggccatcacgctgaagaatccacagccatggggttctgcttttttaattcagttgcaattaccgccaaatacttgagagaccaactaaatataagcaagatattgattgtagatctggatgttcaccatggaaacggtacccagcaggccttttatgctgaccccagcatcctgtacatttcactccatcgctatgatgaagggaactttttccctggcagtggagccccaaatgaggttggaacaggccttggagaagggtacaatataaatattgcctggacaggtggccttgatcctcccatgggagatgttgagtaccttgaagcattcaggaccatcgtgaagcctgtggccaaagagtttgatccagacatggtcttagtatctgctggatttgatgcattggaaggccacacccctcctctaggagggtacaaagtgacggcaaaatgttttggtcatttgacgaagcaattgatgacattggctgatggacgtgtggtgttggctctagaaggaggacatgatctcacagccatctgtgatgcatcagaagcctgtgtaaatgcccttctaggaaatgagctggagccacttgcagaagatattctccaccaaagcccgaatatgaatgctgttatttctttacagaagatcattgaaattcaaagcaagtattggaagtcagtaaggatggtggctgtgccaaggggctgtgctctggctggtgctcagttgcaagaggagacagagaccgtttctgccctggcctccctaacagtggatgtggaacagccctttgctcaggaagacagcagaactgctggtgagcctatggaagaggagccagccttgtgaagtgccaagtccccctctgatatttcctgtgtgtgacatcattgtgtatccccccaccccagtaccctcagacatgtcttgtctgctgcctgggtggcacagattcaatggaacataaacactgggcacaaaattctgaacagcagcttcacttgttctttggatggacttgaaagggcattaaagattccttaaacgtaaccgctgtgattctagagttacagtaaaccacgattggaagaaactgcttccagcatgcttttaatatgctgggtgacccactcctagacaccaagtttgaactagaaacattcagtacagcactagatattgttaatttcagaagctatgacagccagtgaaattttgggcaaaacctgagacatagtcattcctgacattctgatcagctttttttggggtaatttgtttttcaaacagtcttaacttgtttacaagatttgcttttagctatgaacggatcgtaattccacccagaatgtaatgtttcttgtttgtttgttttgttttgttagggtttttttctcaactttaacacacagttcaactgttcctagtaaaagttcaagatggaggaactagcatgaggcttttttcagtatctcgaagtccaaatgccaaaggaacctcacacactgtttgtaatggtgcaatattttatatcacttttttttaaacatccccaacatctttgtgttctcacacacaggcaatttgcaatgttgcaattgtgttggagaatgaagtccccccacctcccagccacacacacatcctttgttctcatgacagtaggtctgagcaaatgttccaccaagcattttcagtgtctttgaaaagcacgtaacttttcaaaggtggtcttaatttgttgcatatctatcaaggacttattcactcacctttccttttctgccctctatcaattgatttcttcttacctttcatcattcattccttcctttagaaaaactgaagattacccataatctcctcttattacttgagggccttgactatttagtttattttgtttactttacaggttaacacagttgttttgtctgattgcattttattaactgtgaagccgttgaaatgaatatcacttaagcaacgttgctaaatttctatgtgtttgaaatgtgttaatgaaggcactgcttatttgtagtcaccttgaactgacttaacctagaagctgtgccttcttgtgaaaaaaaaaaaaaacaaaaacaaaaaacagcctttaaacaagtttccttagtgtcaaaagttaaaaataaa

SEQ ID NO: 671 - protein, 1066 aa, Homo sapiens
MHSMISSVDVKSEVPVGLEPISPLDLRTDLRMMMPVVDPVVREKQLQQELLLIQQQQQIQKQLLIAEFQKQHENLTRQHQAQLQEHIKELLAIKQQQELLEKEQKLEQQRQEQEVERHRREQQLPPLRGKDRGRERAVASTEVKQKLQEFLLSKSATKDTPTNGKNHSVSRHPKLWYTAAHHTSLDQSSPPLSGTSPSYKYTLPGAQDAKDDFPLRKTASEPNLKVRSRLKQKVAERRSSPLLRRKDGNVVTSFKKRMFEVTESSVSSSSPGSGPSSPNNGPTGSVTENETSVLPPTPHAEQMVSQQRILIHEDSMNLLSLYTSPSLPNITLGLPAVPSQLNASNSLKEKQKCETQTLRQGVPLPGQYGGSIPASSSHPHVTLEGKPPNSSHQALLQHLLLKEQMRQQKLLVAGGVPLHPQSPLATKERISPGIRGTHKLPRHRPLNRTQSAPLPQSTLAQLVIQQQHQQFLEKQKQYQQQIHMNKLLSKSIEQLKQPGSHLEEAEEELQGDQAMQEDRAPSSGNSTRSDSSACVDDTLGQVGAVKVKEEPVDSDEDAQIQEMESGEQAAFMQQPFLEPTHTRALSVRQAPLAAVGMDGLEKHRLVSRTHSSPAASVLPHPAMDRPLQPGSATGIAYDPLMLKHQCVCGNSTTHPEHAGRIQSIWSRLQETGLLNKCERIQGRKASLEEIQLVHSEHHSLLYGTNPLDGQKLDPRILLGDDSQKFFSSLPCGGLGVDSDTIWNELHSSGAARMAVGCVIELASKVASGELKNGFAVVRPPGHHAEESTAMGFCFFNSVAITAKYLRDQLNISKILIVDLDVHHGNGTQQAFYADPSILYISLHRYDEGNFFPGSGAPNEVGTGLGEGYNINIAWTGGLDPPMGDVEYLEAFRTIVKPVAKEFDPDMVLVSAGFDALEGHTPPLGGYKVTAKCFGHLTKQLMTLADGRVVLALEGGHDLTAICDASEACVNALLGNELEPLAEDILHQSPNMNAVISLQKIIEIQSKYWKSVRMVAVPRGCALAGAQLQEETETVSALASLTVDVEQPFAQEDSRTAGEPMEEEPAL

SEQ ID NO: 672 - DNA, 4559 bp, Homo sapiens
atggggtggctggacgagagcagctcttggctcagcaaagaatgcacagtatgatcagctcagtggatgtgaagtcagaagttcctgtgggcctggagcccatctcacctttagacctaaggacagacctcaggatgatgatgcccgtggtggaccctgttgtccgtgagaagcaattgcagcaggaattacttcttatccagcagcagcaacaaatccagaagcagcttctgatagcagagtttcagaaacagcatgagaacttgacacggcagcaccaggctcagcttcaggagcatatcaagttgcaacaggaacttctagccataaaacagcaacaagaactcctagaaaaggagcagaaactggagcagcagaggcaagaacaggaagtagagaggcatcgcagagaacagcagcttcctcctctcagaggcaaagatagaggacgagaaagggcagtggcaagtacagaagtaaagcagaagcttcaagagttcctactgagtaaatcagcaacgaaagacactccaactaatggaaaaaatcattccgtgagccgccatcccaagctctggtacacggctgcccaccacacatcattggatcaaagctctccaccccttagtggaacatctccatcctacaagtacacattaccaggagcacaagatgcaaaggatgatttcccccttcgaaaaactgcctctgagcccaacttgaaggtgcggtccaggttaaaacagaaagtggcagagaggagaagcagccccttactcaggcggaaggatggaaatgttgtcacttcattcaagaagcgaatgtttgaggtgacagaatcctcagtcagtagcagttctccaggctctggtcccagttcaccaaacaatgggccaactggaagtgttactgaaaatgagacttcggttttgccccctacccctcatgccgagcaaatggtttcacagcaacgcattctaattcatgaagattccatgaacctgctaagtctttatacctctccttctttgcccaacattaccttggggcttcccgcagtgccatcccagctcaatgcttcgaattcactcaaagaaaagcagaagtgtgagacgcagacgcttaggcaaggtgttcctctgcctgggcagtatggaggcagcatcccggcatcttccagccaccctcatgttactttagagggaaagccacccaacagcagccaccaggctctcctgcagcatttattattgaaagaacaaatgcgacagcaaaagcttcttgtagctggtggagttcccttacatcctcagtctcccttggcaacaaaagagagaatttcacctggcattagaggtacccacaaattgccccgtcacagacccctgaaccgaacccagtctgcacctttgcctcagagcacgttggctcagctggtcattcaacagcaacaccagcaattcttggagaagcagaagcaataccagcagcagatccacatgaacaaactgctttcgaaatctattgaacaactgaagcaaccaggcagtcaccttgaggaagcagaggaagagcttcagggggaccaggcgatgcaggaagacagagcgccctctagtggcaacagcactaggagcgacagcagtgcttgtgtggatgacacactgggacaagttggggctgtgaaggtcaaggaggaaccagtggacagtgatgaagatgctcagatccaggaaatggaatctggggagcaggctgcttttatgcaacagcctttcctggaacccacgcacacacgtgcgctctctgtgcgccaagctccgctggctgcggttggcatggatggattagagaaacaccgtctcgtctccaggactcactcttcccctgctgcctctgttttacctcacccagcaatggaccgccccctccagcctggctctgcaactggaattgcctatgaccccttgatgctgaaacaccagtgcgtttgtggcaattccaccacccaccctgagcatgctggacgaatacagagtatctggtcacgactgcaagaaactgggctgctaaataaatgtgagcgaattcaaggtcgaaaagccagcctggaggaaatacagcttgttcattctgaacatcactcactgttgtatggcaccaaccccctggacggacagaagctggaccccaggatactcctaggtgatgactctcaaaagtttttttcctcattaccttgtggtggacttggggtggacagtgacaccatttggaatgagctacactcgtccggtgctgcacgcatggctgttggctgtgtcatcgagctggcttccaaagtggcctcaggagagctgaagaatgggtttgctgttgtgaggccccctggccatcacgctgaagaatccacagccatggggttctgcttttttaattcagttgcaattaccgccaaatacttgagagaccaactaaatataagcaagatattgattgtagatctggatgttcaccatggaaacggtacccagcaggccttttatgctgaccccagcatcctgtacatttcactccatcgctatgatgaagggaactttttccctggcagtggagccccaaatgaggttggaacaggccttggagaagggtacaatataaatattgcctggacaggtggccttgatcctcccatgggagatgttgagtaccttgaagcattcaggaccatcgtgaagcctgtggccaaagagtttgatccagacatggtcttagtatctgctggatttgatgcattggaaggccacacccctcctctaggagggtacaaagtgacggcaaaatgttttggtcatttgacgaagcaattgatgacattggctgatggacgtgtggtgttggctctagaaggaggacatgatctcacagccatctgtgatgcatcagaagcctgtgtaaatgcccttctaggaaatgagctggagccacttgcagaagatattctccaccaaagcccgaatatgaatgctgttatttctttacagaagatcattgaaattcaaagcaagtattggaagtcagtaaggatggtggctgtgccaaggggctgtgctctggctggtgctcagttgcaagaggagacagagaccgtttctgccctggcctccctaacagtggatgtggaacagccctttgctcaggaagacagcagaactgctggtgagcctatggaagaggagccagccttgtgaagtgccaagtccccctctgatatttcctgtgtgtgacatcattgtgtatccccccaccccagtaccctcagacatgtcttgtctgctgcctgggtggcacagattcaatggaacataaacactgggcacaaaattctgaacagcagcttcacttgttctttggatggacttgaaagggcattaaagattccttaaacgtaaccgctgtgattctagagttacagtaaaccacgattggaagaaactgcttccagcatgcttttaatatgctgggtgacccactcctagacaccaagtttgaactagaaacattcagtacagcactagatattgttaatttcagaagctatgacagccagtgaaattttgggcaaaacctgagacatagtcattcctgacattctgatcagctttttttggggtaatttgtttttcaaacagtcttaacttgtttacaagatttgcttttagctatgaacggatcgtaattccacccagaatgtaatgtttcttgtttgtttgttttgttttgttagggtttttttctcaactttaacacacagttcaactgttcctagtaaaagttcaagatggaggaactagcatgaggcttttttcagtatctcgaagtccaaatgccaaaggaacctcacacactgtttgtaatggtgcaatattttatatcacttttttttaaacatccccaacatctttgtgttctcacacacaggcaatttgcaatgttgcaattgtgttggagaatgaagtccccccacctcccagccacacacacatcctttgttctcatgacagtaggtctgagcaaatgttccaccaagcattttcagtgtctttgaaaagcacgtaacttttcaaaggtggtcttaatttgttgcatatctatcaaggacttattcactcacctttccttttctgccctctatcaattgatttcttcttacctttcatcattcattccttcctttagaaaaactgaagattacccataatctcctcttattacttgagggccttgactatttagtttattttgtttactttacaggttaacacagttgttttgtctgattgcattttattaactgtgaagccgttgaaatgaatatcacttaagcaacgttgctaaatttctatgtgtttgaaatgtgttaatgaaggcactgcttatttgtagtcaccttgaactgacttaacctagaagctgtgccttcttgtgaaaaaaaaaaaaaacaaaaacaaaaaacagcctttaaacaagtttccttagtgtcaaaagttaaaaataaa

SEQ ID NO: 673 - protein, 1069 aa, Homo sapiens
MHSMISSVDVKSEVPVGLEPISPLDLRTDLRMMMPVVDPVVREKQLQQELLLIQQQQQIQKQLLIAEFQKQHENLTRQHQAQLQEHIKLQQELLAIKQQQELLEKEQKLEQQRQEQEVERHRREQQLPPLRGKDRGRERAVASTEVKQKLQEFLLSKSATKDTPTNGKNHSVSRHPKLWYTAAHHTSLDQSSPPLSGTSPSYKYTLPGAQDAKDDFPLRKTASEPNLKVRSRLKQKVAERRSSPLLRRKDGNVVTSFKKRMFEVTESSVSSSSPGSGPSSPNNGPTGSVTENETSVLPPTPHAEQMVSQQRILIHEDSMNLLSLYTSPSLPNITLGLPAVPSQLNASNSLKEKQKCETQTLRQGVPLPGQYGGSIPASSSHPHVTLEGKPPNSSHQALLQHLLLKEQMRQQKLLVAGGVPLHPQSPLATKERISPGIRGTHKLPRHRPLNRTQSAPLPQSTLAQLVIQQQHQQFLEKQKQYQQQIHMNKLLSKSIEQLKQPGSHLEEAEEELQGDQAMQEDRAPSSGNSTRSDSSACVDDTLGQVGAVKVKEEPVDSDEDAQIQEMESGEQAAFMQQPFLEPTHTRALSVRQAPLAAVGMDGLEKHRLVSRTHSSPAASVLPHPAMDRPLQPGSATGIAYDPLMLKHQCVCGNSTTHPEHAGRIQSIWSRLQETGLLNKCERIQGRKASLEEIQLVHSEHHSLLYGTNPLDGQKLDPRILLGDDSQKFFSSLPCGGLGVDSDTIWNELHSSGAARMAVGCVIELASKVASGELKNGFAVVRPPGHHAEESTAMGFCFFNSVAITAKYLRDQLNISKILIVDLDVHHGNGTQQAFYADPSILYISLHRYDEGNFFPGSGAPNEVGTGLGEGYNINIAWTGGLDPPMGDVEYLEAFRTIVKPVAKEFDPDMVLVSAGFDALEGHTPPLGGYKVTAKCFGHLTKQLMTLADGRVVLALEGGHDLTAICDASEACVNALLGNELEPLAEDILHQSPNMNAVISLQKIIEIQSKYWKSVRMVAVPRGCALAGAQLQEETETVSALASLTVDVEQPFAQEDSRTAGEPMEEEPAL

SEQ ID NO: 674 - DNA, 3768 bp, Homo sapiens
gagaggctggcggcagtggtggctctcccggctgggttgtcagtcagtgagaggagggggaagatggctcaccgggacccgttctgctaggaagaaggggagcaggtggtgctgctactcgggaggaagcagagcagcctccgtcgctgtcgctgagagcctcacgagtcgaggtcctgcaggtggagctccggcagccgccctggttgaaggtttagaacagatgtggaaaaatgtttacttcagagaaaggggttgtggaggaatggttgtcagagtttaagacattaccagaaacatctttaccaaattatgccacaaatttgaaagacaagagttctttagtttcatctctctataaagttatccaggagccacaaagtgagttgctagaacctgtctgtcaccagctctttgaattctatcgcagtggagaggagcagttgcttcaatttacgctgcaatttctcccagaactaatttggtgctaccttgcagtctcagccagcagaaatgtgcatagcagtggatgcattgaagctcttcttctaggggtttacaatttggaaatagttgacaaacagggacataccaaagtattgagttttacgattccatctttatccaaaccatctgtataccatgaaccttccagcattgggtccatggctctgactgagagtgcactatcccagcatggtttgtcaaaagtggtatacagtggacctcatcctcaaagggagatgctgacagcacagaatcggtttgaagtgttgacattccttttgttgtgttacaatgctgccttaacttacatgcccagtgtttctcttcagtcactgtgtcaaatttgttcaagaatctgtgtttgtggatatcctcgacaacatgtaagaaaatataaaggtataagtagcaggataccagtttcttcaggattcatggtgcaaatgttaacagggatttattttgccttttataatggagaatgggatctagctcaaaaagcactggatgatattatatacagagcccagctagaattatatccagagccattgctggttgctaatgcaataaaggcttcattgcctcatggtcccatgaaatctaataaggaaggtacaaggtgtattcaagttgaaatcacaccaacttcctctcgaatatcaagaaatgcagtaaccagcatgtcaataaggggtcataggtggaaaagacatggaaatacagaattaacaggtcaagaagaactgatggagatatctgaagttgacgagggattttattccagggctgcgtctagtaccagccagtcgggtttatcaaacagtagtcacaattgtagtaacaagccaagtataggaaagaaccacagacggtcaggaggaagcaaaactggaggaaaagaaaaagaaactacaggggaatcttgcaaagatcactttgctcgaaaacaaactcagagagcccaaagtgagaatcttgagcttctctctttgaagagacttactttaacaaccagccaatccctacctaagcctagtagccatggtttggctaagaccgcagcgactgtatttagtaaatcctttgaacaagtcagtggtgtcacagtcccacataacccgtcatctgctgttggttgtggggctgggacagatgccaataggttttccgcttgtagtctccaagaagaaaagcttatttacgtttcagaaagaactgaacttccaatgaagcatcaatcaggtcagcagagacctcctagtattagcattactctgtccacagattaattagtaacatatttttctcccataacctagtgaacctggaaatacaactttgcttctttatgaaagtaccctgggtctttcatccgtattcctgacaggagccctgatgtcttaaattctgaaggctcccctgactttatgaagggaagattgtctaggttgcagtaagttgaaatatggttttgttatttcttgattaagattttttccccttggtttgagtcttttttttccctcctcttatttgttattgttgccctaagattgtcagtgacaataaattttgacaggttgtctaatcaagttggttatgtctcatgtgaggttgtaaggtggtttttcttgttttggtttggtttggttttttaatagctcctattttgatggctgtgtgtttggccttcagagtcaaagggagtctgcatgtatgggaactgttttatagagaatggggcagaggcacaactccaggaattctctagctcctggtcaggaagccaatctgaaaacaggcatgtggaaacacaaaaatgatgtgtatgaaaagcacctgatgaaaatatttgtaagcagatcatctttatgattagaacaatttgctcaaagccctggaaaatgcctggtaacccagtgcctagaatattatatgattccaggggatggctagaggcatttctgttgttatctctgaaacatttttatatcaaaaatcagattgctggtaggtgtgttgttttgaagtgttttatctggatttagcatgtgaagatccctttcaattattaaggtataataggctgtaaagctgatttaccctactgctggactttggaaatcctagttagtttggactcctataattcagagcatacgtcattggaagacttcctggaaatcagtgtaaatcttgcaacatagctctcaagataccactgtataatatgtaattgtttgtctgcaaatgcatttttcatctataaaatgtcatgaaagaaaataaaggtagtgaaatatggacaaaggacatttatatattaactaaagttgtttatgtttgtgttcttaaatttaaaacacgaagaaaaagaaatgtctttcttgttagtgaacaggcctgttttaaatatcttagtatgatatcaaaagaataatcaatttagttacctcccaactaaaaagtaaaaatgaaaaagacgacatggcagaagttgaaacaaacttgtatgtatctgtatgtgacctctagatggaaataaaagtttgatgtttgctagccgtggtccttttggctatggttgcggttcccctgtaaagcaaatgtacttaagtcatcattcagagtgagagagagaaagcacggctgaggctgagtcagttgaccgttgaggaagacctaaggagctgtccagttcttggctctttttcactgtgactgcacagcggtttccttcttcatagtcccttgctgtagtcaccaagagagcatgctagtgttttcctcttgttcctgcttatgcagagctcagatatatgaaaaatttgtatgctttgaaggctgccaaagcatttatactctggacatagttttaactgcaactgctttggctaccagtttaaaccgagttcttcaaaaagcatgaactcgttttcattcattagccctgtttacaatgtggattttgacataaatgaatttgattttcttttagctccagtaacagaatggaataagatctattgccataaattgtagttaagaactgtaaggcaatcgggcagtgaaacttgatattgtattaacttaataggaaccctgtgtacaatttaaaatatttgtaaaatatcactgtgaatttacagatgtctttttgtcattctttaacaatgaatttcccctgtgcatagttattaatagtattggtattattaaaaactaatttggcattttaaaaaaaaaaaaaaaaaaaaa

SEQ ID NO: 675 - protein, 521 aa, Homo sapiens
MFTSEKGVVEEWLSEFKTLPETSLPNYATNLKDKSSLVSSLYKVIQEPQSELLEPVCHQLFEFYRSGEEQLLQFTLQFLPELIWCYLAVSASRNVHSSGCIEALLLGVYNLEIVDKQGHTKVLSFTIPSLSKPSVYHEPSSIGSMALTESALSQHGLSKVVYSGPHPQREMLTAQNRFEVLTFLLLCYNAALTYMPSVSLQSLCQICSRICVCGYPRQHVRKYKGISSRIPVSSGFMVQMLTGIYFAFYNGEWDLAQKALDDIIYRAQLELYPEPLLVANAIKASLPHGPMKSNKEGTRCIQVEITPTSSRISRNAVTSMSIRGHRWKRHGNTELTGQEELMEISEVDEGFYSRAASSTSQSGLSNSSHNCSNKPSIGKNHRRSGGSKTGGKEKETTGESCKDHFARKQTQRAQSENLELLSLKRLTLTTSQSLPKPSSHGLAKTAATVFSKSFEQVSGVTVPHNPSSAVGCGAGTDANRFSACSLQEEKLIYVSERTELPMKHQSGQQRPPSISITLSTD

SEQ ID NO: 676 - DNA, 1779 bp, Homo sapiens
gtgactgggtggggctgcctcacttctgcctgatttgggaagcgctgcaaggacaaccggctggggtccttgcgcgccgcggctcagggaggagcaccgactgcgccgcgtaagtgccgcctgccctgcgtgggtcgtgccagctcagcgggacaggtcctcgcctcggtccctcggacttagggagcgcggggcagaccctgagagatggttggtgccatgtggaaggtgattgtttcgctggtcctgttgatgcctggcccctgtgatgggctgtttcgctccctatacagaagtgtttccatgccacctaagggagactcaggacagccattatttctcaccccttacattgaagctgggaagatccaaaaaggaagagaattgagtttggtcggccctttcccaggactgaacatgaagagttatgccggcttcctcaccgtgaataagacttacaacagcaacctcttcttctggttcttcccagctcagatacagccagaagatgccccagtagttctctggctacagggtgggccgggaggttcatccatgtttggactctttgtggaacatgggccttatgttgtcacaagtaacatgaccttgcgtgacagagacttcccctggaccacaacgctctccatgctttacattgacaatccagtgggcacaggcttcagttttactgatgatacccacggatatgcagtcaatgaggacgatgtagcacgggatttatacagtgcactaattcagtttttccagatatttcctgaatataaaaataatgacttttatgtcactggggagtcttatgcagggaaatatgtgccagccattgcacacctcatccattccctcaaccctgtgagagaggtgaagatcaacctgaacggaattgctattggagatggatattctgatcccgaatcaattatagggggctatgcagaattcctgtaccaaattggcttgttggatgagaagcaaaaaaagtacttccagaagcagtgccatgaatgcatagaacacatcaggaagcagaactggtttgaggcctttgaaatactggataaactactagatggcgacttaacaagtgatccttcttacttccagaatgttacaggatgtagtaattactataactttttgcggtgcacggaacctgaggatcagctttactatgtgaaatttttgtcactcccagaggtgagacaagccatccacgtggggaatcagacttttaatgatggaactatagttgaaaagtacttgcgagaagatacagtacagtcagttaagccatggttaactgaaatcatgaataattataaggttctgatctacaatggccaactggacatcatcgtggcagctgccctgacagagcgctccttgatgggcatggactggaaaggatcccaggaatacaagaaggcagaaaaaaaagtttggaagatctttaaatctgacagtgaagtggctggttacatccggcaagcgggtgacttccatcaggtaattattcgaggtggaggacatattttaccctatgaccagcctctgagagcttttgacatgattaatcgattcatttatggaaaaggatgggatccttatgttggataaactaccttcccaaaagagaacatcagaggttttcattgctgaaaagaaaatcgtaaaaacagaaaatgtcataggaataaaaaaattatcttttcatatctgcaagatttttttcatcaataaaaattatccttgaaacaa

SEQ ID NO: 677 - protein, 476 aa, Homo sapiens
MVGAMWKVIVSLVLLMPGPCDGLFRSLYRSVSMPPKGDSGQPLFLTPYIEAGKIQKGRELSLVGPFPGLNMKSYAGFLTVNKTYNSNLFFWFFPAQIQPEDAPVVLWLQGGPGGSSMFGLFVEHGPYVVTSNMTLRDRDFPWTTTLSMLYIDNPVGTGFSFTDDTHGYAVNEDDVARDLYSALIQFFQIFPEYKNNDFYVTGESYAGKYVPAIAHLIHSLNPVREVKINLNGIAIGDGYSDPESIIGGYAEFLYQIGLLDEKQKKYFQKQCHECIEHIRKQNWFEAFEILDKLLDGDLTSDPSYFQNVTGCSNYYNFLRCTEPEDQLYYVKFLSLPEVRQAIHVGNQTFNDGTIVEKYLREDTVQSVKPWLTEIMNNYKVLIYNGQLDIIVAAALTERSLMGMDWKGSQEYKKAEKKVWKIFKSDSEVAGYIRQAGDFHQVIIRGGGHILPYDQPLRAFDMINRFIYGKGWDPYVG

SEQ ID NO: 678 - DNA, 1691 bp, Homo sapiens
gtgactgggtggggctgcctcacttctgcctgatttgggaagcgctgcaaggacaaccggctggggtccttgcgcgccgcggctcagggaggagcaccgactgcgccgcaccctgagagatggttggtgccatgtggaaggtgattgtttcgctggtcctgttgatgcctggcccctgtgatgggctgtttcgctccctatacagaagtgtttccatgccacctaagggagactcaggacagccattatttctcaccccttacattgaagctgggaagatccaaaaaggaagagaattgagtttggtcggccctttcccaggactgaacatgaagagttatgccggcttcctcaccgtgaataagacttacaacagcaacctcttcttctggttcttcccagctcagatacagccagaagatgccccagtagttctctggctacagggtgggccgggaggttcatccatgtttggactctttgtggaacatgggccttatgttgtcacaagtaacatgaccttgcgtgacagagacttcccctggaccacaacgctctccatgctttacattgacaatccagtgggcacaggcttcagttttactgatgatacccacggatatgcagtcaatgaggacgatgtagcacgggatttatacagtgcactaattcagtttttccagatatttcctgaatataaaaataatgacttttatgtcactggggagtcttatgcagggaaatatgtgccagccattgcacacctcatccattccctcaaccctgtgagagaggtgaagatcaacctgaacggaattgctattggagatggatattctgatcccgaatcaattatagggggctatgcagaattcctgtaccaaattggcttgttggatgagaagcaaaaaaagtacttccagaagcagtgccatgaatgcatagaacacatcaggaagcagaactggtttgaggcctttgaaatactggataaactactagatggcgacttaacaagtgatccttcttacttccagaatgttacaggatgtagtaattactataactttttgcggtgcacggaacctgaggatcagctttactatgtgaaatttttgtcactcccagaggtgagacaagccatccacgtggggaatcagacttttaatgatggaactatagttgaaaagtacttgcgagaagatacagtacagtcagttaagccatggttaactgaaatcatgaataattataaggttctgatctacaatggccaactggacatcatcgtggcagctgccctgacagagcgctccttgatgggcatggactggaaaggatcccaggaatacaagaaggcagaaaaaaaagtttggaagatctttaaatctgacagtgaagtggctggttacatccggcaagcgggtgacttccatcaggtaattattcgaggtggaggacatattttaccctatgaccagcctctgagagcttttgacatgattaatcgattcatttatggaaaaggatgggatccttatgttggataaactaccttcccaaaagagaacatcagaggttttcattgctgaaaagaaaatcgtaaaaacagaaaatgtcataggaataaaaaaattatcttttcatatctgcaagatttttttcatcaataaaaattatccttgaaacaa

SEQ ID NO: 679 - protein, 476 aa, Homo sapiens; identical to SEQ ID NO: 677

SEQ ID NO: 680 - DNA, 4390 bp, Homo sapiens
ctctagctctcagcggctgcgaagtctgtaaacctggtggccaagtgattgtaagtcaggagactttccttcggtttctgcctttgatggcaatttccttcggtttctgcctttgatggcaagaggtggagattgtggcggcgattacagagaacgtctgggaagacaagttgctgtttttatgggaatcgcaggcttggaagagacagaagcaattccagaaataaattggaaattgaagatttaaacaatgttgttttaaaatattctaacttcaaagaatgatgccagaaacttaaaaaggggctgcgcagagtagcaggggccctggagggcgcggcctgaatcctgattgcccttctgctgagaggacacacgcagctgaagatgaatttgggaaaagtagccgcttgctactttaactatggaagagcagggccacagtgagatggaaataatcccatcagagtctcacccccacattcaattactgaaaagcaatcgggaacttctggtcactcacatccgcaatactcagtgtctggtggacaacttgctgaagaatgactacttctcggccgaagatgcggagattgtgtgtgcctgccccacccagcctgacaaggtccgcaaaattctggacctggtacagagcaagggcgaggaggtgtccgagttcttcctctacttgctccagcaactcgcagatgcctacgtggacctcaggccttggctgctggagatcggcttctccccttccctgctcactcagagcaaagtcgtggtcaacactgacccagtgagcaggtatacccagcagctgcgacaccatctgggccgtgactccaagttcgtgctgtgctatgcccagaaggaggagctgctgctggaggagatctacatggacaccatcatggagctggttggcttcagcaatgagagcctgggcagcctgaacagcctggcctgcctcctggaccacaccaccggcatcctcaatgagcagggtgagaccatcttcatcctgggtgatgctggggtgggcaagtccatgctgctacagcggctgcagagcctctgggccacgggccggctagacgcaggggtcaaattcttcttccactttcgctgccgcatgttcagctgcttcaaggaaagtgacaggctgtgtctgcaggacctgctcttcaagcactactgctacccagagcgggaccccgaggaggtgtttgccttcctgctgcgcttcccccacgtggccctcttcaccttcgatggcctggacgagctgcactcggacttggacctgagccgcgtgcctgacagctcctgcccctgggagcctgcccaccccctggtcttgctggccaacctgctcagtgggaagctgctcaagggggctagcaagctgctcacagcccgcacaggcatcgaggtcccgcgccagttcctgcggaagaaggtgcttctccggggcttctcccccagccacctgcgcgcctatgccaggaggatgttccccgagcgggccctgcaggaccgcctgctgagccagctggaggccaaccccaacctctgcagcctgtgctctgtgcccctcttctgctggatcatcttccggtgcttccagcacttccgtgctgcctttgaaggctcaccacagctgcccgactgcacgatgaccctgacagatgtcttcctcctggtcactgaggtccatctgaacaggatgcagcccagcagcctggtgcagcggaacacacgcagcccagtggagaccctccacgccggccgggacactctgtgctcgctggggcaggtggcccaccggggcatggagaagagcctctttgtcttcacccaggaggaggtgcaggcctccgggctgcaggagagagacatgcagctgggcttcctgcgggctttgccggagctgggccccgggggtgaccagcagtcctatgagtttttccacctcaccctccaggccttctttacagccttcttcctcgtgctggacgacagggtgggcactcaggagctgctcaggttcttccaggagtggatgccccctgcgggggcagcgaccacgtcctgctatcctcccttcctcccgttccagtgcctgcagggcagtggtccggcgcgggaagacctcttcaagaacaaggatcacttccagttcaccaacctcttcctgtgcgggctgttgtccaaagccaaacagaaactcctgcggcatctggtgcccgcggcagccctgaggagaaagcgcaaggccctgtgggcacacctgttttccagcctgcggggctacctgaagagcctgccccgcgttcaggtcgaaagcttcaaccaggtgcaggccatgcccacgttcatctggatgctgcgctgcatctacgagacacagagccagaaggtggggcagctggcggccaggggcatctgcgccaactacctcaagctgacctactgcaacgcctgctcggccgactgcagcgccctctccttcgtcctgcatcacttccccaagcggctggccctagacctagacaacaacaatctcaacgactacggcgtgcgggagctgcagccctgcttcagccgcctcactgttctcagactcagcgtaaaccagatcactgacggtggggtaaaggtgctaagcgaagagctgaccaaatacaaaattgtgacctatttgggtttatacaacaaccagatcaccgatgtcggagccaggtacgtcaccaaaatcctggatgaatgcaaaggcctcacgcatcttaaactgggaaaaaacaaaataacaagtgaaggagggaagtatctcgccctggctgtgaagaacagcaaatcaatctctgaggttgggatgtggggcaatcaagttggggatgaaggagcaaaagccttcgcagaggctctgcggaaccaccccagcttgaccaccctgagtcttgcgtccaacggcatctccacagaaggaggaaagagccttgcgagggccctgcagcagaacacgtctctagaaatactgtggctgacccaaaatgaactcaacgatgaagtggcagagagtttggcagaaatgttgaaagtcaaccagacgttaaagcatttatggcttatccagaatcagatcacagctaaggggactgcccagctggcagatgcgttacagagcaacactggcataacagagatttgcctaaatggaaacctgataaaaccagaggaggccaaagtctatgaagatgagaagcggattatctgtttctgagaggatgctttcctgttcatggggtttttgccctggagcctcagcagcaaatgccactctgggcagtcttttgtgtcagtgtcttaaaggggcctgcgcaggcgggactatcaggagtccactgcctccatgatgcaagccagcttcctgtgcagaaggtctggtcggcaaactccctaagtacccgctacaattctgcagaaaaagaatgtgtcttgcgagctgttgtagttacagtaaatacactgtgaagagactttattgcctattataattatttttatctgaagctagaggaataaagctgtgagcaaacagaggaggccagcctcacctcattccaacacctgccatagggaccaacgggagcgagttggtcaccgctcttttcattgaagagttgaggatgtggcacaaagttggtgccaagcttcttgaataaaacgtgtttgatggattagtattatacctgaaatattttcttccttctcagcactttcccatgtattgatactggtcccacttcacagctggagacaccggagtatgtgcagtgtgggatttgactcctccaaggttttgtggaaagttaatgtcaaggaaaggatgcaccacgggcttttaattttaatcctggagtctcactgtctgctggcaaagatagagaatgccctcagctcttagctggtctaagaatgacgatgccttcaaaatgctgcttccactcagggcttctcctctgctaggctaccctcctctagaaggctgagtaccatgggctacagtgtctggccttgggaagaagtgattctgtccctccaaagaaatagggcatggcttgcccctgtggccctggcatccaaatggctgcttttgtctcccttacctcgtgaagaggggaagtctcttcctgcctcccaagcagctgaagggtgactaaacgggcgccaagactcaggggatcggctgggaactgggccagcagagcatgttggacaccccccaccatggtgggcttgtggtggctgctccatgagggtgggggtgatactactagatcacttgtcctcttgcccgctcatttgttaataaaatactgaaaac

SEQ ID NO: 681 - protein, 953 aa, Homo sapiens
MEEQGHSEMEIIPSESHPHIQLLKSNRELLVTHIRNTQCLVDNLLKNDYFSAEDAEIVCACPTQPDKVRKILDLVQSKGEEVSEFFLYLLQQLADAYVDLRPWLLEIGFSPSLLTQSKVVVNTDPVSRYTQQLRHHLGRDSKFVLCYAQKEELLLEEIYMDTIMELVGFSNESLGSLNSLACLLDHTTGILNEQGETIFILGDAGVGKSMLLQRLQSLWATGRLDAGVKFFFHFRCRMFSCFKESDRLCLQDLLFKHYCYPERDPEEVFAFLLRFPHVALFTFDGLDELHSDLDLSRVPDSSCPWEPAHPLVLLANLLSGKLLKGASKLLTARTGIEVPRQFLRKKVLLRGFSPSHLRAYARRMFPERALQDRLLSQLEANPNLCSLCSVPLFCWIIFRCFQHFRAAFEGSPQLPDCTMTLTDVFLLVTEVHLNRMQPSSLVQRNTRSPVETLHAGRDTLCSLGQVAHRGMEKSLFVFTQEEVQASGLQERDMQLGFLRALPELGPGGDQQSYEFFHLTLQAFFTAFFLVLDDRVGTQELLRFFQEWMPPAGAATTSCYPPFLPFQCLQGSGPAREDLFKNKDHFQFTNLFLCGLLSKAKQKLLRHLVPAAALRRKRKALWAHLFSSLRGYLKSLPRVQVESFNQVQAMPTFIWMLRCIYETQSQKVGQLAARGICANYLKLTYCNACSADCSALSFVLHHFPKRLALDLDNNNLNDYGVRELQPCFSRLTVLRLSVNQITDGGVKVLSEELTKYKIVTYLGLYNNQITDVGARYVTKILDECKGLTHLKLGKNKITSEGGKYLALAVKNSKSISEVGMWGNQVGDEGAKAFAEALRNHPSLTTLSLASNGISTEGGKSLARALQQNTSLEILWLTQNELNDEVAESLAEMLKVNQTLKHLWLIQNQITAKGTAQLADALQSNTGITEICLNGNLIKPEEAKVYEDEKRIICF

SEQ ID NO: 682 - DNA, 5972 bp, Homo sapiens
ctgtgtgttcagccattactttgctcggcgctgctcccaggcatctccgaccctcggtgctgtggggagccccacacttgggctcctcgcctctcgccctcgctccccgtccctcctcccctctctccgccccttcccccttttctttctcctctctttcttcccctctctcccttctttcggccgccgtctcccccgcgccctcctcggggcggagggaagccgtgaagggggagggagggctcggtgtcaatttttttttgtgtggctgcggccgtagcctgtggcgggcaagcggggagaccccggcgcagcagaaccatggatggcccgacgcggggccatggactccgcaaaaagcggcggtcgcggtcgcagcgagaccgggagaggcgctcccggggcgggctgggggccggcgcggccggcggcggcggggctggccggacccgggcgctctcactcgcctcgtcgtcgggctccgacaaggaagacaatgggaagcccccgtcctccgccccgtcccggcccagacccccgcggaggaagcggagagagtccacctcggcagaagaggacatcattgatggatttgccatgaccagctttgtcacttttgaagcgctggagaaagatgtagcacttaagcctcaggaacgtgtggagaaacgccagacgcccctgaccaagaagaaacgagaagcacttaccaatggcttgtcctttcattcaaagaagagcagactcagccacccacaccactacagctcagatcgagaaaatgaccgcaatctctgccagcaccttgggaagagaaagaaaatgccgaaggcactcagacagctcaagccaggacagaacagctgcagggacagtgacagtgaaagtgccagtggagaatccaagggcttccaccggagcagctctcgggaaaggctcagtgatagttcagctccttccagcttgggaacaggctacttctgtgacagtgacagtgaccaggaagagaaggcatcagatgccagctctgaaaaactcttcaacactgttattgtaaacaaagatccggagttaggtgttggcacgctaccagaacatgacagccaggatgcagggccgattgtccccaagatatcgggtctagagagaagccaggagaagagccaggactgttgcaaagagccaatctttgagcctgtggtgcttaaagacccctgccctcaggtcgcacagccaataccccagccgcagacggagccccaactccgagctccttctccggaccctgacttggtgcagcgcacagaggccccacctcaacccccacctctgagtacacagccaccacagggccctcctgaggcccagctccagcctgccccgcagcctcaggtgcagaggccacccaggccacagtcccccacccagctgctccatcagaacctcccacctgtgcaggcccacccctctgctcagagcctctcccagccattgtcagcctacaacagcagtagcttaagcctcaacagtttaagcagcagcagaagcagcactccagcgaagactcagcccgccccacctcacatctcccaccacccctctgcctccccgttccccctctccctgcccaaccacagccccctgcacagcttcacacccaccctccagccccccgcacactcacatcaccccaatatgtttgcccctcccactgctctgcctcctccaccaccactgacatcaggaagtctgcaggtggccggacacccggccgggagcacttactcagagcaagacatcttgcgacaggaactgaacactcgttttttggcctctcagagtgctgaccgcggggcttccctgggccctccgccctacctgcggaccgagttccatcagcaccagcaccagcaccagcacacccaccagcacacgcaccagcacaccttcacgccgttcccccacgccatcccacccaccgccatcatgccgacgccagcacctcccatgtttgacaaataccctacaaaagttgacccattctaccggcacagtctcttccattcctatcctcctgcagtgtcgggcatcccccctatgatcccacccactggcccttttggttcactacaaggagcatttcagccgaagacatccaaccctatcgatgtcgctgctcggcctgggacagtcccacacactttactccaaaaggacccgaggttgacagatcctttcagacctatgttaaggaaaccagggaagtggtgtgctatgcatgttcacatcgcctggcagatttaccaccaccaacagaaagtcaagaaacagatgcagtcagacccacataagctggactttggactgaaacctgagttcctgagccgccctccaggccccagtctttttggagccatccaccacccccatgacctggcacggccttcaactttgttctctgccgctggtgctgcacacccaactgggaccccttttgggccacctcctcatcacagcaacttcctcaaccctgctgcccacctagagccttttaatcggccgtctacattcacaggcctagcagcagttggtggcaatgccttcgggggacttggaaatccttccgttacacccaactcaatgttcggccacaaggatggccccagtgtgcagaactttagcaaccctcacgaaccctggaaccggctgcaccgaacgcctccgtcgttcccgacccctccgccctggctgaagccaggggagctggagcgcagcgcgtccgctgcagctcatgacagagatagagatgtagataaacgagactcatctgttagtaaagatgacaaagaaagggaaagcgtcgagaagagacactccagccacccttcaccagcacctgtcctcccggtgaatgccctgggacatacccgcagctccactgaacagatccgggctcatctgaacactgaggctcgggagaaggacaaacccaaagagagggagagagaccactcggaatcccgcaaggacctggccgccgacgagcacaaggcgaaagagggccacctgcccgagaaggacgggcacggccacgaggggcgcgccgcgggcgaagaggccaagcagctggcccgggtgccgtctccctacgtgcggaccccggtggtggagagtgccaggcccaacagcacctcgagccgggaggccgagccgcgcaagggtgagccggcctacgagaaccccaagaagagctccgaggtcaaggtgaaggaggagcggaaggaagaccatgacctgcctccagaggccccgcagacccaccgggcctcggagccgccgcctcccaactcctcgtccagcgtgcacccggggcccctggcctcgatgcccatgacggtgggggtgacgggcattcaccccatgaacagcatcagcagcctggacaggactcgcatgatgacccccttcatgggcatcagccccctcccgggcggagagcgcttcccgtacccttctttccactgggaccccatccgggaccccttgagggatccttaccgagaacttgacattcaccggagagacccgctgggcagggacttcctgctaaggaacgacccgctccaccggctctcgactccccggctgtacgaagccgaccgctccttcagggaccgggagcctcacgactacagccaccaccaccaccaccaccaccacccgctgtctgtggaccctcggcgggagcacgagcggggaggccacctggacgagcgggagcgcttgcacatgctcagagaagactacgagcacacgcggctccactccgtgcaccccgcctccctcgacggacacctcccccaccccagcctcatcaccccgggactccccagcatgcactatccccgcatcagccccaccgcgggcaaccagaacggactcctcaacaagacccctccgacagcagcgctgagcgcacctcccccgctcatctccacgctggggggccgcccggtctctcccagaaggacgactcctctgtccgcagagataagggagaggcccccttcccacacgctgaaggatatcgaggcccgataagccgagaacaggagcaagaacgaggaagaagaaaccctaggcagacaccaggccaggcttgagagacagaactcctgcatggctcacacagactgggggggaaagccccaccccttccccttgtaaaaaatgtatagactcagtgcacattttgaaatgttttgtatattatatgttgagatttttcagatcttttagcccagtcatatgttctcacgtctcctactttttgtttctcgtataaaactttttgatttgaaccaaaacagtgaagatgacaacacacaccaattggatgataattgtagcgggggcggtgggggggagaagtccacgccatccatcatgcaaaattctttcagatgaggtgggaaggccgtgtacatagttatgtaaaaagagattgcttcatgagctaatggttcatatatgcaaaagggtaagatgaaagctttactttgtacaaatgtaaatagataaagtaacataatacattaatacttcttaaaatgtgctatttgcaaacttacttaatatcagtgaacacagtcggctaaagctgtgttcccatatattgttatagacagctaaacccttcaactatgcaatgaatgttcgggcttttcacaaaagcccgcctaactcaaaggagccttttcaaatccatttacagcatacttaaggtcatattttccctgaacaagcgcttacgtgatatgactctgttttccttgcttgttttttttcaaacggagaaacatcctgttttgcaaattggaccccaggctggaacttagcatctgaagttgccgcttgtgggctctgggggaaagtgtagccccggagaggtaactgaggacatgagcaaccagtgccagggagggtgggatttgccagatgccaaaatcaggggacgggtggtggtgtctgtcagacacacacaggtcgccagtgacttcacacacacctcatgtgagaaccatgccttttttagtgtgtcctatttcatacctgtacacacttcctcgttttgtaatgagatttacttacacccaaacagatcctgaaagaaagcttcaagttttctcagatgatggatatgttttcactgtattcaataactgacggatgtaaggtgcacgtttcctgatgtgacgcactgtattccagctggtgatcaagtctgggaacagccgtaacaggtcaaccttgtggagccatcgcgagttagagggtgaaagatggcagaaaaaaaagtcttgtgtgtgagtgtgttttttgagtttgcatcaatcttaatgtctcttcataatacttttataatacattaagcctcttgtctacatatttggagagaatatgactttactagcagagaaatacaatatatcttgtctactggactgtaaaatatatgtatgaaataaaattagttccatttggtcttctagtatattaaagtgctatctgacgttgttatcctgtttttgcaaaaaaaaaaaaaaaaaaaagttaactacagaccattgtttctaataagcagagagatctattttagtagtaaactgaaggtttagttgtgagcttcagattttgtgaactccagatgttgtgcggtgtttttttttttttttaagacaacaactaaaaaaatgcaaggaatatgtacactggaactgtagtggtagctttcagtattgtaaagagattgttctatacggacctttttgctgtttatcctgtatgtaataaagtcctttctagatcctatgtgaaaagaaaagtgaagcaactgaatcttcagcatgttctcatcggcggagccttcttgtgtaatgtaaactgtgccatgttattaaaaaatgtgaact

SEQ ID NO: 683 - protein, 1259 aa, Homo sapiens
MDGPTRGHGLRKKRRSRSQRDRERRSRGGLGAGAAGGGGAGRTRALSLASSSGSDKEDNGKPPSSAPSRPRPPRRKRRESTSAEEDIIDGFAMTSFVTFEALEKDVALKPQERVEKRQTPLTKKKREALTNGLSFHSKKSRLSHPHHYSSDRENDRNLCQHLGKRKKMPKALRQLKPGQNSCRDSDSESASGESKGFHRSSSRERLSDSSAPSSLGTGYFCDSDSDQEEKASDASSEKLFNTVIVNKDPELGVGTLPEHDSQDAGPIVPKISGLERSQEKSQDCCKEPIFEPVVLKDPCPQVAQPIPQPQTEPQLRAPSPDPDLVQRTEAPPQPPPLSTQPPQGPPEAQLQPAPQPQVQRPPRPQSPTQLLHQNLPPVQAHPSAQSLSQPLSAYNSSSLSLNSLSSSRSSTPAKTQPAPPHISHHPSASPFPLSLPNHSPLHSFTPTLQPPAHSHHPNMFAPPTALPPPPPLTSGSLQVAGHPAGSTYSEQDILRQELNTRFLASQSADRGASLGPPPYLRTEFHQHQHQHQHTHQHTHQHTFTPFPHAIPPTAIMPTPAPPMFDKYPTKVDPFYRHSLFHSYPPAVSGIPPMIPPTGPFGSLQGAFQPKTSNPIDVAARPGTVPHTLLQKDPRLTDPFRPMLRKPGKWCAMHVHIAWQIYHHQQKVKKQMQSDPHKLDFGLKPEFLSRPPGPSLFGAIHHPHDLARPSTLFSAAGAAHPTGTPFGPPPHHSNFLNPAAHLEPFNRPSTFTGLAAVGGNAFGGLGNPSVTPNSMFGHKDGPSVQNFSNPHEPWNRLHRTPPSFPTPPPWLKPGELERSASAAAHDRDRDVDKRDSSVSKDDKERESVEKRHSSHPSPAPVLPVNALGHTRSSTEQIRAHLNTEAREKDKPKERERDHSESRKDLAADEHKAKEGHLPEKDGHGHEGRAAGEEAKQLARVPSPYVRTPVVESARPNSTSSREAEPRKGEPAYENPKKSSEVKVKEERKEDHDLPPEAPQTHRASEPPPPNSSSSVHPGPLASMPMTVGVTGIHPMNSISSLDRTRMMTPFMGISPLPGGERFPYPSFHWDPIRDPLRDPYRELDIHRRDPLGRDFLLRNDPLHRLSTPRLYEADRSFRDREPHDYSHHHHHHHHPLSVDPRREHERGGHLDERERLHMLREDYEHTRLHSVHPASLDGHLPHPSLITPGLPSMHYPRISPTAGNQNGLLNKTPPTAALSAPPPLISTLGGRPVSPRRTTPLSAEIRERPPSHTLKDIEAR

SEQ ID NO: 684 - DNA, 2820 bp, Homo sapiens
gggagttcagacctagatctttccagttaatcacacaacaaacttagctcatcgcaataaaaagcagctcagagccgactggctcttttaggcactgactccgaacaggattctttcacccaggcatctcctccagagggatccgccagcccgtccagcagcaccatgtgggtgaccaaactcctgccagccctgctgctgcagcatgtcctcctgcatctcctcctgctccccatcgccatcccctatgcagagggacaaaggaaaagaagaaatacaattcatgaattcaaaaaatcagcaaagactaccctaatcaaaatagatccagcactgaagataaaaaccaaaaaagtgaatactgcagaccaatgtgctaatagatgtactaggaataaaggacttccattcacttgcaaggcttttgtttttgataaagcaagaaaacaatgcctctggttccccttcaatagcatgtcaagtggagtgaaaaaagaatttggccatgaatttgacctctatgaaaacaaagactacattagaaactgcatcattggtaaaggacgcagctacaagggaacagtatctatcactaagagtggcatcaaatgtcagccctggagttccatgataccacacgaacacagctttttgccttcgagctatcggggtaaagacctacaggaaaactactgtcgaaatcctcgaggggaagaagggggaccctggtgtttcacaagcaatccagaggtacgctacgaagtctgtgacattcctcagtgttcagaagttgaatgcatgacctgcaatggggagagttatcgaggtctcatggatcatacagaatcaggcaagatttgtcagcgctgggatcatcagacaccacaccggcacaaattcttgcctgaaagatatcccgacaagggctttgatgataattattgccgcaatcccgatggccagccgaggccatggtgctatactcttgaccctcacacccgctgggagtactgtgcaattaaaacatgcgctgacaatactatgaatgacactgatgttcctttggaaacaactgaatgcatccaaggtcaaggagaaggctacaggggcactgtcaataccatttggaatggaattccatgtcagcgttgggattctcagtatcctcacgagcatgacatgactcctgaaaatttcaagtgcaaggacctacgagaaaattactgccgaaatccagatgggtctgaatcaccctggtgttttaccactgatccaaacatccgagttggctactgctcccaaattccaaactgtgatatgtcacatggacaagattgttatcgtgggaatggcaaaaattatatgggcaacttatcccaaacaagatctggactaacatgttcaatgtgggacaagaacatggaagacttacatcgtcatatcttctgggaaccagatgcaagtaagctgaatgagaattactgccgaaatccagatgatgatgctcatggaccctggtgctacacgggaaatccactcattccttgggattattgccctatttctcgttgtgaaggtgataccacacctacaatagtcaatttagaccatcccgtaatatcttgtgccaaaacgaaacaattgcgagttgtaaatgggattccaacacgaacaaacataggatggatggttagtttgagatacagaaataaacatatctgcggaggatcattgataaaggagagttgggttcttactgcacgacagtgtttcccttctcgagacttgaaagattatgaagcttggcttggaattcatgatgtccacggaagaggagatgagaaatgcaaacaggttctcaatgtttcccagctggtatatggccctgaaggatcagatctggttttaatgaagcttgccaggcctgctgtcctggatgattttgttagtacgattgatttacctaattatggatgcacaattcctgaaaagaccagttgcagtgtttatggctggggctacactggattgatcaactatgatggcctattacgagtggcacatctctatataatgggaaatgagaaatgcagccagcatcatcgagggaaggtgactctgaatgagtctgaaatatgtgctggggctgaaaagattggatcaggaccatgtgagggggattatggtggcccacttgtttgtgagcaacataaaatgagaatggttcttggtgtcattgttcctggtcgtggatgtgccattccaaatcgtcctggtatttttgtccgagtagcatattatgcaaaatggatacacaaaattattttaacatataaggtaccacagtcatagctgaagtaagtgtgtctgaagcacccaccaatacaactgtcttttacatgaagatttcagagaatgtggaatttaaaatgtcacttacaacaatcctaagacaactactggagagtcatgtttgttgaaattctcattaatgtttatgggtgttttctgttgttttgtttgtcagtgttattttgtcaatgttgaagtgaattaaggtacatgcaagtgtaataacatatctcctgaagatacttgaatggattaaaaaaacacacaggtatatttgctggatgataaagatttcatgggaaaaaaaatcaattaatctgtctaagctgctttctgatgttggtttcttaataatgagtaaaccacaaattaaatgttattttaacctcaccaaaacaatttataccttgtgtccctaaattgtagccctatattaaattatattacatttcaaaaaaaaaaaaaaaa

SEQ ID NO: 685 - protein, 728 aa, Homo sapiens
MWVTKLLPALLLQHVLLHLLLLPIAIPYAEGQRKRRNTIHEFKKSAKTTLIKIDPALKIKTKKVNTADQCANRCTRNKGLPFTCKAFVFDKARKQCLWFPFNSMSSGVKKEFGHEFDLYENKDYIRNCIIGKGRSYKGTVSITKSGIKCQPWSSMIPHEHSFLPSSYRGKDLQENYCRNPRGEEGGPWCFTSNPEVRYEVCDIPQCSEVECMTCNGESYRGLMDHTESGKICQRWDHQTPHRHKFLPERYPDKGFDDNYCRNPDGQPRPWCYTLDPHTRWEYCAIKTCADNTMNDTDVPLETTECIQGQGEGYRGTVNTIWNGIPCQRWDSQYPHEHDMTPENFKCKDLRENYCRNPDGSESPWCFTTDPNIRVGYCSQIPNCDMSHGQDCYRGNGKNYMGNLSQTRSGLTCSMWDKNMEDLHRHIFWEPDASKLNENYCRNPDDDAHGPWCYTGNPLIPWDYCPISRCEGDTTPTIVNLDHPVISCAKTKQLRVVNGIPTRTNIGWMVSLRYRNKHICGGSLIKESWVLTARQCFPSRDLKDYEAWLGIHDVHGRGDEKCKQVLNVSQLVYGPEGSDLVLMKLARPAVLDDFVSTIDLPNYGCTIPEKTSCSVYGWGYTGLINYDGLLRVAHLYIMGNEKCSQHHRGKVTLNESEICAGAEKIGSGPCEGDYGGPLVCEQHKMRMVLGVIVPGRGCAIPNRPGIFVRVAYYAKWIHKIILTYKVPQS

SEQ ID NO: 686 - DNA, 1307 bp, Homo sapiens
gggagttcagacctagatctttccagttaatcacacaacaaacttagctcatcgcaataaaaagcagctcagagccgactggctcttttaggcactgactccgaacaggattctttcacccaggcatctcctccagagggatccgccagcccgtccagcagcaccatgtgggtgaccaaactcctgccagccctgctgctgcagcatgtcctcctgcatctcctcctgctccccatcgccatcccctatgcagagggacaaaggaaaagaagaaatacaattcatgaattcaaaaaatcagcaaagactaccctaatcaaaatagatccagcactgaagataaaaaccaaaaaagtgaatactgcagaccaatgtgctaatagatgtactaggaataaaggacttccattcacttgcaaggcttttgtttttgataaagcaagaaaacaatgcctctggttccccttcaatagcatgtcaagtggagtgaaaaaagaatttggccatgaatttgacctctatgaaaacaaagactacattagaaactgcatcattggtaaaggacgcagctacaagggaacagtatctatcactaagagtggcatcaaatgtcagccctggagttccatgataccacacgaacacagctttttgccttcgagctatcggggtaaagacctacaggaaaactactgtcgaaatcctcgaggggaagaagggggaccctggtgtttcacaagcaatccagaggtacgctacgaagtctgtgacattcctcagtgttcagaagttgaatgcatgacctgcaatggggagagttatcgaggtctcatggatcatacagaatcaggcaagatttgtcagcgctgggatcatcagacaccacaccggcacaaattcttgcctgaaagatatcccgacaagggctttgatgataattattgccgcaatcccgatggccagccgaggccatggtgctatactcttgaccctcacacccgctgggagtactgtgcaattaaaacatgcgagacataacatgggctctcaactgatggtgaacttcttctggtgagtgacagaggctgcagtgaagaataatgagtctaatagaagtttatcacagatgtctctaatctttatagctgatccctacctctctcgctgtctttgtacccagcctgcattctgtttcgatctgtcttttagcagtccatacaatcatttttctacatgctggcccttacctagcttttctgaatttacaataaaaactattttttaacgtgaaaaaaaaaaaaaaaaaa

SEQ ID NO: 687 - protein, 290 aa, Homo sapiens
MWVTKLLPALLLQHVLLHLLLLPIAIPYAEGQRKRRNTIHEFKKSAKTTLIKIDPALKIKTKKVNTADQCANRCTRNKGLPFTCKAFVFDKARKQCLWFPFNSMSSGVKKEFGHEFDLYENKDYIRNCIIGKGRSYKGTVSITKSGIKCQPWSSMIPHEHSFLPSSYRGKDLQENYCRNPRGEEGGPWCFTSNPEVRYEVCDIPQCSEVECMTCNGESYRGLMDHTESGKICQRWDHQTPHRHKFLPERYPDKGFDDNYCRNPDGQPRPWCYTLDPHTRWEYCAIKTCET

SEQ ID NO: 688 - DNA, 2805 bp, Homo sapiens
gggagttcagacctagatctttccagttaatcacacaacaaacttagctcatcgcaataaaaagcagctcagagccgactggctcttttaggcactgactccgaacaggattctttcacccaggcatctcctccagagggatccgccagcccgtccagcagcaccatgtgggtgaccaaactcctgccagccctgctgctgcagcatgtcctcctgcatctcctcctgctccccatcgccatcccctatgcagagggacaaaggaaaagaagaaatacaattcatgaattcaaaaaatcagcaaagactaccctaatcaaaatagatccagcactgaagataaaaaccaaaaaagtgaatactgcagaccaatgtgctaatagatgtactaggaataaaggacttccattcacttgcaaggcttttgtttttgataaagcaagaaaacaatgcctctggttccccttcaatagcatgtcaagtggagtgaaaaaagaatttggccatgaatttgacctctatgaaaacaaagactacattagaaactgcatcattggtaaaggacgcagctacaagggaacagtatctatcactaagagtggcatcaaatgtcagccctggagttccatgataccacacgaacacagctatcggggtaaagacctacaggaaaactactgtcgaaatcctcgaggggaagaagggggaccctggtgtttcacaagcaatccagaggtacgctacgaagtctgtgacattcctcagtgttcagaagttgaatgcatgacctgcaatggggagagttatcgaggtctcatggatcatacagaatcaggcaagatttgtcagcgctgggatcatcagacaccacaccggcacaaattcttgcctgaaagatatcccgacaagggctttgatgataattattgccgcaatcccgatggccagccgaggccatggtgctatactcttgaccctcacacccgctgggagtactgtgcaattaaaacatgcgctgacaatactatgaatgacactgatgttcctttggaaacaactgaatgcatccaaggtcaaggagaaggctacaggggcactgtcaataccatttggaatggaattccatgtcagcgttgggattctcagtatcctcacgagcatgacatgactcctgaaaatttcaagtgcaaggacctacgagaaaattactgccgaaatccagatgggtctgaatcaccctggtgttttaccactgatccaaacatccgagttggctactgctcccaaattccaaactgtgatatgtcacatggacaagattgttatcgtgggaatggcaaaaattatatgggcaacttatcccaaacaagatctggactaacatgttcaatgtgggacaagaacatggaagacttacatcgtcatatcttctgggaaccagatgcaagtaagctgaatgagaattactgccgaaatccagatgatgatgctcatggaccctggtgctacacgggaaatccactcattccttgggattattgccctatttctcgttgtgaaggtgataccacacctacaatagtcaatttagaccatcccgtaatatcttgtgccaaaacgaaacaattgcgagttgtaaatgggattccaacacgaacaaacataggatggatggttagtttgagatacagaaataaacatatctgcggaggatcattgataaaggagagttgggttcttactgcacgacagtgtttcccttctcgagacttgaaagattatgaagcttggcttggaattcatgatgtccacggaagaggagatgagaaatgcaaacaggttctcaatgtttcccagctggtatatggccctgaaggatcagatctggttttaatgaagcttgccaggcctgctgtcctggatgattttgttagtacgattgatttacctaattatggatgcacaattcctgaaaagaccagttgcagtgtttatggctggggctacactggattgatcaactatgatggcctattacgagtggcacatctctatataatgggaaatgagaaatgcagccagcatcatcgagggaaggtgactctgaatgagtctgaaatatgtgctggggctgaaaagattggatcaggaccatgtgagggggattatggtggcccacttgtttgtgagcaacataaaatgagaatggttcttggtgtcattgttcctggtcgtggatgtgccattccaaatcgtcctggtatttttgtccgagtagcatattatgcaaaatggatacacaaaattattttaacatataaggtaccacagtcatagctgaagtaagtgtgtctgaagcacccaccaatacaactgtcttttacatgaagatttcagagaatgtggaatttaaaatgtcacttacaacaatcctaagacaactactggagagtcatgtttgttgaaattctcattaatgtttatgggtgttttctgttgttttgtttgtcagtgttattttgtcaatgttgaagtgaattaaggtacatgcaagtgtaataacatatctcctgaagatacttgaatggattaaaaaaacacacaggtatatttgctggatgataaagatttcatgggaaaaaaaatcaattaatctgtctaagctgctttctgatgttggtttcttaataatgagtaaaccacaaattaaatgttattttaacctcaccaaaacaatttataccttgtgtccctaaattgtagccctatattaaattatattacatttcaaaaaaaaaaaaaaaa

SEQ ID NO: 689 - protein, 723 aa, Homo sapiens
MWVTKLLPALLLQHVLLHLLLLPIAIPYAEGQRKRRNTIHEFKKSAKTTLIKIDPALKIKTKKVNTADQCANRCTRNKGLPFTCKAFVFDKARKQCLWFPFNSMSSGVKKEFGHEFDLYENKDYIRNCIIGKGRSYKGTVSITKSGIKCQPWSSMIPHEHSYRGKDLQENYCRNPRGEEGGPWCFTSNPEVRYEVCDIPQCSEVECMTCNGESYRGLMDHTESGKICQRWDHQTPHRHKFLPERYPDKGFDDNYCRNPDGQPRPWCYTLDPHTRWEYCAIKTCADNTMNDTDVPLETTECIQGQGEGYRGTVNTIWNGIPCQRWDSQYPHEHDMTPENFKCKDLRENYCRNPDGSESPWCFTTDPNIRVGYCSQIPNCDMSHGQDCYRGNGKNYMGNLSQTRSGLTCSMWDKNMEDLHRHIFWEPDASKLNENYCRNPDDDAHGPWCYTGNPLIPWDYCPISRCEGDTTPTIVNLDHPVISCAKTKQLRVVNGIPTRTNIGWMVSLRYRNKHICGGSLIKESWVLTARQCFPSRDLKDYEAWLGIHDVHGRGDEKCKQVLNVSQLVYGPEGSDLVLMKLARPAVLDDFVSTIDLPNYGCTIPEKTSCSVYGWGYTGLINYDGLLRVAHLYIMGNEKCSQHHRGKVTLNESEICAGAEKIGSGPCEGDYGGPLVCEQHKMRMVLGVIVPGRGCAIPNRPGIFVRVAYYAKWIHKIILTYKVPQS

SEQ ID NO: 690 - DNA, 1292 bp, Homo sapiens
gggagttcagacctagatctttccagttaatcacacaacaaacttagctcatcgcaataaaaagcagctcagagccgactggctcttttaggcactgactccgaacaggattctttcacccaggcatctcctccagagggatccgccagcccgtccagcagcaccatgtgggtgaccaaactcctgccagccctgctgctgcagcatgtcctcctgcatctcctcctgctccccatcgccatcccctatgcagagggacaaaggaaaagaagaaatacaattcatgaattcaaaaaatcagcaaagactaccctaatcaaaatagatccagcactgaagataaaaaccaaaaaagtgaatactgcagaccaatgtgctaatagatgtactaggaataaaggacttccattcacttgcaaggcttttgtttttgataaagcaagaaaacaatgcctctggttccccttcaatagcatgtcaagtggagtgaaaaaagaatttggccatgaatttgacctctatgaaaacaaagactacattagaaactgcatcattggtaaaggacgcagctacaagggaacagtatctatcactaagagtggcatcaaatgtcagccctggagttccatgataccacacgaacacagctatcggggtaaagacctacaggaaaactactgtcgaaatcctcgaggggaagaagggggaccctggtgtttcacaagcaatccagaggtacgctacgaagtctgtgacattcctcagtgttcagaagttgaatgcatgacctgcaatggggagagttatcgaggtctcatggatcatacagaatcaggcaagatttgtcagcgctgggatcatcagacaccacaccggcacaaattcttgcctgaaagatatcccgacaagggctttgatgataattattgccgcaatcccgatggccagccgaggccatggtgctatactcttgaccctcacacccgctgggagtactgtgcaattaaaacatgcgagacataacatgggctctcaactgatggtgaacttcttctggtgagtgacagaggctgcagtgaagaataatgagtctaatagaagtttatcacagatgtctctaatctttatagctgatccctacctctctcgctgtctttgtacccagcctgcattctgtttcgatctgtcttttagcagtccatacaatcatttttctacatgctggcccttacctagcttttctgaatttacaataaaaactattttttaacgtgaaaaaaaaaaaaaaaaaa

SEQ ID NO: 691 - protein, 285 aa, Homo sapiens
MWVTKLLPALLLQHVLLHLLLLPIAIPYAEGQRKRRNTIHEFKKSAKTTLIKIDPALKIKTKKVNTADQCANRCTRNKGLPFTCKAFVFDKARKQCLWFPFNSMSSGVKKEFGHEFDLYENKDYIRNCIIGKGRSYKGTVSITKSGIKCQPWSSMIPHEHSYRGKDLQENYCRNPRGEEGGPWCFTSNPEVRYEVCDIPQCSEVECMTCNGESYRGLMDHTESGKICQRWDHQTPHRHKFLPERYPDKGFDDNYCRNPDGQPRPWCYTLDPHTRWEYCAIKTCET

SEQ ID NO: 692 - DNA, 2079 bp, Homo sapiens
gggagttcagacctagatctttccagttaatcacacaacaaacttagctcatcgcaataaaaagcagctcagagccgactggctcttttaggcactgactccgaacaggattctttcacccaggcatctcctccagagggatccgccagcccgtccagcagcaccatgtgggtgaccaaactcctgccagccctgctgctgcagcatgtcctcctgcatctcctcctgctccccatcgccatcccctatgcagagggacaaaggaaaagaagaaatacaattcatgaattcaaaaaatcagcaaagactaccctaatcaaaatagatccagcactgaagataaaaaccaaaaaagtgaatactgcagaccaatgtgctaatagatgtactaggaataaaggacttccattcacttgcaaggcttttgtttttgataaagcaagaaaacaatgcctctggttccccttcaatagcatgtcaagtggagtgaaaaaagaatttggccatgaatttgacctctatgaaaacaaagactacattagaaactgcatcattggtaaaggacgcagctacaagggaacagtatctatcactaagagtggcatcaaatgtcagccctggagttccatgataccacacgaacacagctttttgccttcgagctatcggggtaaagacctacaggaaaactactgtcgaaatcctcgaggggaagaagggggaccctggtgtttcacaagcaatccagaggtacgctacgaagtctgtgacattcctcagtgttcagaaggtaaataaacctgaatgccatgtgggccattctattccccctatgtgtagaactgtaactcacattaaaggttaacagcaacgaatcaatcataacaaatatgttgttcgtgcaaatgcaactacaaataattatttaaacatttttatacaatgtttttaaaactgttggattatcaccagattaatgcaaaataacagagcgagttatcagtttgaatttcaacactgcctgagacatccctctggggaaagtgaaagagagggtttacttacctactgtcttgagctcacatacctcaaaatctactactgtgtggcacctgaaaggagttgaatgaagcttagcctttcattagcaatgttaattctattcaaccagcacctgcttccacagaaattctgtccaaactatcatgaagtggtgtgacaagggtatatggacccagaagataatacaatataagaagggatcactggaagcttgaccccatgcacattttggtgaaaatgtgcctagaatcaaatgtgacacgtaggctggaactgagtaccattcagaataggatctgaagagatcaaagcaatggagaccaccaaactgtcttgaaggcatgtctatggaccttaagtccatgtctatgttttcagctcttctcacagcataaaagggcattgtccttacttttgcagtggaaaactgaatggctgacaagatggaagagtaaccatttcagcattgtatgtggtttcatttttcttagttatctggctactgaatagccggatttttcagttctgtcagaaactctaaatttccaaaaatctaagtgaaacatggatgaaactctgttagaaaattgttaggattttggagtatttggggagggggactactggaatgctgtccaagttttatactaagatatcttacctgtttgttattaaccaaatatttttaaaaatatttcctccataaatattcatttaatattaggttgatatttatcacataaaaagtaaaggctactgttagctaattgtcacagagaaggatttgttttctgttgttagtgaatttgaaatccttgactttatgtgctacagccagttccatctctgtttgtaaattcttactttccattccatatcatattctgttccctataacctcttcattgttttcttttcttttaaaaataataaacttttctatgatcaaaaaaaaaaaaaaaaaaaaaaaaaaaaaaaaaaaaaaaaaaaaaaaaaaaaaaaaaaaaaaaaaaaaaa

SEQ ID NO: 693 - protein, 210 aa, Homo sapiens
MWVTKLLPALLLQHVLLHLLLLPIAIPYAEGQRKRRNTIHEFKKSAKTTLIKIDPALKIKTKKVNTADQCANRCTRNKGLPFTCKAFVFDKARKQCLWFPFNSMSSGVKKEFGHEFDLYENKDYIRNCIIGKGRSYKGTVSITKSGIKCQPWSSMIPHEHSFLPSSYRGKDLQENYCRNPRGEEGGPWCFTSNPEVRYEVCDIPQCSEGK

SEQ ID NO: 694 - DNA, 3191 bp, Homo sapiens
ctgggctgaggcggaggcaggggagttgcagcgcgcgaggctccgtgagtgtgtctcctgcgcgctgagaggcggggggaggcggaggaccaggaggaggaggaggaggaggaggagggggagaatgcccggagccgccgccgctgccgccgccgccgccgccgcgatgctcccggctcaggaggctgccaagctgtaccacaccaactatgtgcggaactcgcgggccatcggcgtgctgtgggccatcttcaccatctgctttgccatcgtcaacgtggtgtgcttcatccagccctactggataggcgacggcgtggacaccccgcaagccggctatttcgggctcttccactactgcatcggcaacggcttctcccgggagctgacctgcaggggcagcttcacggacttctccacgctgccctcgggcgccttcaaagccgcctccttctttatcggcctctccatgatgctcatcattgcctgcatcatttgctttaccctcttcttcttctgcaacacggccactgtgtacaagatatgtgcctggatgcagctcacctccgctgcctgccttgtgcttggctgtatgattttccctgatggctgggactcagatgaagtaaaacggatgtgtggagaaaagacagacaagtacactcttggggcttgctcagtccgctgggcatacatcctggctattattggaattttggatgccctgatcctctcatttctagcatttgtgcttggtaatcgacaagacagcttgatggcagaggaactgaaggcagaaaacaaagttctgctaagccaatattctctagaatgagcacaaaacaaatcgaataacagctaaacaaatcgaataacagctaaacgaatcgaataacagcttttgtacatcaacatcaagaaggaatacgcctgagagagatcagagtatatagatgaatatgaacaagaatggaacattcacttgtcaacgcactttctaaatctagatcagcagagatgggagtgattttctggaaagagatgtgatcatggattaaacaccagctcattggaaactcattggatgagatcagaaaacgttcatgaaaaatcatattcaggaaataaggaagaggaatataaatgctctagagttaacatgtaaaatatatacgtactgaggtttgtaaactgtcctttttaaatcaaactgaaaacaaaaagctttaacctttcaacagaatttttaaaaaggcagttagttctaaattattcctatctcaatagccaagaggctgatcaagcgtcatttattgaggaagcatcttagaaaatgcctctgaatgttttcataggagccgtgacctttggttcttcatctctaccattcatttacttcactgtgtaattagttacaaccactcagttattaagagacgtaacgcttcaaactttttaccaagtctgtgttctgtttaatctgtccatacaagttattactgagaaagtgtttatgccatatactattactccatcaagctgtatattacaggaagtacatctttacatcataggttcccaagcaacatagatttccctatctttcaggaaacagcatcaaggaactctgaaaaatatagaaaaagttcattttcaccttggaagctcacgtgtaatattataggctactatcaaataaacactttttttctaattctccctagtatatgcataggaatttaatatactttataaataagtatctaaaatgtctcctacttttttcctatttctttgccatacatgttatcagaaatccatgtcttctatttcccttactgatgggcactcatttttatttttttaaaaatcattccattaaacatatttctaaataatagtaagtggtactaacaaaataaataataatttaatagccttagaaataaatgactgtatacttatacaggttgaaaaaaactcggtaggaataagttacctttttgtttactaatgttggtttcaaaaatactcagattcattttagttggctgacatctggaagtagttaacaactaaccagtggacttcaacaatcatttgctcccaggcttcccccatcatcaccctcaccacatatcctgctaatatccaacaacaaacaaatatttaatattgaaatagcccattgcctgagaatgaacacaagctaaaatacatgcaagggtacttaatggaagccaaaccatgttctatacctaaggagaaaacatggacatgtagaatgcttttattcatgtattcaaaatcagaacaaatcagtgtatatcactagaacatcagatggaggataacacaagaagtgatacagatcagggttcacttctcttaccctctctctgttaggaccacattcctattttagccaaatgtttctggtacgggccatcttttcaccataaatggcattatgtttcaaatggctaaaagcatattatgggtatgctcaaaggagtaaaacccaattcacagagatgtggcttttctaaagaaccaaattaagggaatacttagtatctacaactaaagtattagtcattctgaggattatttgttgctttaagtattagctccctactacatccataacaccctacttactaaatttaattacacacaacttttcaagaattcgtattttatttgaagggaggtacctgtctactttatctacaataaaaacaaagggtattggctttctctaatccatgcaaactacaaattccatcgggagtcctacatcactaacagtggtatgaacaaaactaagaaagtacttcctatccacatgtgaatgttttaaaaaagtttttgccataaaacctaagtgtaatttagcataccacagtgctctgaagatgggtcattgacgatgtaccatttgtatataggtaatacacatgtaaatcactaattgttaattaaatataagaagtaggtttttatctttttaaaaaaaaaacaaaaaaggtgactccctttctcattctgttctgttgtattgcgtccaaaagttgtgtgtaatttttttaaggtccaagaaatgtaaagaaatttgttggaatacctgaatttctgtaaaaaaataaaaataaaaataagattttgttacttaaaaaaaaaaaaaaaaa

SEQ ID NO: 695 - protein, 236 aa, Homo sapiens
MPGAAAAAAAAAAAMLPAQEAAKLYHTNYVRNSRAIGVLWAIFTICFAIVNVVCFIQPYWIGDGVDTPQAGYFGLFHYCIGNGFSRELTCRGSFTDFSTLPSGAFKAASFFIGLSMMLIIACIICFTLFFFCNTATVYKICAWMQLTSAACLVLGCMIFPDGWDSDEVKRMCGEKTDKYTLGACSVRWAYILAIIGILDALILSFLAFVLGNRQDSLMAEELKAENKVLLSQYSLE

SEQ ID NO: 696 - DNA, 1700 bp, Homo sapiens
cacaaattccctctgtctcctccagaatccagaaaagaataattacaatattttcaaaatggaaagttcccatgccaaagagtttgccttcttcaccaaactatgatttcgtgatgttcttaaaggtagtgtacaccaggtttttacattcttattttgaatgtagttttagtgtttgtgtgatttgtttttcagcctggcctgcagactagcaacccaagacttatactgcccaatttgacagctcatttttattttagtttcaccatatacatgaattggacttacaattccagaaaaattaaaggctcaagaatggggcatgagtacacactgtgtgctaaggaaagaatatttggattgaattgaacccctgcagaacgtggactatttagagacctgaatttggccttgggtgaatacctgccttgggttggccaactagcagtcaacagcaatgagccaaaagagacaaaccaagtttcaaaatggcaaatcaaagacttcagaaaatagctcagctaaacgtgagaaaggaatggttgtcaatagcaaagagatttctgatgcagtcgggcaatcaaaatttgttctagagaaccttcggcattacacagtccatccaaatttggcccagtactataagcctttgaaggccactgccctgcagaaattcctggctcaaaacaggaaaaacaccagcttcatgttaaaagtaacacagtatgaccaggataagacgttactgattatgaccaacaacccacctccctgctcaatcacccagcaagacaaggagagtgcatcaaaatatttttccaaggagttactgctcaaggtcatggaaagtcatcatcagcacaaacccactgagaacctctggctgccccgcatgcctcagaaaaaaaagttaagatctaagctgaaaccaatcttccctttgatactgtcggatgatcccacatccaagcgagaacaatggtttaggttttccactgacaatgatttcaagagcgaagggaagtattcaaaagtctacgctttgaggacacagaagaaaatgtaccctcagctcacctttgctccagtccatgagagagatatgaggaaagatgcttccaagaagtcagcgagtgaaaggccaatttccaaagtgattcgggaaccactgacactcgcatcgctcttggaagacatgcccaccagaaccgcgcccggggagagcgccttccgcaacgggagggccccgcagtggattatcaaaaaggccacggtcatcgggtgaacacagacccctcagtcctcccgcctcgctctcttgagactgaggggtccgcagaagtcgccacccaaataaaaccacattcctgctgctgcgggcgtgggctcccgggtcgcaagccgggagggtcgagccgaagtctccggcgggccgcaagaggagaagggggcgtggctgcgtcccgggggccgagggcggccggggagggcgggccttggccccgagtgaaggcgcggcggcccaaccggcgtgagagcgcggggccggccttcctgcagcctcttccgctcgccggctgcggcgcctgggacggttgcggtgggtctgggcgctgggaagtcgtccaagatgattaaaaaattcgacaagaaaaaaaaaaaaaaaaaaaaaaaaaaaaaaaaaaaaaaaaaaaaaaaaa

SEQ ID NO: 697 - protein, 275 aa, Homo sapiens
MSQKRQTKFQNGKSKTSENSSAKREKGMVVNSKEISDAVGQSKFVLENLRHYTVHPNLAQYYKPLKATALQKFLAQNRKNTSFMLKVTQYDQDKTLLIMTNNPPPCSITQQDKESASKYFSKELLLKVMESHHQHKPTENLWLPRMPQKKKLRSKLKPIFPLILSDDPTSKREQWFRFSTDNDFKSEGKYSKVYALRTQKKMYPQLTFAPVHERDMRKDASKKSASERPISKVIREPLTLASLLEDMPTRTAPGESAFRNGRAPQWIIKKATVIG

SEQ ID NO: 698 - DNA, 1383 bp, Homo sapiens
atgtcggccgccgtggcgtgcctggactacttcgccgccgagtgcctggtgtccatgtccgcgggcgccgtggttcaccgccgcccgccggaccccgagggcgcgggtggagccgcaggctcggaggtgggtgcggcgcatccggagtccgctctgccgggtccggggccatcggggcccgcgtcggtcccccagctcccgcaggtccccgcccccagccccggcgcgggcggcgccgcgccccacctgctggctgcaagcgtctgggcggacttgcgcggcagctctggcgagggctcctgggagaactcgggggaagctccacgcgcctcgtccggcttctccgacccgatcccgtgctccgtccagaccccgtgctccgagctggctcccgcctccggcgccgcggcggtctgcgctcccgagagctcctccgatgcgcccgccgtcccaagcgcgcctgctgccccgggcgcaccagcagcctctggtgggttctctggaggggccctaggggcaggccccgcccccgccgcggatcaggcgccccggaggaggtctgtcacacctgctgccaagcgccaccaatgccccttcccgggctgcaccaaagcctattacaagtcgtcgcacctcaagtcccaccagcgcacccacacgggtgagcgccctttctcctgcgactggctcgactgcgacaagaagtttacgcgttccgacgagctggcccgccactacaggacgcacacgggcgagaagcgcttctcctgccccctctgccccaagcagttctcccggagcgaccacctgaccaagcatgctcgccgccacccaacctatcatccagatatgatcgagtaccggggacgtcgtcgaactccccgcatcgacccgccactcaccagcgaggtggaaagctccgcctccggctccggtcccggcccggcgcccagcttcaccacctgcctgtaggacagtcattgctgtcagtcttaccctcaaggatgatcccccaggccgttgtccctgctttctctctgcccatccttctttcccagagtcattacaccaaggcacagactggttcctctgctctgagggtgggtccaggcagacatgtggactctggggaggtactgggggccggaaaatagcgggaattcttgcaacgtgtatatcatcctaaaagtgggggttgcctcaagacagcccccaggaactgataagaagggatgaactcccgtactctccagagtactgaagattctcccctccctggaaccagggatgtgaaactggaattctcagatgcctgaggagctcccagtctcaaaggactctggtgtctcacccatccaccaggcggaccttggagagggtgtc

SEQ ID NO: 699 - protein, 323 aa, Homo sapiens
MSAAVACLDYFAAECLVSMSAGAVVHRRPPDPEGAGGAAGSEVGAAHPESALPGPGPSGPASVPQLPQVPAPSPGAGGAAPHLLAASVWADLRGSSGEGSWENSGEAPRASSGFSDPIPCSVQTPCSELAPASGAAAVCAPESSSDAPAVPSAPAAPGAPAASGGFSGGALGAGPAPAADQAPRRRSVTPAAKRHQCPFPGCTKAYYKSSHLKSHQRTHTGERPFSCDWLDCDKKFTRSDELARHYRTHTGEKRFSCPLCPKQFSRSDHLTKHARRHPTYHPDMIEYRGRRRTPRIDPPLTSEVESSASGSGPGPAPSFTTCL

SEQ ID NO: 700 - DNA, 4767 bp, Homo sapiens
gcctcccgccgcctcccgcgcggccatggactgagcgccgccggccaggccgcggggatggggccgccgctcccgctgctgctgctgctactgctgctgctgccgccacgcgtcctgcctgccgccccttcgtccgtcccccgcggccggcagctcccggggcgtctgggctgcctgctcgaggagggcctctgcggagcgtccgaggcctgtgtgaacgatggagtgtttggaaggtgccagaaggttccggcaatggacttttaccgctacgaggtgtcgcccgtggccctgcagcgcctgcgcgtggcgttgcagaagctttccggcacaggtttcacgtggcaggatgactatactcagtatgtgatggaccaggaacttgcagacctcccgaaaacctacctgaggcgtcctgaagcatccagcccagccaggccctcaaaacacagcgttggcagcgagaggaggtacagtcgggagggcggtgctgccctggccaacgccctccgacgccacctgcccttcctggaggccctgtcccaggccccagcctcagacgtgctcgccaggacccatacggcgcaggacagaccccccgctgagggtgatgaccgcttctccgagagcatcctgacctatgtggcccacacgtctgcgctgacctaccctcccgggccccggacccagctccgcgaggacctcctgccgcggaccctcggccagctccagccagatgagctcagccctaaggtggacagtggtgtggacagacaccatctgatggcggccctcagtgcctatgctgcccagaggcccccagctccccccggggagggcagcctggagccacagtaccttctgcgtgcaccctcaagaatgcccaggcctttgctggcaccagccgccccccagaagtggccttcacctctgggagattccgaagacccctccagcacaggcgatggagcacggattcataccctcctgaaggacctgcagaggcagccggctgaggtgaggggcctgagtggcctggagctggacggcatggctgagctgatggctggcctgatgcaaggcgtggaccatggagtagctcgaggcagccctgggagagcggccctgggagagtctggagaacaggcggatggccccaaggccaccctccgtggagacagctttccagatgacggagtgcaggacgacgatgatagactttaccaagaggtccatcgtctgagtgccacactcgggggcctcctgcaggaccacgggtctcgactcttacctggagccctcccctttgcaaggcccctcgacatggagaggaagaagtccgagcaccctgagtcttccctgtcttcagaagaggagactgccggagtggagaacgtcaagagccagacgtattccaaagatctgctggggcagcagccgcattcggagcccggggccgctgcgtttggggagctccaaaaccagatgcctgggccctcgaaggaggagcagagccttccagcgggtgctcaggaggccctcagcgacggcctgcaattggaggtccagccttccgaggaagaggcgcggggctacatcgtgacagacagagaccccctgcgccccgaggaaggaaggcggctggtggaggacgtcgcccgcctcctgcaggtgcccagcagtgcgttcgctgacgtggaggttctcggaccagcagtgaccttcaaagtgagcgccaatgtccaaaacgtgaccactgaggatgtggagaaggccacagttgacaacaaagacaaactggaggaaacctctggactgaaaattcttcaaaccggagtcgggtcgaaaagcaaactcaagttcctgcctcctcaggcggagcaagaagactccaccaagttcatcgcgctcaccctggtctccctcgcctgcatcctgggcgtcctcctggcctctggcctcatctactgcctccgccatagctctcagcacaggctgaaggagaagctctcgggactagggggcgacccaggtgcagatgccactgccgcctaccaggagctgtgccgccagcgtatggccacgcggccaccagaccgacctgagggcccgcacacgtcacgcatcagcagcgtctcatcccagttcagcgacgggccgatccccagcccctccgcacgcagcagcgcctcatcctggtccgaggagcctgtgcagtccaacatggacatctccaccggccacatgatcctgtcctacatggaggaccacctgaagaacaagaaccggctggagaaggagtgggaagcgctgtgcgcctaccaggcggagcccaacagctcgttcgtggcccagagggaggagaacgtgcccaagaaccgctccctggctgtgctgacctatgaccactcccgggtcctgctgaaggcggagaacagccacagccactcagactacatcaacgctagccccatcatggatcacgacccgaggaaccccgcgtacatcgccacccagggaccgctgcccgccaccgtggctgacttttggcagatggtgtgggagagcggctgcgtggtgatcgtcatgctgacacccctcgcggagaacggcgtccggcagtgctaccactactggccggatgaaggctccaatctctaccacatctatgaggtgaacctggtctccgagcacatctggtgtgaggacttcctggtgaggagcttctatctgaagaacctgcagaccaacgagacgcgcaccgtgacgcagttccacttcctgagttggtatgaccgaggagtcccttcctcctcaaggtccctcctggacttccgcagaaaagtaaacaagtgctacaggggccgttcttgtccaataattgttcattgcagtgacggtgcaggccggagcggcacctacgtcctgatcgacatggttctcaacaagatggccaaaggtgctaaagagattgatatcgcagcgaccctggagcacttgagggaccagagacccggcatggtccagacgaaggagcagtttgagttcgcgctgacagccgtggctgaggaggtgaacgccatcctcaaggcccttccccagtgagcggcagcctcaggggcctcaggggagcccccaccccacggatgttgtcaggaatcatgatctgactttaattgtgtgtcttctattataactgcatagtaatagggcccttagctctcccgtagtcagcgcagtttagcagttaaaagtgtatttttgtttaatcaaacaataataaagagagatttgtggaaaaatccagttacgggtggaggggaatcggttcatcaattttcacttgcttaaaaaaaatactttttcttaaagcacccgttcaccttcttggttgaagttgtgttaacaatgcagtagccagcacgttcgaggcggtttccaggaagagtgtgcttgtcatctgccactttcgggagggtggatccactgtgcaggagtggccggggaagctggcagcactcagtgaggccgcccggcacacaaggcacgtttggcatttctctttgagagagtttatcattgggagaagccgcggggacagaactgaacgtcctgcagcttcggggcaagtgagacaatcacagctcctcgctgcgtctccatcaacactgcgccgggtaccatggacggccccgtcagccacacctgtcagcccaagcagagtgattcaggggctccccgggggcagacacctgtgcaccccatgagtagtgcccacttgaggctggcactcccctgacctcacctttgcaaagttacagatgcaccccaacattgagatgtgtttttaatgttaaaatattgatttctacgttatgaaaacagatgcccccgtgaatgcttacctgtgagataaccacaaccaggaagaacaaatctgggcattgagcaagctatgagggtccccgggagcacacgaaccctgccaggcccccgctggctcctccaggcacgtcccggacctgtggggccccagagaggggacatttccctcctgggagagaaggagatcagggcaactcggagagggctgcgagcatttccctcccgggagaggagatcagggcgacctgcacgcactgcgtagagcctggaagggaagtgagaaaccagccgaccggccctgcccctcttcccgggatcacttaatgaaccacgtgttttgacatcatgtaaacctaagcacgtagagatgattcggatttgacaaaataacatttgagtatccgattcgccatcaccccctaccccagaaataggacaattcacttcattgaccaggatgatcacatggaaggcggcgcagaggcagctgtgtgggctgcagatttcctgtgtggggttcagcgtagaaaacgcacctccatcccgcccttcccacagcattcctccatcttagatagatggtactctccaaaggccctaccagagggaacacggcctactgagcggacagaatgatgccaaaatattgcttatgtctctacatggtattgtaatgaatatctgctttaatatagctatcatttcttttccaaaattacttctctctatctggaatttaattaatcgaaatgaatttatctgaatataggaagcatatgcctacttgtaatttctaactccttatgtttgaagagaaacctccggtgtgagatatacaaatatatttaattgtgtcatattaaacttctgattcaaaaaaaa

SEQ ID NO: 701 - protein, 1015 aa, Homo sapiens
MGPPLPLLLLLLLLLPPRVLPAAPSSVPRGRQLPGRLGCLLEEGLCGASEACVNDGVFGRCQKVPAMDFYRYEVSPVALQRLRVALQKLSGTGFTWQDDYTQYVMDQELADLPKTYLRRPEASSPARPSKHSVGSERRYSREGGAALANALRRHLPFLEALSQAPASDVLARTHTAQDRPPAEGDDRFSESILTYVAHTSALTYPPGPRTQLREDLLPRTLGQLQPDELSPKVDSGVDRHHLMAALSAYAAQRPPAPPGEGSLEPQYLLRAPSRMPRPLLAPAAPQKWPSPLGDSEDPSSTGDGARIHTLLKDLQRQPAEVRGLSGLELDGMAELMAGLMQGVDHGVARGSPGRAALGESGEQADGPKATLRGDSFPDDGVQDDDDRLYQEVHRLSATLGGLLQDHGSRLLPGALPFARPLDMERKKSEHPESSLSSEEETAGVENVKSQTYSKDLLGQQPHSEPGAAAFGELQNQMPGPSKEEQSLPAGAQEALSDGLQLEVQPSEEEARGYIVTDRDPLRPEEGRRLVEDVARLLQVPSSAFADVEVLGPAVTFKVSANVQNVTTEDVEKATVDNKDKLEETSGLKILQTGVGSKSKLKFLPPQAEQEDSTKFIALTLVSLACILGVLLASGLIYCLRHSSQHRLKEKLSGLGGDPGADATAAYQELCRQRMATRPPDRPEGPHTSRISSVSSQFSDGPIPSPSARSSASSWSEEPVQSNMDISTGHMILSYMEDHLKNKNRLEKEWEALCAYQAEPNSSFVAQREENVPKNRSLAVLTYDHSRVLLKAENSHSHSDYINASPIMDHDPRNPAYIATQGPLPATVADFWQMVWESGCVVIVMLTPLAENGVRQCYHYWPDEGSNLYHIYEVNLVSEHIWCEDFLVRSFYLKNLQTNETRTVTQFHFLSWYDRGVPSSSRSLLDFRRKVNKCYRGRSCPIIVHCSDGAGRSGTYVLIDMVLNKMAKGAKEIDIAATLEHLRDQRPGMVQTKEQFEFALTAVAEEVNAILKALPQ

SEQ ID NO: 702 - DNA, 4716 bp, Homo sapiens
gcctcccgccgcctcccgcgcggccatggactgagcgccgccggccaggccgcggggatggggccgccgctcccgctgctgctgctgctactgctgctgctgccgccacgcgtcctgcctgccgccccttcgtccgtcccccgcggccggcagctcccggggcgtctggatggagtgtttggaaggtgccagaaggttccggcaatggacttttaccgctacgaggtgtcgcccgtggccctgcagcgcctgcgcgtggcgttgcagaagctttccggcacaggtttcacgtggcaggatgactatactcagtatgtgatggaccaggaacttgcagacctcccgaaaacctacctgaggcgtcctgaagcatccagcccagccaggccctcaaaacacagcgttggcagcgagaggaggtacagtcgggagggcggtgctgccctggccaacgccctccgacgccacctgcccttcctggaggccctgtcccaggccccagcctcagacgtgctcgccaggacccatacggcgcaggacagaccccccgctgagggtgatgaccgcttctccgagagcatcctgacctatgtggcccacacgtctgcgctgacctaccctcccgggccccggacccagctccgcgaggacctcctgccgcggaccctcggccagctccagccagatgagctcagccctaaggtggacagtggtgtggacagacaccatctgatggcggccctcagtgcctatgctgcccagaggcccccagctccccccggggagggcagcctggagccacagtaccttctgcgtgcaccctcaagaatgcccaggcctttgctggcaccagccgccccccagaagtggccttcacctctgggagattccgaagacccctctagcacaggcgatggagcacggattcataccctcctgaaggacctgcagaggcagccggctgaggtgaggggcctgaatggcctggagctggacggcatggccgagctgatggctggcctgatgcaaggcgtggaccatggagtagctcgaggcagccctgggagagcggccctgggagagtctggagaacaggcggatggccccaaggccaccctccgtggagacagctttccagatgacggagtgcaggacgacgatgatagactttaccaagaggtccatcgtctgagtgccacactcgggggcctcctgcaggaccacgggtctcgactcttacctggagccctcccctttgcaaggcccctcgacatggagaggaagaagtccgagcaccctgagtcttccctgtcttcagaagaggagactgccggagtggagaacgtcaagagccagacgtattccaaagatctgctggggcagcagccgcattcggagcccggggccgctgcgtttggggagctccaaaaccagatgcctgggccctcgaaggaggagcagagccttccagcgggtgctcaggaggccctcagcgacggcctgcaattggaggtccagccttccgaggaagaggcgcggggctacatcgtgacagacagagaccccctgcgccccgaggaaggaaggcggctggtggaggacgtcgcccgcctcctgcaggtgcccagcagtgcgttcgctgacgtggaggttctcggaccagcagtgaccttcaaagtgagcgccaatgtccaaaacgtgaccactgaggatgtggagaaggccacagttgacaacaaagacaaactggaggaaacctctggactgaaaattcttcaaaccggagtcgggtcgaaaagcaaactcaagttcctgcctcctcaggcggagcaagaagactccaccaagttcatcgcgctcaccctggtctccctcgcctgcatcctgggcgtcctcctggcctctggcctcatctactgcctccgccatagctctcagcacaggctgaaggagaagctctcgggactagggggcgacccaggtgcagatgccactgccgcctaccaggagctgtgccgccagcgtatggccacgcggccaccagaccgacctgagggcccgcacacgtcacgcatcagcagcgtctcatcccagttcagcgacgggccgatccccagcccctccgcacgcagcagcgcctcatcctggtccgaggagcctgtgcagtccaacatggacatctccaccggccacatgatcctgtcctacatggaggaccacctgaagaacaagaaccggctggagaaggagtgggaagcgctgtgcgcctaccaggcggagcccaacagctcgttcgtggcccagagggaggagaacgtgcccaagaaccgctccctggctgtgctgacctatgaccactcccgggtcctgctgaaggcggagaacagccacagccactcagactacatcaacgctagccccatcatggatcacgacccgaggaaccccgcgtacatcgccacccagggaccgctgcccgccaccgtggctgacttttggcagatggtgtgggagagcggctgcgtggtgatcgtcatgctgacacccctcgcggagaacggcgtccggcagtgctaccactactggccggatgaaggctccaatctctaccacatctatgaggtgaacctggtctccgagcacatctggtgtgaggacttcctggtgaggagcttctatctgaagaacctgcagaccaacgagacgcgcaccgtgacgcagttccacttcctgagttggtatgaccgaggagtcccttcctcctcaaggtccctcctggacttccgcagaaaagtaaacaagtgctacaggggccgttcttgtccaataattgttcattgcagtgacggtgcaggccggagcggcacctacgtcctgatcgacatggttctcaacaagatggccaaaggtgctaaagagattgatatcgcagcgaccctggagcacttgagggaccagagacccggcatggtccagacgaaggagcagtttgagttcgcgctgacagccgtggctgaggaggtgaacgccatcctcaaggcccttccccagtgagcggcagcctcaggggcctcaggggagcccccaccccacggatgttgtcaggaatcatgatctgactttaattgtgtgtcttctattataactgcatagtaatagggcccttagctctcccgtagtcagcgcagtttagcagttaaaagtgtatttttgtttaatcaaacaataataaagagagatttgtggaaaaatccagttacgggtggaggggaatcggttcatcaattttcacttgcttaaaaaaaatactttttcttaaagcacccgttcaccttcttggttgaagttgtgttaacaatgcagtagccagcacgttcgaggcggtttccaggaagagtgtgcttgtcatctgccactttcgggagggtggatccactgtgcaggagtggccggggaagctggcagcactcagtgaggccgcccggcacacaaggcacgtttggcatttctctttgagagagtttatcattgggagaagccgcggggacagaactgaacgtcctgcagcttcggggcaagtgagacaatcacagctcctcgctgcgtctccatcaacactgcgccgggtaccatggacggccccgtcagccacacctgtcagcccaagcagagtgattcaggggctccccgggggcagacacctgtgcaccccatgagtagtgcccacttgaggctggcactcccctgacctcacctttgcaaagttacagatgcaccccaacattgagatgtgtttttaatgttaaaatattgatttctacgttatgaaaacagatgcccccgtgaatgcttacctgtgagataaccacaaccaggaagaacaaatctgggcattgagcaagctatgagggtccccgggagcacacgaaccctgccaggcccccgctggctcctccaggcacgtcccggacctgtggggccccagagaggggacatttccctcctgggagagaaggagatcagggcaactcggagagggctgcgagcatttccctcccgggagaggagatcagggcgacctgcacgcactgcgtagagcctggaagggaagtgagaaaccagccgaccggccctgcccctcttcccgggatcacttaatgaaccacgtgttttgacatcatgtaaacctaagcacgtagagatgattcggatttgacaaaataacatttgagtatccgattcgccatcaccccctaccccagaaataggacaattcacttcattgaccaggatgatcacatggaaggcggcgcagaggcagctgtgtgggctgcagatttcctgtgtggggttcagcgtagaaaacgcacctccatcccgcccttcccacagcattcctccatcttagatagatggtactctccaaaggccctaccagagggaacacggcctactgagcggacagaatgatgccaaaatattgcttatgtctctacatggtattgtaatgaatatctgctttaatatagctatcatttcttttccaaaattacttctctctatctggaatttaattaatcgaaatgaatttatctgaatataggaagcatatgcctacttgtaatttctaactccttatgtttgaagagaaacctccggtgtgagatatacaaatatatttaattgtgtcatattaaacttctgattcaaaaaaaa

SEQ ID NO: 703 - protein, 998 aa, Homo sapiens
MGPPLPLLLLLLLLLPPRVLPAAPSSVPRGRQLPGRLDGVFGRCQKVPAMDFYRYEVSPVALQRLRVALQKLSGTGFTWQDDYTQYVMDQELADLPKTYLRRPEASSPARPSKHSVGSERRYSREGGAALANALRRHLPFLEALSQAPASDVLARTHTAQDRPPAEGDDRFSESILTYVAHTSALTYPPGPRTQLREDLLPRTLGQLQPDELSPKVDSGVDRHHLMAALSAYAAQRPPAPPGEGSLEPQYLLRAPSRMPRPLLAPAAPQKWPSPLGDSEDPSSTGDGARIHTLLKDLQRQPAEVRGLNGLELDGMAELMAGLMQGVDHGVARGSPGRAALGESGEQADGPKATLRGDSFPDDGVQDDDDRLYQEVHRLSATLGGLLQDHGSRLLPGALPFARPLDMERKKSEHPESSLSSEEETAGVENVKSQTYSKDLLGQQPHSEPGAAAFGELQNQMPGPSKEEQSLPAGAQEALSDGLQLEVQPSEEEARGYIVTDRDPLRPEEGRRLVEDVARLLQVPSSAFADVEVLGPAVTFKVSANVQNVTTEDVEKATVDNKDKLEETSGLKILQTGVGSKSKLKFLPPQAEQEDSTKFIALTLVSLACILGVLLASGLIYCLRHSSQHRLKEKLSGLGGDPGADATAAYQELCRQRMATRPPDRPEGPHTSRISSVSSQFSDGPIPSPSARSSASSWSEEPVQSNMDISTGHMILSYMEDHLKNKNRLEKEWEALCAYQAEPNSSFVAQREENVPKNRSLAVLTYDHSRVLLKAENSHSHSDYINASPIMDHDPRNPAYIATQGPLPATVADFWQMVWESGCVVIVMLTPLAENGVRQCYHYWPDEGSNLYHIYEVNLVSEHIWCEDFLVRSFYLKNLQTNETRTVTQFHFLSWYDRGVPSSSRSLLDFRRKVNKCYRGRSCPIIVHCSDGAGRSGTYVLIDMVLNKMAKGAKEIDIAATLEHLRDQRPGMVQTKEQFEFALTAVAEEVNAILKALPQ

SEQ ID NO: 704 - DNA, 4680 bp, Homo sapiens
gcctcccgccgcctcccgcgcggccatggactgagcgccgccggccaggccgcggggatggggccgccgctcccgctgctgctgctgctactgctgctgctgccgccacgcgtcctgcctgccgccccttcgtccgtcccccgcggccggcagctcccggggcgtctgggctgcctgctcgaggagggcctctgcggagcgtccgaggcctgtgtgaacgatggagtgtttggaaggtgccagaaggttccggcaatggacttttaccgctacgaggtgtcgcccgtggccctgcagcgcctgcgcgtggcgttgcagaagctttccggcacaggtttcacgtggcaggatgactatactcagtatgtgatggaccaggaacttgcagacctcccgaaaacctacctgaggcgtcctgaagcatccagcccagccaggccctcaaaacacagcgttggcagcgagaggaggtacagtcgggagggcggtgctgccctggccaacgccctccgacgccacctgcccttcctggaggccctgtcccaggccccagcctcagacgtgctcgccaggacccatacggcgcaggacagaccccccgctgagggtgatgaccgcttctccgagagcatcctgacctatgtggcccacacgtctgcgctgacctaccctcccgggccccggacccagctccgcgaggacctcctgccgcggaccctcggccagctccagccagatgagctcagccctaaggtggacagtggtgtggacagacaccatctgatggcggccctcagtgcctatgctgcccagaggcccccagctccccccggggagggcagcctggagccacagtaccttctgcgtgcaccctcaagaatgcccaggcctttgctggcaccagccgccccccagaagtggccttcacctctgggagattccgaagacccctctagcacaggcgatggagcacggattcataccctcctgaaggacctgcagaggcagccggctgaggtgaggggcctgagtggcctggagctggacggcatggctgagctgatggctggcctgatgcaaggcgtggaccatggagtagctcgaggcagccctgggagagcggccctgggagagtctggagaacaggcggatggccccaaggccaccctccgtggagacagctttccagatgacggagtgcaggacgacgatgatagactttaccaagaggtccatcgtctgagtgccacactcgggggcctcctgcaggaccacgggtctcgactcttacctggagccctcccctttgcaaggcccctcgacatggagaggaagaagtccgagcaccctgagtcttccctgtcttcagaagaggagactgccggagtggagaacgtcaagagccagacgtattccaaagatctgctggggcagcagccgcattcggagcccggggccgctgcgtttggggagctccaaaaccagatgcctgggccctcgaaggaggagcagagccttccagcgggtgctcaggaggccctcagcgacggcctgcaattggaggtccagccttccgaggaagaggcgcggggctacatcgtgacagacagagaggttctcggaccagcagtgaccttcaaagtgagcgccaatgtccaaaacgtgaccactgaggatgtggagaaggccacagttgacaacaaagacaaactggaggaaacctctggactgaaaattcttcaaaccggagtcgggtcgaaaagcaaactcaagttcctgcctcctcaggcggagcaagaagactccaccaagttcatcgcgctcaccctggtctccctcgcctgcatcctgggcgtcctcctggcctctggcctcatctactgcctccgccatagctctcagcacaggctgaaggagaagctctcgggactagggggcgacccaggtgcagatgccactgccgcctaccaggagctgtgccgccagcgtatggccacgcggccaccagaccgacctgagggcccgcacacgtcacgcatcagcagcgtctcatcccagttcagcgacgggccgatccccagcccctccgcacgcagcagcgcctcatcctggtccgaggagcctgtgcagtccaacatggacatctccaccggccacatgatcctgtcctacatggaggaccacctgaagaacaagaaccggctggagaaggagtgggaagcgctgtgcgcctaccaggcggagcccaacagctcgttcgtggcccagagggaggagaacgtgcccaagaaccgctccctggctgtgctgacctatgaccactcccgggtcctgctgaaggcggagaacagccacagccactcagactacatcaacgctagccccatcatggatcacgacccgaggaaccccgcgtacatcgccacccagggaccgctgcccgccaccgtggctgacttttggcagatggtgtgggagagcggctgcgtggtgatcgtcatgctgacacccctcgcggagaacggcgtccggcagtgctaccactactggccggatgaaggctccaatctctaccacatctatgaggtgaacctggtctccgagcacatctggtgtgaggacttcctggtgaggagcttctatctgaagaacctgcagaccaacgagacgcgcaccgtgacgcagttccacttcctgagttggtatgaccgaggagtcccttcctcctcaaggtccctcctggacttccgcagaaaagtaaacaagtgctacaggggccgttcttgtccaataattgttcattgcagtgacggtgcaggccggagcggcacctacgtcctgatcgacatggttctcaacaagatggccaaaggtgctaaagagattgatatcgcagcgaccctggagcacttgagggaccagagacccggcatggtccagacgaaggagcagtttgagttcgcgctgacagccgtggctgaggaggtgaacgccatcctcaaggcccttccccagtgagcggcagcctcaggggcctcaggggagcccccaccccacggatgttgtcaggaatcatgatctgactttaattgtgtgtcttctattataactgcatagtaatagggcccttagctctcccgtagtcagcgcagtttagcagttaaaagtgtatttttgtttaatcaaacaataataaagagagatttgtggaaaaatccagttacgggtggaggggaatcggttcatcaattttcacttgcttaaaaaaaatactttttcttaaagcacccgttcaccttcttggttgaagttgtgttaacaatgcagtagccagcacgttcgaggcggtttccaggaagagtgtgcttgtcatctgccactttcgggagggtggatccactgtgcaggagtggccggggaagctggcagcactcagtgaggccgcccggcacacaaggcacgtttggcatttctctttgagagagtttatcattgggagaagccgcggggacagaactgaacgtcctgcagcttcggggcaagtgagacaatcacagctcctcgctgcgtctccatcaacactgcgccgggtaccatggacggccccgtcagccacacctgtcagcccaagcagagtgattcaggggctccccgggggcagacacctgtgcaccccatgagtagtgcccacttgaggctggcactcccctgacctcacctttgcaaagttacagatgcaccccaacattgagatgtgtttttaatgttaaaatattgatttctacgttatgaaaacagatgcccccgtgaatgcttacctgtgagataaccacaaccaggaagaacaaatctgggcattgagcaagctatgagggtccccgggagcacacgaaccctgccaggcccccgctggctcctccaggcacgtcccggacctgtggggccccagagaggggacatttccctcctgggagagaaggagatcagggcaactcggagagggctgcgagcatttccctcccgggagaggagatcagggcgacctgcacgcactgcgtagagcctggaagggaagtgagaaaccagccgaccggccctgcccctcttcccgggatcacttaatgaaccacgtgttttgacatcatgtaaacctaagcacgtagagatgattcggatttgacaaaataacatttgagtatccgattcgccatcaccccctaccccagaaataggacaattcacttcattgaccaggatgatcacatggaaggcggcgcagaggcagctgtgtgggctgcagatttcctgtgtggggttcagcgtagaaaacgcacctccatcccgcccttcccacagcattcctccatcttagatagatggtactctccaaaggccctaccagagggaacacggcctactgagcggacagaatgatgccaaaatattgcttatgtctctacatggtattgtaatgaatatctgctttaatatagctatcatttcttttccaaaattacttctctctatctggaatttaattaatcgaaatgaatttatctgaatataggaagcatatgcctacttgtaatttctaactccttatgtttgaagagaaacctccggtgtgagatatacaaatatatttaattgtgtcatattaaacttctgattcaaaaaaaa

SEQ ID NO: 705 - protein, 986 aa, Homo sapiens
MGPPLPLLLLLLLLLPPRVLPAAPSSVPRGRQLPGRLGCLLEEGLCGASEACVNDGVFGRCQKVPAMDFYRYEVSPVALQRLRVALQKLSGTGFTWQDDYTQYVMDQELADLPKTYLRRPEASSPARPSKHSVGSERRYSREGGAALANALRRHLPFLEALSQAPASDVLARTHTAQDRPPAEGDDRFSESILTYVAHTSALTYPPGPRTQLREDLLPRTLGQLQPDELSPKVDSGVDRHHLMAALSAYAAQRPPAPPGEGSLEPQYLLRAPSRMPRPLLAPAAPQKWPSPLGDSEDPSSTGDGARIHTLLKDLQRQPAEVRGLSGLELDGMAELMAGLMQGVDHGVARGSPGRAALGESGEQADGPKATLRGDSFPDDGVQDDDDRLYQEVHRLSATLGGLLQDHGSRLLPGALPFARPLDMERKKSEHPESSLSSEEETAGVENVKSQTYSKDLLGQQPHSEPGAAAFGELQNQMPGPSKEEQSLPAGAQEALSDGLQLEVQPSEEEARGYIVTDREVLGPAVTFKVSANVQNVTTEDVEKATVDNKDKLEETSGLKILQTGVGSKSKLKFLPPQAEQEDSTKFIALTLVSLACILGVLLASGLIYCLRHSSQHRLKEKLSGLGGDPGADATAAYQELCRQRMATRPPDRPEGPHTSRISSVSSQFSDGPIPSPSARSSASSWSEEPVQSNMDISTGHMILSYMEDHLKNKNRLEKEWEALCAYQAEPNSSFVAQREENVPKNRSLAVLTYDHSRVLLKAENSHSHSDYINASPIMDHDPRNPAYIATQGPLPATVADFWQMVWESGCVVIVMLTPLAENGVRQCYHYWPDEGSNLYHIYEVNLVSEHIWCEDFLVRSFYLKNLQTNETRTVTQFHFLSWYDRGVPSSSRSLLDFRRKVNKCYRGRSCPIIVHCSDGAGRSGTYVLIDMVLNKMAKGAKEIDIAATLEHLRDQRPGMVQTKEQFEFALTAVAEEVNAILKALPQ

SEQ ID NO: 706 - DNA, 597 bp, Homo sapiens
atggcaccgcggccacacttctcagctctcagcactgtccccgcgacggaggagccgccccagcacagctctaagcgctgtccccccgacagaggagctgccccagtctcactctcagcgctgtccccgacaacggaggagccgtcccagtctcagctctcagcgctgtccccgacgacggaggagctgccccagtctcactctcagcgctgtccccccgacagaggagctaccccagtctcagctctcagcgctgtccccgacaacggaggagccgtcccagtctcagctctcagcgctgtcccccacgacggaggagccgccccactctcagctctcagcgctgtcccccacgacggaggagccaccccagtctcactctcagcgctgtcccccacgacggaggagccaccccagtctcactctcagcactgtcccccacgacggaggagccgccccagtctcagctctcagcgctgtccccgacgacggaggagccgccccagcacatccagcgacatggcaggggcaccatcctgggaggctccggacacaggagttacctggacccagcaggggaaacacagctgctgctaa

SEQ ID NO: 707 - protein, 198 aa, Homo sapiens
MAPRPHFSALSTVPATEEPPQHSSKRCPPDRGAAPVSLSALSPTTEEPSQSQLSALSPTTEELPQSHSQRCPPDRGATPVSALSAVPDNGGAVPVSALSAVPHDGGAAPLSALSAVPHDGGATPVSLSALSPTTEEPPQSHSQHCPPRRRSRPSLSSQRCPRRRRSRPSTSSDMAGAPSWEAPDTGVTWTQQGKHSCC

SEQ ID NO: 708 - DNA, 3958 bp, Homo sapiens
gtgcattgagcgcgctccagctgccgggacggagggggcggcccccgcgctcgggcgctcggctacagctgcggggcccgaggtctccgcgcactcgctcccggcccatgctggaggcggcggaaccgcggggacctaggacggaggcggcgggcgctgggcggcccccggcacgctgagctcgggatgcggacgctgctgcctcccgcgctgctgacctgctggctgctcgcccccgtgaacagcattcacccagaatgccgatttcatctggaaatacaggaggaagaaacaaaatgtgcagagcttctgaggtctcaaacagaaaaacacaaagcctgcagtggcgtctgggacaacatcacgtgctggcggcctgccaatgtgggagagaccgtcacggtgccctgcccaaaagtcttcagcaatttttacagcaaagcaggaaacataagcaaaaactgtacgagtgacggatggtcagagacgttcccagatttcgtcgatgcctgtggctacagcgacccggaggatgagagcaagatcacgttttatattctggtgaaggccatttataccctgggctacagtgtctctctgatgtctcttgcaacaggaagcataattctgtgcctcttcaggaagctgcactgcaccaggaattacatccacctgaacctgttcctgtccttcatcctgagagccatctcagtgctggtcaaggacgacgttctctactccagctctggcacgttgcactgccctgaccagccatcctcctgggtgggctgcaagctgagcctggtcttcctgcagtactgcatcatggccaacttcttctggctgctggtggaggggctctacctccacaccctcctggtggccatgctcccccctagaaggtgcttcctggcctacctcctgatcggatggggcctccccaccgtctgcatcggtgcatggactgcggccaggctctacttagaagacaccggttgctgggatacaaacgaccacagtgtgccctggtgggtcatacgaataccgattttaatttccatcatcgtcaattttgtccttttcattagtattatacgaattttgctgcagaagttaacatccccagatgtcggcggcaacgaccagtctcagtacaagaggctggccaagtccacgctcctgcttatcccgctgttcggcgtccactacatggtgtttgccgtgtttcccatcagcatctcctccaaataccagatactgtttgagctgtgcctcgggtcgttccagggcctggtggtggccgtcctctactgtttcctgaacagtgaggtgcagtgcgagctgaagcgaaaatggcgaagccggtgcccgaccccgtccgcgagccgggattacagggtctgcggttcctccttctcccgcaacggctcggagggcgccctgcagttccaccgcggctcccgcgcccagtccttcctgcaaacggagacctcggtcatctagccccacccctgcctgtcggacgcggcgggaggcccacggttcggggcttctgcggggctgagacgccggcttcctccttccagatgcccgagcaccgtgtcgggcaggtcagcgcggtcctgactccgtcaagctggttgtccactaaaccccatacctggaattggagtcgtgttgtcattgactcgatttaaactccagcatttagataatcttgtgcaaaatgtgtttcagccgtatagtggatccacttttttttttttttttttttgagacggagtcttgctctgtcgcccaggctggagtgcagtggcctgatctctgctccctgcaagctccgcctcccgggttcacgccattctcctgcctcagcctcccatagctgggactacaggcgcccgccaacacgcctggctaattttttgtatttttagtagagacagggtttcaccatgttagccaggatggtctcgatctcctgacctcgtgatgggcccgcctcggcctcccaaagtgctgggattaaggcgtgagccactgcgcccggcccaagagaataggggagccaaggaggaaatgtggaaacgcagttgtgtggcccagcacgagcctgggcgaccaccgggtgacatccgtcccacatcagggcggcctcccaggtcccataagggtagccccctcatctgcaggacagagggaagccagtcagggcccccccgacgttaggaccaggagaaatcaacaggagggcagcccgtcctctctcttggggcgcccacccggcccggctgagccctgccccacccaactccacagggctgttttgcctccccacggaaggcgggctgaggagacaaccagatcaggagagcaaggtcatgaaggaggggacctctccacacaggtgttccgtgggaccctcagcagctctggctctgcctcaggaggtcacctgccgccctgtgggagccgcagagcctgacgctcagccccaggccagctgcggccaggcctgcgggcccctggtgatggggttacgtggggtgcgggatacagctgagtgggaaccggaaacctattctctttttaacaaaaataatcttaggataagaattattttaacaacatataaaactgtttcaagccctcctccccagagctggcgctcagcagccctagcggctgctccttcaggcgaagggtggtttgcagatgtggggagggtgtctggggacgttgctgagctggctgcagaagggtggggatatcagggcacagtctccatgtgtgtgccaagccctggcccccacagcgctcgatggacctcagcaagctgcccagccctggcccaggtgccccgactgtgggactcagttgttctgagcacatttgactccacttttcctttaaaaatgaatgtcttgttcctgtgcattggtggcatcacagaccccagctggggcgcgatgtcaaaggtcgggacagctgtgccgggaggcagccacagggaagctcacacatcctgtcagtgtcaccttggtttgcaaaacccatatccccggtaaaatgaggccggacagaggggctgttaggacagcaaagcagcagtgtccagagacccctcaatccccaaaggtccgcaccctgtcctgcacaccctgggccacgccggccacacccctctgctgcaacaagctcatccctggacttctgggagaatgaacccgaggttggtttggggagacaggtgaggcggttggatctacagaacaacccaccatttctgggggccgcagaggatccatcacagacggatactggggagtaaacggcccaggccaggtgcccaggaaaggacggctgagcatgtggagcgagagggaggcaggtggacgctgcagaccccaggttcagtgcggcccctcggctgttcctcccctgtagggtttggacagacccacccccagccttgcccagctttcaaaggacaaaagggagcatcccccacctactctcaggtttttgaggaaacaaagatttgtggtaactgaaggtgttgggtcagtggccaggtgccgacactgagctgtgacccagaggggacgctgaggaagtgggcgtgagtggacatgtcaggtggttaccaggcactggttgttgatggtcggtggttgggtgtgggcagtcatcagtcatcaggtgtgctcaggggacaatctcccctcaaccgcacatgtgccactgttcagcggagctgactggtttctcctggtagagggccggctgtatcctgacagatgcctggtgagcaggggaagcaggacccagtggtcaacaggtgtctttaactgtcattgtgtgtggaatgtcgcagactcctccacgtggcgggaatgagctgtgtaaatacttcaataaagcctgacttcacatctgcaaaaaaaaaaaaaaaaaa

SEQ ID NO: 709 - protein, 438 aa, Homo sapiens
MRTLLPPALLTCWLLAPVNSIHPECRFHLEIQEEETKCAELLRSQTEKHKACSGVWDNITCWRPANVGETVTVPCPKVFSNFYSKAGNISKNCTSDGWSETFPDFVDACGYSDPEDESKITFYILVKAIYTLGYSVSLMSLATGSIILCLFRKLHCTRNYIHLNLFLSFILRAISVLVKDDVLYSSSGTLHCPDQPSSWVGCKLSLVFLQYCIMANFFWLLVEGLYLHTLLVAMLPPRRCFLAYLLIGWGLPTVCIGAWTAARLYLEDTGCWDTNDHSVPWWVIRIPILISIIVNFVLFISIIRILLQKLTSPDVGGNDQSQYKRLAKSTLLLIPLFGVHYMVFAVFPISISSKYQILFELCLGSFQGLVVAVLYCFLNSEVQCELKRKWRSRCPTPSASRDYRVCGSSFSRNGSEGALQFHRGSRAQSFLQTETSVI

SEQ ID NO: 710 - DNA, 1836 bp, Homo sapiens
ccggaaggcacggcgctcagctcaggaccgcgcgccgtggtctgaggtccgcggcagggtcccgcatggcggcgcacaggaagcacgtgtttgtggagaaggtgctgcagagactttttcctcctgttccaagtggccaaggaaagagggaaccccagacgctggccgtccaaaatccaccaaagaaagtgacctctgagaaagtgagccagaaacatgctgagcctttgacagacactggctctgagaccccgactgcccgacggctctacactgccagcgggcctcctgagggctacgtcccctgttggccggagcccagcagctgtgggagccccgagaacgcctccagcggggatgacacagaagatcaggatcctcatgaccagccaaagagaagaagaattaggaagcataaatcaaagaaaaaatttaaaaatcccaataatgttcttatagaacaagcagaattagagaaacagcagagtctgttacaggagaaatctcagcgacagcacacagatggcaccacaataagcaaaaataaaaaaaggaaactgaaaaagaaacagcaaattaaaaggaagaaagcagccggcttggcagcaaaggctgctggtgtcagtttcatgtaccagcccgaggacagcagcaatgaaggggaaggcgtgggagaggcttgtgaggaggatggtgtggacaccagcgaggaagacccgacactggccggggaggaagacgttaaagataccagggaggaagatggtgcggacgctagcgaggaagacctgacacgggccaggcaggaagagggtgcggacgccagtgaggaagatccgacaccggccggggaggaagacgttaaagacgccagggaggaggacggtgtggacaccattgaggaagacctgacacgggccggggaggaagacggtaaagacaccagggaggaggacggtgcggacgccagcgaggaagacccgacatgggctggggaggaagagggtgcagactccggggaggaggacggtgcagacgccagcgaggaagatgatacaattaccaatgaaaaggcacacagtattctaaattttttgaagtcaacacaggaaatgtatttttatgacggtgtctccagagatgcagcttcagctgccctcgcagatgccgctgaggagctgctggaccgcctcgcgtcacacagcatgctgccctcagacgtgtccatcctgtaccacatgaaaacgctgctgctcctgcaagatactgagagattgaagcatgctctggaaatgttcccagaacattgcacgatgcctcctgaccatgccagagtaatctcagctttctttagttactggatcacacatatccttcctgagaagagcagtgactaaaatggaatatctctttaagaacagctcctctttaacaaaaaaacttaaaagacaaatgtgagatgggcttagagttagttctctgggaacttgaaagacatttatgccatattatttattcacgtgtttgttcctggtgggcaagatgccatctgaggcttcagatgagaaattggggtaaaatggaaatttttcacttatttgcaattatatatatcttgaattactacataaaacttgattctgtttctctacttattgtaaaaattgaaaatggacattctgttaagttaaatgtatagtttgaagctcatatatttttatgaagttttgaatcaccttgtatctgaaagtctctgctttaagaatgctttctgggtattaaaatgttctagtttaagtaaaaaaaaaaaaaaaaaaaaaaaaaaaaaaaaaaaaa

SEQ ID NO: 711 - protein, 443 aa, Homo sapiens
MAAHRKHVFVEKVLQRLFPPVPSGQGKREPQTLAVQNPPKKVTSEKVSQKHAEPLTDTGSETPTARRLYTASGPPEGYVPCWPEPSSCGSPENASSGDDTEDQDPHDQPKRRRIRKHKSKKKFKNPNNVLIEQAELEKQQSLLQEKSQRQHTDGTTISKNKKRKLKKKQQIKRKKAAGLAAKAAGVSFMYQPEDSSNEGEGVGEACEEDGVDTSEEDPTLAGEEDVKDTREEDGADASEEDLTRARQEEGADASEEDPTPAGEEDVKDAREEDGVDTIEEDLTRAGEEDGKDTREEDGADASEEDPTWAGEEEGADSGEEDGADASEEDDTITNEKAHSILNFLKSTQEMYFYDGVSRDAASAALADAAEELLDRLASHSMLPSDVSILYHMKTLLLLQDTERLKHALEMFPEHCTMPPDHARVISAFFSYWITHILPEKSSD

SEQ ID NO: 712 - DNA, 811 bp, Homo sapiens
agcgcggtctgagcgcgcggcgcctgcggcggcgaacggacggacggaccgcggacggacgtactgaccccaacccgcgagccccgggagccgtcggtctgaggaggggccgcttcgccatgtcgccccgcacctgctgagcccggagcgtccgaggatgtccgcgctgaggaaggctttctcgccatccgaggcttggccctagccctgcgcggcttccctcgcggctgctaaccctctgcctgcgcccagcccagccacaatggggactgctcaggttttgcctggcattctgcagaagcattgctgtatcttaccagacaggaatacaggccgtctccaaactatagtcctattggactggtgcaccaaatatggatttggggtgtgcgtaattcagtccatagcacccaccaaaccacagaagctgccccgagctgatgtcccgctatcggtgcggctgcaggacactgtcccattgctgcatggagcctctcgctgtctgagcctcacctgaagccggcccacaccattttcttactctatgcattggagcgaaaatgtttaattgactacgatgggtgattcctaaagttatatttgactcagaaaaaaatgcattagtaaaactccctgtttgaatgtttctagtattcacagcccgggtcactgtctttctataacgattggtatctgaaataagaacatgggctgcaacttacagccttgctctttctactatataaacttccctaatcaaatatttttcattaaaaaaatgtgtttttggaaataaacagttacaacctgg

SEQ ID NO: 713 - protein, 84 aa, Homo sapiens
MGTAQVLPGILQKHCCILPDRNTGRLQTIVLLDWCTKYGFGVCVIQSIAPTKPQKLPRADVPLSVRLQDTVPLLHGASRCLSLT

SEQ ID NO: 714 - DNA, 3549 bp, Homo sapiens
cccttgtggagcccgagctctcattcacagctttctagagaaatctgagcccgaacctgccagaataggggatctcacccacccagttcagcagcgaggacacctgcagaaatacattcccaaagcaaggctgggcggccgtgtgaagtaagcaatggcctcagttttgcttctgttttggatgaacaccaccacatagggcctgaatgtgaaagaagaccctctatttgtctgttccggggcagcctggtagtaaaacactgttgaatgggccacagtttcagcagaccatcaggtgaatgggaccagtctctcttcttccaaaatatcagaagttaaacacttggaacggagatttggccaagatgacccatttacaggctggactcagtccagagactatagagaaagctcgcctggaactgaatgaaaaccccgatgttttacatcaggatattcagcaagtcagggacatgatcatcaccaggcctgacattggatttttacgtacagatgatgccttcatcctgagatttctccgagccaggaagtttcaccaagcggatgcctttagactcctggctcagtatttccagtaccgccagctaaacctggacatgttcaaaaacttcaaggcagatgatcccggcattaagagggctctgatcgatgggttccccggggtgctggaaaaccgagaccattacggcaggaagattcttttgctgtttgcagccaattgggatcagagtaggaactccttcacagacatccttcgtgccatcctgctgtcattggaagtcctaatcgaagatccggagcttcagataaatggcttcattttaattatagactggagtaatttttccttcaaacaagcctccaaactgacaccttcaatccttaaactggccattgaagggttgcaggacagctttcctgcccgctttggaggagtccactttgtcaaccagccctggtacattcatgccctctacacactcatcaagccatttcttaaagacaagaccaggaaacggattttcctgcatggaaacaatttaaacagccttcaccagctaatacaccctgaatttttgccctctgaatttggaggaactcttcctccttatgacatgggaacttgggcccggacgttactcggtcccgactacagcgatgaaaatgactatactcacacatcctataatgcaatgcacgtgaagcatacgtcctcgaatctggagagagaatgctcacccaagctgatgaaaagatctcagtctgtggtagaagctgggaccctgaaacatgaggagaagggagagaatgagaacacccagccactcctggctctggactgaaccctgagtcaccccaatgctcctgcacactggccttcagtggtatcagccacccaggaagcacatgcacaactgacccatgcagacacgtgtgttctgcttgacacaaggtcctccactcctgaacccctgcagtgactgtcaccagccatcggtctgagcagccaaagttggacaaagacttgagagatgcttttttttccccccagtgaggggactggaggatgatgcaaggcatttatgtaaaaaagattctccctcctttcatatttattgtagtaaattgaaaaaataaagactaaatttgatggacacactgcattaggacaagaatttttctgaggtatcacacagggaccctctccagtttttgaaaattaagtgcatttccaagtaaatgtatcagagttaaactgtacagacaccactgtcaagtttcatgtagtacaaagccctgagacaatagtatctccagtaatttccattcttactgaattatttcctttgacctcatcaccagcatcgaattgttcagcctaagagcatgttctcataggtctgggtatttgcaaagtttgcttattttgatgatatcctgcaaaaaattattttgatgtcacatctcttgtcaggtcactagctgactgtcatgagctgacgttaaaggaagacacatggacgtgaaatacgattatttcatctgagcaatgtgagttaccacaggcagctcaaaagcccattagtgcagcatgtgtctgcagaggagatgtctcatgaaaatcacatgtcagtgattaatgaatccattccagttgcctcaactgggtcactacagcaaagaaaagtgctatcaaaccatttacccttgcccccacaaccctcctgcaaccattaaagatgtggagaaagaccatggttgttgctgagagggtaaatattcaatcatggagcatgacccatatggatggctaaatatgcaagtactgaagtaagagaagactagaaatgcaggatgaaatgtcaaaggtcattttatttacctagtctccttagaaatggagtccccaactactcattcaaaagaaatcagacataaaatagacatcatatatgatatccttacttgtgccatgttttccaagaccagtgcatatttttagacatctcttattcgcccagccatctgcatgacatgggtatttattagtattaccagttggtgctcaaagtcaaacaaaaatattttagttaataatgggcagtaaaatatgattttacattattttaaatatttgggagagttaatttgttagctaaataattcaagggaaagagattattcaactggtcataatcacccctgataatattattactaatcttaattatttattacatcatctctttctcaatggatctaatgttttaattttttcccctattggtagagaacaataacagaagtaatttttatattatacacttggagaaataaagttgaaacagaattaaaaatatttctcaaacaactgtatcacaatataaattaaactaattcatttttgtgtagacatacgaaatcacaaaaataataacactgaaataattctaccaatgcagtgatggaaacacttttcttatgtaccaagacatagataggtaagagaaataaagaattgaagtgaattagaaaatccattttattgcttgggtttaaaatagttgtgggatacaagtatttacaatgctattggagtcaattattgacaacactttgcaacagtaataccatttctagcttttcaattggcaatacttagaaccttactgtagtgacctgattttaaataccatattatatttactaagttaagagctagtttttactctcttccataatttcattacatgaatgtaagatgatggctcaaaaatgacgacttatagtttgaatttatgtgtatgcaatatacatatgagaaccaaattcaacaagtgacatgaatgttactacatgaacattgaattgtattgcccttgtcagttatttcctctgttcaataaatactgaaggtcacaaacacctttttacttttcaaaaaaaaaaaaaaaaaaaaaaaaaaaaaaaaaaaaaaaaaaaaaaaaaaaaaaaaaaaaaaaaaaaaaaaaaaaaaaaaaaaaaaaa

SEQ ID NO: 715 - protein, 354 aa, Homo sapiens
MGPVSLLPKYQKLNTWNGDLAKMTHLQAGLSPETIEKARLELNENPDVLHQDIQQVRDMIITRPDIGFLRTDDAFILRFLRARKFHQADAFRLLAQYFQYRQLNLDMFKNFKADDPGIKRALIDGFPGVLENRDHYGRKILLLFAANWDQSRNSFTDILRAILLSLEVLIEDPELQINGFILIIDWSNFSFKQASKLTPSILKLAIEGLQDSFPARFGGVHFVNQPWYIHALYTLIKPFLKDKTRKRIFLHGNNLNSLHQLIHPEFLPSEFGGTLPPYDMGTWARTLLGPDYSDENDYTHTSYNAMHVKHTSSNLERECSPKLMKRSQSVVEAGTLKHEEKGENENTQPLLALD

SEQ ID NO: 716 - DNA, 2452 bp, Homo sapiens
agctgcccgcgtcgcgtgtgtacccccgcgcactgaaggaggtccaccagccctcaccagcccccgcggaccgtgcaatggcccagcgtaagaatgccaagagcagcggcaacagcagcagcagcggctccggcagcggtagcacgagtgcgggcagcagcagccccggggcccggagagagacaaagcatggaggacacaagaatgggaggaaaggcggactctcaggaacttcattcttcacgtggtttatggtgattgcattgctgggcgtctggacatctgtagctgtcgtttggtttgatcttgttgactatgaggaagttctaggaaaactaggaatctatgatgctgatggtgatggagattttgatgtggatgatgccaaagttttattaggacttaaagagagatctacttcagagccagcagtcccgccagaagaggctgagccacacactgagcccgaggagcaggttcctgtggaggcagaaccccagaatatcgaagatgaagcaaaagaacaaattcagtcccttctccatgaaatggtacacgcagaacatgttgagggagaagacttgcaacaagaagatggacccacaggagaaccacaacaagaggatgatgagtttcttatggcgactgatgtagatgatagatttgagaccctggaacctgaagtatctcatgaagaaaccgagcatagttaccacgtggaagagacagtttcacaagactgtaatcaggatatggaagagatgatgtctgagcaggaaaatccagattccagtgaaccagtagtagaagatgaaagattgcaccatgatacagatgatgtaacataccaagtctatgaggaacaagcagtatatgaacctctagaaaatgaagggatagaaatcacagaagtaactgctccccctgaggataatcctgtagaagattcacaggtaattgtagaagaagtaagcatttttcctgtggaagaacagcaggaagtaccaccagaaacaaatagaaaaacagatgatccagaacaaaaagcaaaagttaagaaaaagaagcctaaacttttaaataaatttgataagactattaaagctgaacttgatgctgcagaaaaactccgtaaaaggggaaaaattgaggaagcagtgaatgcatttaaagaactagtacgcaaataccctcagagtccacgagcaagatatgggaaggcgcagtgtgaggatgatttggctgagaagaggagaagtaatgaggtgctacgtggagccatcgagacctaccaagaggtggccagcctacctgatgtccctgcagacctgctgaagctgagtttgaagcgtcgctcagacaggcaacaatttctaggtcatatgagaggttccctgcttaccctgcagagattagttcaactatttcccaatgatacttccttaaaaaatgaccttggcgtgggatacctcttgataggagataatgacaatgcaaagaaagtttatgaagaggtgctgagtgtgacacctaatgatggctttgctaaagtccattatggcttcatcctgaaggcacagaacaaaattgctgagagcatcccatatttaaaggaaggaatagaatccggagatcctggcactgatgatgggagattttatttccacctgggggatgccatgcagagggttgggaacaaagaggcatataagtggtatgagcttgggcacaagagaggacactttgcatctgtctggcaacgctcactctacaatgtgaatggactgaaagcacagccttggtggaccccaaaagaaacgggctacacagagttagtaaagtctttagaaagaaactggaagttaatccgagatgaaggccttgcagtgatggataaagccaaaggtctcttcctgcctgaggatgaaaacctgagggaaaaaggggactggagccagttcacgctgtggcagcaaggaagaagaaatgaaaatgcctgcaaaggagctcctaaaacctgtaccttactagaaaagttccccgagacaacaggatgcagaagaggacagatcaaatattccatcatgcaccccgggactcacgtgtggccgcacacagggcccacaaactgcaggctccgaatgcacctgggcttggtgattcccaaggaaggctgcaagattcgatgtgccaacgagaccaagacctgggaggaaggcaaggtgctcatctttgatgactcctttgagcacgaggtatggcaggatgcctcatctttccggctgatattcatcgtggatgtgtggcatccggaactgacaccacagcagagacgcagccttccagcaatttagcatgaattcatgcaagcttgggaaactctggagagaggctgcctttctggttccatctccttgggtgtgaggatagaatttcgaacaccaagagtcaa

SEQ ID NO: 717 - protein, 758 aa, Homo sapiens
MAQRKNAKSSGNSSSSGSGSGSTSAGSSSPGARRETKHGGHKNGRKGGLSGTSFFTWFMVIALLGVWTSVAVVWFDLVDYEEVLGKLGIYDADGDGDFDVDDAKVLLGLKERSTSEPAVPPEEAEPHTEPEEQVPVEAEPQNIEDEAKEQIQSLLHEMVHAEHVEGEDLQQEDGPTGEPQQEDDEFLMATDVDDRFETLEPEVSHEETEHSYHVEETVSQDCNQDMEEMMSEQENPDSSEPVVEDERLHHDTDDVTYQVYEEQAVYEPLENEGIEITEVTAPPEDNPVEDSQVIVEEVSIFPVEEQQEVPPETNRKTDDPEQKAKVKKKKPKLLNKFDKTIKAELDAAEKLRKRGKIEEAVNAFKELVRKYPQSPRARYGKAQCEDDLAEKRRSNEVLRGAIETYQEVASLPDVPADLLKLSLKRRSDRQQFLGHMRGSLLTLQRLVQLFPNDTSLKNDLGVGYLLIGDNDNAKKVYEEVLSVTPNDGFAKVHYGFILKAQNKIAESIPYLKEGIESGDPGTDDGRFYFHLGDAMQRVGNKEAYKWYELGHKRGHFASVWQRSLYNVNGLKAQPWWTPKETGYTELVKSLERNWKLIRDEGLAVMDKAKGLFLPEDENLREKGDWSQFTLWQQGRRNENACKGAPKTCTLLEKFPETTGCRRGQIKYSIMHPGTHVWPHTGPTNCRLRMHLGLVIPKEGCKIRCANETKTWEEGKVLIFDDSFEHEVWQDASSFRLIFIVDVWHPELTPQQRRSLPAI

SEQ ID NO: 718 - DNA, 1254 bp, Homo sapiens
cctactttacgatttattattcatggattgaagaaatcaaaatggctgaagataaagagacaaagcatggaggacacaagaatgggaggaaaggcggactctcaggaacttcattcttcacgtggtttatggtgattgcattgctgggcgtctggacatctgtagctgtcgtttggtttgatcttgttgactatgaggaagttctagccaaagcaaaggacttccgttataacttatcagaggtgcttcaaggaaaactaggaatctatgatgctgatggtgatggagattttgatgtggatgatgccaaagttttattagaaggacccagtggggtagccaagagaaaaactaaggctaaagttaaagaactcactaaagaagagctcaagaaggagaaagagaaacctgagtcaaggaaggaaagtaagaatgaagagagaaaaaaggggaagaaagaggatgtccgaaaggataagaaaattgctgatgcagacctatccaggaaggagtctcctaagggtaaaaaggacagagaaaaagagaaagtggacctagaaaaaagtgctaaaaccaaggaaaataggaaaaaatcaacaaatatgaaggatgtttctagtaaaatggcatcccgagacaaagatgacagaaaggaaagtagaagttctaccagatatgcacacttaacaaagggaaatacccagaaaagaaacggctaaagctctggcatcatcatcccagaacatggtcatgttccagattgcagtttgttacaaaaaagcatggaaaatgtaatattgctctgattggtgagggtgtgtaaattagccattgaatgtatcattggtgcttagcaagtaaattacctgaaatttaaatataccgtctcatacttctaaatgtaaaaacattttaaaaatgtcacagaatatgatgtaataacttctatttattgatcatttattgatcatgtattcagataaatgtatatgtatcatgaatttttatggattaatatattgaatactttcattgacgttaaataagaatattaagattttaaatgttaccctgtgcataatgccttgtaactttttcaagtatgctaaatactcagggagatggatttgctcgttgttttcttccctccttccccttcctgcttccctgttttctctttcgtggacacctccccaggctcatgtgccaccaccttccctcctctccagccctcccagccctcccgcagccttt

SEQ ID NO: 719 - protein, 225 aa, Homo sapiens
MAEDKETKHGGHKNGRKGGLSGTSFFTWFMVIALLGVWTSVAVVWFDLVDYEEVLAKAKDFRYNLSEVLQGKLGIYDADGDGDFDVDDAKVLLEGPSGVAKRKTKAKVKELTKEELKKEKEKPESRKESKNEERKKGKKEDVRKDKKIADADLSRKESPKGKKDREKEKVDLEKSAKTKENRKKSTNMKDVSSKMASRDKDDRKESRSSTRYAHLTKGNTQKRNG

SEQ ID NO: 720 - DNA, 2680 bp, Homo sapiens
cggaccgtgcaatggcccagcgtaagaatgccaagagcagcggcaacagcagcagcagcggctccggcagcggtagcacgagtgcgggcagcagcagccccggggcccggagagagacaaagcatggaggacacaagaatgggaggaaaggcggactctcaggaacttcattcttcacgtggtttatggtgattgcattgctgggcgtctggacatctgtagctgtcgtttggtttgatcttgttgactatgaggaagttctaggaaaactaggaatctatgatgctgatggtgatggagattttgatgtggatgatgccaaagttttattaggacttaaagagagatctacttcagagccagcagtcccgccagaagaggctgagccacacactgagcccgaggagcaggttcctgtggaggcagaaccccagaatatcgaagatgaagcaaaagaacaaattcagtcccttctccatgaaatggtacacgcagaacatgttgagggagaagacttgcaacaagaagatggacccacaggagaaccacaacaagaggatgatgagtttcttatggcgactgatgtagatgatagatttgagaccctggaacctgaagtatctcatgaagaaaccgagcatagttaccacgtggaagagacagtttcacaagactgtaatcaggatatggaagagatgatgtctgagcaggaaaatccagattccagtgaaccagtagtagaagatgaaagattgcaccatgatacagatgatgtaacataccaagtctatgaggaacaagcagtatatgaacctctagaaaatgaagggatagaaatcacagaagtaactgctccccctgaggataatcctgtagaagattcacaggtaattgtagaagaagtaagcatttttcctgtggaagaacagcaggaagtaccaccagatacttaaagcttcaaaaagactgcccctaccaccacaggaggaccagcctaaccatacgctccaaaagatggctgtgatagatcttgtgaagcaattactgagcagatcaagatctttgggaaggaacactaaagatgttttgaatgaattatagtccactggcattttagtgtatttttttttctttttacaaacacacatttctaaaaatgtcatgttacattcctgcatgtcccttttgatagcattagtggatccattggatttcttttttctttttgtgagacagcttttagtcttacctgaatttatgtgtgtttttccgacagtggttaataattatattggtgatgtagcagcaattgtgttggcagggttttcatatattattagtaattaacactaactgttggactgacttgtgtacactgtgttaaacatgatttaaaagctattaagagtactttgtgttagcactcttaaaaacgctaacagagatcatcattagctgtgaagatttgagttgtatatacctgcactgatattcttatcaaaaatttctacattagctttaagtgttcagattaacacttttgaaatttttgtagcttttagctgattaattagaaaaattaatatttcagtgaaagttttaaattatcatttatttatttttttaaatgagaggggaaagctgaaattccttgttaagacacaaggaaaaagaatggccctactattatcatgcaaaaatgctttgttggcacctcagattaatcatataatagctatagtctcttcagcatttgtttaaattttagaaaacctgtataaattactggtgcataacttaaagattattctgcctttggctaattgagtaattcccctccagcactagagaccgctcagtgctcttactagatgaactcagtaacgccttgagctgggttgattgaggatgtgtgaaaagctcacagagcccgatgcctgctgctatttcacggcaatgagcctttttctttctacactgaagattttcttcttatttaatgtggtttattttgggctcagaaataattgctctgttgaaaataatcctttgtcagaaaagaaggtagctaccacatcattttgaaaggaccatgagcaactataagcaaagccataagaagtggtttgatcgatatattaggggtagctcttgattttgttaacattaagataaggtgactttttccccctgcttttaggattaaaatcaaagatacttctatatttttatcactatagatcatagttattatacaatgtagtgagtcctgcatgggtactcgatgtgtaatgaaacctgaaataataagataataagaaaagcaataattttctaaagctgtgctgtcggtgatacagagacgatactcaaattataataaaactcttcattttgtgaattatagaagctactttttataaagccatatttttttagggaaactaaggagtgacatagaactgatgaatgagcaaaagtaagttttgctggatttttgtagaactctggacgttgaggattcattatgctgtggttaactttaaatatttttgaattccaaatatctgaattaatgagccttgtgtttacaaatatgtgccattgtgcaacatcggtggattttctaaaaataatgtaaatgtcttctattaaatgttgagtgcaataaaatccagaa

SEQ ID NO: 721 - protein, 313 aa, Homo sapiens
MAQRKNAKSSGNSSSSGSGSGSTSAGSSSPGARRETKHGGHKNGRKGGLSGTSFFTWFMVIALLGVWTSVAVVWFDLVDYEEVLGKLGIYDADGDGDFDVDDAKVLLGLKERSTSEPAVPPEEAEPHTEPEEQVPVEAEPQNIEDEAKEQIQSLLHEMVHAEHVEGEDLQQEDGPTGEPQQEDDEFLMATDVDDRFETLEPEVSHEETEHSYHVEETVSQDCNQDMEEMMSEQENPDSSEPVVEDERLHHDTDDVTYQVYEEQAVYEPLENEGIEITEVTAPPEDNPVEDSQVIVEEVSIFPVEEQQEVPPDT

SEQ ID NO: 722 - DNA, 1279 bp, Homo sapiens
gcggccgcgtcgacatgcagtgtgcctaaaacctgccagcagtacttttgagtttttttttttgttttgttttactttagcatttattattcatggattgaagaaatcaaaatggctgaagataaagagacaaagcatggaggacacaagaatgggaggaaaggcggactctcaggaacttcattcttcacgtggtttatggtgattgcattgctgggcgtctggacatctgtagctgtcgtttggtttgatcttgttgactatgaggaagttctaggaaaactaggaatctatgatgctgatggtgatggagattttgatgtggatgatgccaaagttttattagaaggacccagtggggtagccaagagaaaaactaaggctaaagttaaagaactcactaaagaagagctcaagaaggagaaagagaaacctgagtcaaggaaggaaagtaagaatgaagagagaaaaaaggggaagaaagaggatgtccgaaaggataagaaaattgctgatgcagacctatccaggaaggagtctcctaagggtaaaaaggacagagaaaaagagaaagtggacctagaaaaaagtgctaaaaccaaggaaaataggaaaaaatcaacaaatatgaaggatgtttctagtaaaatggcatcccgagacaaagatgacagaaaggaaagtagaagttctaccagatatgcacacttaacaaagggaaatacccagaaaagaaacggctaaagctctggcatcatcatcccagaacatggtcatgttccagattgcagtttgttacaaaaaagcatggaaaatgtaatattgctctgattggtgagggtgtgtaaattagccattgaatgtatcattggtgcttagcaagtaaattacctgaaatttaaatataccgtctcatacttctaaatgtaaaaacattttaaaaatgtcacagaatatgatgtaataacttctatttattgatcatttattgatcatgtattcagataaatgtatatgtatcatgaatttttatggattaatatattgaatactttcattgacgttaaataagaatattaagattttaaatgttaccctgtgcataatgccttgtaactttttcaagtatgctaaatactcagggagatggatttgctcgttgttttcttccctccttccccttcctgcttccctgttttctctttcgtggacacctccccaggctcatgtgccaccaccttccctcctctccagccctcccagccctcccgcagccttt

SEQ ID NO: 723 - protein, 210 aa, Homo sapiens
MAEDKETKHGGHKNGRKGGLSGTSFFTWFMVIALLGVWTSVAVVWFDLVDYEEVLGKLGIYDADGDGDFDVDDAKVLLEGPSGVAKRKTKAKVKELTKEELKKEKEKPESRKESKNEERKKGKKEDVRKDKKIADADLSRKESPKGKKDREKEKVDLEKSAKTKENRKKSTNMKDVSSKMASRDKDDRKESRSSTRYAHLTKGNTQKRNG

SEQ ID NO: 724 - DNA, 2773 bp, Homo sapiens
caagctctggtaggcaagtgcatgcagtgtgcctaaaacctgccagcagtacttttgagtttttttttttgttttgttttactttagcatttattattcatggattgaagaaatcaaaatggctgaagataaagagacaaagcatggaggacacaagaatgggaggaaaggcggactctcaggaacttcattcttcacgtggtttatggtgattgcattgctgggcgtctggacatctgtagctgtcgtttggtttgatcttgttgactatgaggaagttctagccaaagcaaaggacttccgttataacttatcagaggtgcttcaaggaaaactaggaatctatgatgctgatggtgatggagattttgatgtggatgatgccaaagttttattaggacttaaagagagatctacttcagagccagcagtcccgccagaagaggctgagccacacactgagcccgaggagcaggttcctgtggaggcagaaccccagaatatcgaagatgaagcaaaagaacaaattcagtcccttctccatgaaatggtacacgcagaacatgttgagggagaagacttgcaacaagaagatggacccacaggagaaccacaacaagaggatgatgagtttcttatggcgactgatgtagatgatagatttgagaccctggaacctgaagtatctcatgaagaaaccgagcatagttaccacgtggaagagacagtttcacaagactgtaatcaggatatggaagagatgatgtctgagcaggaaaatccagattccagtgaaccagtagtagaagatgaaagattgcaccatgatacagatgatgtaacataccaagtctatgaggaacaagcagtatatgaacctctagaaaatgaagggatagaaatcacagaagtaactgctccccctgaggataatcctgtagaagattcacaggtaattgtagaagaagtaagcatttttcctgtggaagaacagcaggaagtaccaccagatacttaaagcttcaaaaagactgcccctaccaccacaggaggaccagcctaaccatacgctccaaaagatggctgtgatagatcttgtgaagcaattactgagcagatcaagatctttgggaaggaacactaaagatgttttgaatgaattatagtccactggcattttagtgtatttttttttctttttagaaacacacatttctaaaaatgtcatgttacattcctgcatgtcccttttgatagcattagtggatccattggatttcttttttctttttgtgagacagcttttagtcttacctgaatttatgtgtgtttttccgacagtggttaataattatattggtgatgtagcagcaattgtgttggcagggttttcatatattattagtaattaacactaactgttggactgacttgtgtacactgtgttaaacatgatttaaaagctattaagagtactttgtgttagcactcttaaaaacgctaacagagatcatcattagctgtgaagatttgagttgtatatacctgcactgatattcttatcaaaaatttctacattagctttaagtgttcagattaacacttttgaaatttttgtagcttttagctgattaattagaaaaatttaatatttcagtgaaagttttaaattatcatttatttatttttttaaatgagaggggaaagctgaaattccttgttaagacacaaggaaaaagaatggccctactattatcatgcaaaaatgctttgttggcacctcagattaatcatataatagctatagtctcttcagcatttgtttaaattttagaaaacctgtataaattactggtgcataacttaaagattattctgcctttggctaattgagtaattcccctccagcactagagaccgctcagtgctcttactagatgaactcagtaacgccttgagctgggttgattgaggatgtgtgaaaagctcacagagcccgatgcctgctgctatttcacggcaatgagcctttttctttctacactgaagattttcttcttatttaatgtggtttattttgggctcagaaataattgctctgttgaaaataatcctttgtcagaaaagaaggtagctaccacatcattttgaaaggaccatgagcaactataagcaaagccataagaagtggtttgatcgatatattaggggtagctcttgattttgttaacattaagataaggtgactttttccccctgcttttaggattaaaatcaaagatacttctatatttttatcactatagatcatagttattatacaatgtagtgagtcctgcatgggtactcgatgtgtaatgaaacctgaaataataagataataagaaaagcaataattttctaaagctgtgctgtcggtgatacagagatgatactcaaattataataaaactcttcattttgtgaattatagaagctactttttataaagccatatttttttagggaaactaaggagtgacatagaactgatgaatgagtaaaagtaagttttgctggatttttgtagaactctggacgttgaggattcattatgctgtggttaactttaaatatttttgaattccaaatatctgaattaatgagccttgtctttacaaatatgtgccattgtgcaacatcggtggattttctaaaaataatgtaaatgtcttctattaaatgttgagtgcaataaaatacagaagaattctctaaaaaaaaaaaaaaaaaa

SEQ ID NO: 725 - protein, 299 aa, Homo sapiens
MAEDKETKHGGHKNGRKGGLSGTSFFTWFMVIALLGVWTSVAVVWFDLVDYEEVLAKAKDFRYNLSEVLQGKLGIYDADGDGDFDVDDAKVLLGLKERSTSEPAVPPEEAEPHTEPEEQVPVEAEPQNIEDEAKEQIQSLLHEMVHAEHVEGEDLQQEDGPTGEPQQEDDEFLMATDVDDRFETLEPEVSHEETEHSYHVEETVSQDCNQDMEEMMSEQENPDSSEPVVEDERLHHDTDDVTYQVYEEQAVYEPLENEGIEITEVTAPPEDNPVEDSQVIVEEVSIFPVEEQQEVPPDT

SEQ ID NO: 726 - DNA, 1906 bp, Homo sapiens
cccaagaccaagtcgtaatagcaacttcccttcctcagctgcctgaactttttttttcccttgtagctggagagaagtgtcacattttgctcactctcaaccttcctcgcccacccccttcccggagaacctgtgcggtgtgtagagggtgctgtgagccacctccagcctcgggtggctgcttaagtaactttcaactcctctcttcttaacactatgaagtgtctcgggaagcgcaggggccaggcagctgctttcctgcctctttgctggctctttttgaagattctgcaaccggggcacagccacctttataacaaccgctatgctggtgataaagtgataagatttattcccaaaacagaagaggaagcatatgcactgaagaaaatatcctatcaacttaaggtggacctgtggcagcccagcagtatctcctatgtatcagagggaacagttactgatgtccatatcccccaaaatggttcccgagccctgttagccttcttacaggaagccaacatccagtacaaggtcctcatagaagatcttcagaaaacactggagaagggaagcagcttgcacacccagagaaaccgaagatccctctctggatataattatgaagtttatcactccttagaagaaattcaaaattggatgcatcatctgaataaaactcactcaggcctcattcacatgttctctattggaagatcatatgagggaagatgtctttttattttaaagctgggcagacgatcacgactcaaaagagctgtttggatagactgtggtattcatgcaagagaatggattggtcctgccttttgtcagtggtttgtaaaagaagctcttctaacatataagagtgacccagccatgagaaaaatgttgaatcatctatatttctatatcatgcctgtgtttaacgtcgatggataccattttagttggaccaatgatcgattttggagaaaaacaaggtcaaggaactcaaggtttcgctgccgtggagtggatgccaatagaaactggaaagtgaagtggtgtgatgaaggagcttctatgcacccttgtgatgacacatactgtggcccttttccagaatctgagccggaagtgaaggctgtagctaacttccttcgaaaacacagaaagcacattagggcttatctctcctttcatgcatatgctcagatgttactgtatccctattcttacaaatatgcaacaattcccaattttagatgtgtggaatctgcagcttataaagctgtgaatgcacttcagtcagtatacggggtacgatacagatatggaccagcctccacaacgttgtatgtgagctctggtagctcaatggattgggcctacaaaaatggaataccttatgcatttgctttcgaactacgtgacactggatattttggatttttactcccagagatgctcatcaaacccacctgtacagaaactatgctggctgtgaaaaatatcacaatgcacctgctaaagaaatgtccctgagacagcccaaggctcaggtcaactgccataggattctgagcaaggcctacttggccctggatagaaattgttttcaaagagaagggcagctgcttagagtgaacatgtctatggactttaaaaagaccccacgcaatttgactttgtggcaatagaaaacagtaaaaaacagggcatagcctagtttgttataagaaaaagcatccattttctatccttttagagtcttatttgattatggtgggagggaatgttttcaaatttcccatttctcaagaaatgttcatattaattgaggatttcccttcaataaatctcatgtcctcaattataaaaaaaaaaaaaaaaaaaaaaaaaaaaaaaaaaaaaaaaaaaa

SEQ ID NO: 727 - protein, 437 aa, Homo sapiens
MKCLGKRRGQAAAFLPLCWLFLKILQPGHSHLYNNRYAGDKVIRFIPKTEEEAYALKKISYQLKVDLWQPSSISYVSEGTVTDVHIPQNGSRALLAFLQEANIQYKVLIEDLQKTLEKGSSLHTQRNRRSLSGYNYEVYHSLEEIQNWMHHLNKTHSGLIHMFSIGRSYEGRCLFILKLGRRSRLKRAVWIDCGIHAREWIGPAFCQWFVKEALLTYKSDPAMRKMLNHLYFYIMPVFNVDGYHFSWTNDRFWRKTRSRNSRFRCRGVDANRNWKVKWCDEGASMHPCDDTYCGPFPESEPEVKAVANFLRKHRKHIRAYLSFHAYAQMLLYPYSYKYATIPNFRCVESAAYKAVNALQSVYGVRYRYGPASTTLYVSSGSSMDWAYKNGIPYAFAFELRDTGYFGFLLPEMLIKPTCTETMLAVKNITMHLLKKCP

SEQ ID NO: 728 - DNA, 3669 bp, Homo sapiens
gcccaggtaaagccatgttttcctacacttaaaaatgtaaataaatatcccttagataatctggacagcagtttcttatatagcatgtctgagcactatattttgctgggctataaaaggtttaattgttgtttattggtacaataagggattctagttactaatatctacctgtagtcaataaagcaaacattgattggttgatcgaatcattgattcattcaataggtattgattcagcaccagctatgagctaggcagagttctaggccctacagagaaaactgatatcaaactaagaaagtctttttccaagtgctacagtaggggtgggggaggagagagataacaaactggtgagcaaatgttaaacaaaatgattctagagagtgctaaatactgtgaggaagataaaatgataaaataataaagacttctgaagattggttagggtaacctcttgtagaagtatcattggagaccgaaggatgacacaccagccatctgaccatgagagaacatcattcaaggcaaaggaaacagaccaccaccaacaaaaaaagatgcactggggaatttccagtaacacttttgttagctctcttaatatctgattttttgagcactagaacactgcctctcacagaatcctagcttaaaacagcaatgaacagactagaattctaggctaaaaccaacaagatgaaatgtgactgatatgaatataaatggtgcacataagttcacaaacccaattacacagcacaaaatgatatccacgtggcttgacagctgttcatattagaaaaatctagggattctaatggactacatattggagattgctctttgctgttcctgactggaaaaaaaaatatgtagatattacccttgggcagatttcagcccaacttaaagtatcattagagctgtccaaaatggaacagcctgctttgcacatagagaactcacattgctcaactcaaaaaagagcagaaggaaggaagaaggaaggacacgtaacagggatttttacaaaaacagaattcggtatttcttggagactactttaagacagtttttggtttctgtaagtctgtgacttattacttattcctttaattccaataaaattttcttcatttttgttatttttaaaacattaagaagaaaaaaatgatattgatataaggtagatggtgaagtttagcaaaagtttagtttataatgatatctctcaaaatagcaaactgaagtttaaaattcttaagctataattttaaaggaatttagattaaacttttaatatgttgttggctaagtataatacaaaataaaaactaaataaatcttggttttgccacatattagctgtgtaatatagacaatttacttctctgttattgtttcctcagaatgagggcagtaacttgtagccgtctgaaaagattgttataagcatggagttagttgctgtatataaagcagttagaccagtacctgacaatattacatgctaagtaagtgcttgctattactgttgctgttattattaattataattgtgtgctctattctgccttcaggaattaatgaccaagttaataactgagacacctgaccagccaatcccatttctcattgaccatcttcagtctaaacaagggaaccgtggacaacttcaaagaactttgtctggatctgcagctctatgggcagaaagtgaaaaatcagaatccaaaggaacaagaagggatttcagaagctatgataaaccttggcaattaaatgcaaagaagcctaaaaaatcaaaaagtgaccttgctgtgtctaatatttctccaccatcaccggactccaaatcattgccaaggtcagtagagcatccaaagtggaactggaggactaaaccacaaagccgtgattttgatgaattgaatcacatccttcaggagagcaagaagctggggaaagcccttgagaatctctctcgaagtattgcaatttcagatgaactcgataaggaaacagtgacatttaattcttctcttctgaggccccgtgtgattggagaatggattggtagagaagaaaatgatgctgatcccctagctgctgaaatgctacagcctccaattccaagaagcaaaaatgaccaatgggaaagtgaagatagtggctctagtcctgcaggaagcttaaagatggagcctaagaacaaaggattaaaacagcagcaacagcaacataagaaactcctggccgcaatgctctctcaagattcttttgagtccatccacagccctaccccatctgtaacagaagaagatattgataatgaagatgatgcaatggaattgctggaggatcttaatgatttaagaatggagggagtaacaaccctggtaccttctgggagcaaatttaaccaaggccgtcctacttaccctgctgagcctcaggccaaggtcacactgaacatctgttcaaggtgtgccaggcttcaaggagacaacctggaagaaaggacagaagagtcactaccaatactccattctccagatgaaaaaatcccagattcattcgattccttgcctgggactgaagaagcactaatggaggagggtgacgaatttgagaaagcatctaaactaacaggacctggagaagcctccagtggagtaggacactcactgaaaaactacatggaagaagatgaatccttaaagcaattgcaggtagttcatcaaccatggatcttgccaagtgacacagaaagtgaaggagtggaagcagaacaagagaaacgttccgctgatcttcttctttgcgttccatgctcttcttgtcctacgctggtctactctggtttgtgaaacagagagaagaagttgcaagtggtccttaaagaaatgcagttattcaaatccttatgtatagttctaattttatttactatgtgtaatcatttagagaatggttatttttataatctcaataataaacaagtactatcgtagccagggggtgcccaagtatgtaatcagagaacactaatcctggcaaaggattgtggggtggtcaggaggccggctgccttttgacatggttagagtcctgggtttagattactttataaatagttattaagattaatatttgatatattaaatattgcctgattcaaataactttgcttaaaatttttctgtattttaacttgtctagggttttctacttcttctatttttataatattttctcattttttagattactaaacattctacttatccacatgtgccaagatgtgccatttaggtctctgcagaaattagctgtttggtatcatcacctgccatacatgttgtgtgcagcagtgagaagtatattctctaccactgctctttctcatgattattttctctattcctattaaaatgaataattgatatgttaattaagtaaagcaaatcaataaggaatgaaatgcatggcccaaaacatagaaaatgaaaatcgtttgaccatttatccaattattgaacccaattaagatgatccattttaaatttaatatatgctcgcttttggaatgtgttatgcattgatgttaagtgaatggatctaagtaaatctattgatatctctaaaaaaaaaaaaaaaaaa

SEQ ID NO: 729 - protein, 427 aa, Homo sapiens
MTKLITETPDQPIPFLIDHLQSKQGNRGQLQRTLSGSAALWAESEKSESKGTRRDFRSYDKPWQLNAKKPKKSKSDLAVSNISPPSPDSKSLPRSVEHPKWNWRTKPQSRDFDELNHILQESKKLGKALENLSRSIAISDELDKETVTFNSSLLRPRVIGEWIGREENDADPLAAEMLQPPIPRSKNDQWESEDSGSSPAGSLKMEPKNKGLKQQQQQHKKLLAAMLSQDSFESIHSPTPSVTEEDIDNEDDAMELLEDLNDLRMEGVTTLVPSGSKFNQGRPTYPAEPQAKVTLNICSRCARLQGDNLEERTEESLPILHSPDEKIPDSFDSLPGTEEALMEEGDEFEKASKLTGPGEASSGVGHSLKNYMEEDESLKQLQVVHQPWILPSDTESEGVEAEQEKRSADLLLCVPCSSCPTLVYSGL

SEQ ID NO: 730 - DNA, 5699 bp, Homo sapiens
ggagttctcagacctccagtttcagccctgccctcagcctccaatccgtaagagacacccagccccagcaattggattgggcagcccgtcttgacacaccactgtgctgagtgcttgaggacgtgtttcaacagatggttggggttagtgtgtgtcatcacattcgagtggggattaagagaaggaaggctgccttgctggagctgtgtggtcttctccaagtgagagtcgcaggcaatagaactactttgcttttggaggaaaaggaggaattcattttcagcagacacaagaaaagcagtttttttttcagggattcttcacttctcttgaacaaggaactcactcagagactaacacaaaggaagtaatttcttacctggtcattatttagtctacaataagttcatccttcttcagtgtgaccagtaaattcttcccatactcttgaagagagcataattggaatggagaggtggtgctgacggccacccaccatcatctaaagaagataaacttggcaaatgacatgcaggttcttcaaggcagaataattgcagaaaatcttcaaaggaccctatctgcagatgttctgaatacctctgagaatagagattgattattcaaccaggatacctaattcaagaactccagaaatcaggagacggagacattttgtcagttttgcaacattggaccaaatacaatgaagtattcttgctgtgctctggttttggctgtcctgggcacagaattgctgggaagcctctgttcgactgtcagatccccgaggttcagaggacggatacagcaggaacgaaaaaacatccgacccaacattattcttgtgcctaccgatgatcaagatgtggagctggggtccctgcaagtcatgaacaaaacgagaaagattatggaacatgggggggccaccttcatcaatgcctttgtgactacacccatgtgctgcccgtcacggtcctccatgctcaccgggaagtatgtgcacaatcacaatgtctacaccaacaacgagaactgctcttccccctcgtggcaggccatgcatgagcctcggacttttgctgtatatcttaacaacactggctacagaacagccttttttggaaaatacctcaatgaatataatggcagctacatcccccctgggtggcgagaatggcttggattaatcaagaattctcgcttctataattacactgtttgtcgcaatggcatcaaagaaaagcatggatttgattatgcaaaggactacttcacagacttaatcactaacgagagcattaattacttcaaaatgtctaagagaatgtatccccataggcccgttatgatggtgatcagccacgctgcgccccacggccccgaggactcagccccacagttttctaaactgtaccccaatgcttcccaacacataactcctagttataactatgcaccaaatatggataaacactggattatgcagtacacaggaccaatgctgcccatccacatggaatttacaaacattctacagcgcaaaaggctccagactttgatgtcagtggatgattctgtggagaggctgtataacatgctcgtggagacgggggagctggagaatacttacatcatttacaccgccgaccatggttaccatattgggcagtttggactggtcaaggggaaatccatgccatatgactttgatattcgtgtgcctttttttattcgtggtccaagtgtagaaccaggatcaatagtcccacagatcgttctcaacattgacttggcccccacgatcctggatattgctgggctcgacacacctcctgatgtggacggcaagtctgtcctcaaacttctggacccagaaaagccaggtaacaggtttcgaacaaacaagaaggccaaaatttggcgtgatacattcctagtggaaagaggcaaatttctacgtaagaaggaagaatccagcaagaatatccaacagtcaaatcacttgcccaaatatgaacgggtcaaagaactatgccagcaggccaggtaccagacagcctgtgaacaaccggggcagaagtggcaatgcattgaggatacatctggcaagcttcgaattcacaagtgtaaaggacccagtgacctgctcacagtccggcagagcacgcggaacctctacgctcgcggcttccatgacaaagacaaagagtgcagttgtagggagtctggttaccgtgccagcagaagccaaagaaagagtcaacggcaattcttgagaaaccaggggactccaaagtacaagcccagatttgtccatactcggcagacacgttccttgtccgtcgaatttgaaggtgaaatatatgacataaatctggaagaagaagaagaattgcaagtgttgcaaccaagaaacattgctaagcgtcatgatgaaggccacaaggggccaagagatctccaggcttccagtggtggcaacaggggcaggatgctggcagatagcagcaacgccgtgggcccacctaccactgtccgagtgacacacaagtgttttattcttcccaatgactctatccattgtgagagagaactgtaccaatcggccagagcgtggaaggaccataaggcatacattgacaaagagattgaagctctgcaagataaaattaagaatttaagagaagtgagaggacatctgaagagaaggaagcctgaggaatgtagctgcagtaaacaaagctattacaataaagagaaaggtgtaaaaaagcaagagaaattaaagagccatcttcacccattcaaggaggctgctcaggaagtagatagcaaactgcaacttttcaaggagaacaaccgtaggaggaagaaggagaggaaggagaagagacggcagaggaagggggaagagtgcagcctgcctggcctcacttgcttcacgcatgacaacaaccactggcagacagccccgttctggaacctgggatctttctgtgcttgcacgagttctaacaataacacctactggtgtttgcgtacagttaatgagacgcataattttcttttctgtgagtttgctactggctttttggagtattttgatatgaatacagatccttatcagctcacaaatacagtgcacacggtagaacgaggcattttgaatcagctacacgtacaactaatggagctcagaagctgtcaaggatataagcagtgcaacccaagacctaagaatcttgatgttggaaataaagatggaggaagctatgacctacacagaggacagttatgggatggatgggaaggttaatcagccccgtctcactgcagacatcaactggcaaggcctagaggagctacacagtgtgaatgaaaacatctatgagtacagacaaaactacagacttagtctggtggactggactaattacttgaaggatttagatagagtatttgcactgctgaagagtcactatgagcaaaataaaacaaataagactcaaactgctcaaagtgacgggttcttggttgtctctgctgagcacgctgtgtcaatggagatggcctctgctgactcagatgaagacccaaggcataaggttgggaaaacacctcatttgaccttgccagctgaccttcaaaccctgcatttgaaccgaccaacattaagtccagagagtaaacttgaatggaataacgacattccagaagttaatcatttgaattctgaacactggagaaaaaccgaaaaatggacggggcatgaagagactaatcatctggaaaccgatttcagtggcgatggcatgacagagctagagctcgggcccagccccaggctgcagcccattcgcaggcacccgaaagaacttccccagtatggtggtcctggaaaggacatttttgaagatcaactatatcttcctgtgcattccgatggaatttcagttcatcagatgttcaccatggccaccgcagaacaccgaagtaattccagcatagcggggaagatgttgaccaaggtggagaagaatcacgaaaaggagaagtcacagcacctagaaggcagcgcctcctcttcactctcctctgattagatgaaactgttaccttaccctaaacacagtatttctttttaacttttttatttgtaaactaataaaggtaatcacagccaccaacattccaagctaccctgggtacctttgtgcagtagaagctagtgagcatgtgagcaagcggtgtgcacacggagactcatcgttataatttactatctgccaagagtagaaagaaaggctggggatatttgggttggcttggttttgattttttgcttgtttgtttgttttgtactaaaacagtattatcttttgaatatcgtagggacataagtatatacatgttatccaatcaagatggctagaatggtgcctttctgagtgtctaaaacttgacacccctggtaaatctttcaacacacttccactgcctgcgtaatgaagttttgattcatttttaaccactggaatttttcaatgccgtcattttcagttagatgattttgcactttgagattaaaatgccatgtctatttgattagtcttatttttttatttttacaggcttatcagtctcactgttggctgtcattgtgacaaagtcaaataaacccccaaggacgacacacagtatggatcacatattgtttgacattaagcttttgccagaaaatgttgcatgtgttttacctcgacttgctaaaatcgattagcagaaaggcatggctaataatgttggtggtgaaaataaataaataagtaaacaaaatgaagattgcctgctctctctgtgcctagcctcaaagcgttcatcatacatcatacctttaagattgctatattttgggttattttcttgacaggagaaaaagatctaaagatcttttattttcatcttttttggttttcttggcatgactaagaagcttaaatgttgataaaatatgactagttttgaatttacaccaagaacttctcaataaaagaaaatcatgaatgctccacaatttcaacataccacaagagaagttaatttcttaacattgtgttctatgattatttgtaagaccttcaccaagttctgatatcttttaaagacatagttcaaaattgcttttgaaaatctgtattcttgaaaatatccttgttgtgtattaggtttttaaataccagctaaaggattacctcactgagtcatcagtaccctcctattcagctccccaagatgatgtgtttttgcttaccctaagagaggttttcttcttatttttagataattcaagtgcttagataaattatgttttctttaagtgtttatggtaaactcttttaaagaaaatttaatatgttatagctgaatctttttggtaactttaaatctttatcatagactctgtacatatgttcaaattagctgcttgcctgatgtgtgtatcatcggtgggatgacagaacaaacatatttatgatcatgaataatgtgctttgtaaaaagatttcaagttattaggaagcatactctgttttttaatcatgtataatattccatgatacttttatagaacaattctggcttcaggaaagtctagaagcaatatttcttcaaataaaaggtgtttaaacttt

SEQ ID NO: 731 - protein, 871 aa, Homo sapiens
MKYSCCALVLAVLGTELLGSLCSTVRSPRFRGRIQQERKNIRPNIILVPTDDQDVELGSLQVMNKTRKIMEHGGATFINAFVTTPMCCPSRSSMLTGKYVHNHNVYTNNENCSSPSWQAMHEPRTFAVYLNNTGYRTAFFGKYLNEYNGSYIPPGWREWLGLIKNSRFYNYTVCRNGIKEKHGFDYAKDYFTDLITNESINYFKMSKRMYPHRPVMMVISHAAPHGPEDSAPQFSKLYPNASQHITPSYNYAPNMDKHWIMQYTGPMLPIHMEFTNILQRKRLQTLMSVDDSVERLYNMLVETGELENTYIIYTADHGYHIGQFGLVKGKSMPYDFDIRVPFFIRGPSVEPGSIVPQIVLNIDLAPTILDIAGLDTPPDVDGKSVLKLLDPEKPGNRFRTNKKAKIWRDTFLVERGKFLRKKEESSKNIQQSNHLPKYERVKELCQQARYQTACEQPGQKWQCIEDTSGKLRIHKCKGPSDLLTVRQSTRNLYARGFHDKDKECSCRESGYRASRSQRKSQRQFLRNQGTPKYKPRFVHTRQTRSLSVEFEGEIYDINLEEEEELQVLQPRNIAKRHDEGHKGPRDLQASSGGNRGRMLADSSNAVGPPTTVRVTHKCFILPNDSIHCERELYQSARAWKDHKAYIDKEIEALQDKIKNLREVRGHLKRRKPEECSCSKQSYYNKEKGVKKQEKLKSHLHPFKEAAQEVDSKLQLFKENNRRRKKERKEKRRQRKGEECSLPGLTCFTHDNNHWQTAPFWNLGSFCACTSSNNNTYWCLRTVNETHNFLFCEFATGFLEYFDMNTDPYQLTNTVHTVERGILNQLHVQLMELRSCQGYKQCNPRPKNLDVGNKDGGSYDLHRGQLWDGWEG

SEQ ID NO: 732 - DNA, 2919 bp, Homo sapiens
tccccgtcgccgccgccgccgcctcgccagccagagttgggctccgtgggcttcccccctcgcagcctcggtccttccccgctgcctgcaagtcagcctggctccgagtcacgtgtcagtgcctgaggcagagactgcgagaaaaaaacgcgcttcattccttcttccaccgccatactgtattttatactaaatctcatttttattccaacattttactcccgctcggtgagtaccttctcagtggcattcttgtcctattcttttttttgtccttttttttggttttttgttttttttgtttttgttttttttctttttttccacttctttgattattgtttatatttgggaaagctggaggagcatggttttgagccttttcctgaatccaagtttttctagcatgcgatcgttctgtagacaaggcgctgtgtctcggagtccgcggcgaccgtgcccgctgggagcgtctcccaagtccagcaaaatgtgcaactggttttatggaaaaagcgatgtgaagtatggtgcctatttttttcctttgtaaaaataaaaagcatgtttctaactctttttttgcatactctttttctgataacatttttgtataggtgggattttacggcagtgtttacaagtttgtggtcttgcaatactggtgcaaaccactgagcaaagacattaattttatattttttgtgccctttttggaagccggtgaaaacaaattcgttttttttccctcctgtttttgatacccattgataacatgaaacttttcttacagctggtgattgggatcatttttaagcaaaatacttttttcctcctttaaattaactatgacttttgcacatttgacttttttaaaaaaccgagataattttatgatagatatcctgatatctatatctatattgtcccttatttctcccccttccctccccgtaaatcaattttcaaatgatggcagtggaaggtttttctggaaaaaaaaaaatgaagtgcggtttggtttccttgtcaacggaggatgaagtgaacagctgagcagctcgcagagagcaggattaaagcaaggagagccaatcatgactggcaaaacacagaccagcaacgtcaccaataagaatgaccccaagtccatcaactcccgtgttttcatcggcaatctaaatacggcaattgtcaagaaagttgacattgaagccattttttcaaagtatggaaaaatagttggatgttccgttcacaaaggttatgcatttgtacagtacatgagtgagcgacatgcaagagctgcagtggctggagaaaatgccagagtcatcgccggccaaccacttgatatcaacatggcaggagagcccaaaccatacagaccaaaacctggaaacaagaggcccctttctgcactttacagacttgaatcaaaggaacctttcctgtctgttggcggttatgtctttgactatgattactacagagatgatttctacaatcggttatttgattaccacgggcgtgtgcctccacctccccgtgcagtaattccgctgaagcgtcccagagtggcagtcacaacgactcgcagggggaaaggagtcttttccatgaaaggtggatcgagatctactgccagtgggtcaacaggttctaaattgaaatcagatgagttacagaccatcaagaaagaattaacccagatcaaaactaaaattgactccttgctagggcgcctggagaagattgagaaacagcagaaggcggaggcagaagctcagaagaagcaattggaagagagtctagtgctgatccaagaggaatgtgtgtcagagattgcagatcactctacagaggagcctgctgaaggagggccagatgccgatggagaagagatgacagatgggatagaggaggacttcgatgaagatgggggtcatgagctgtttctacagataaagtgatctgaaataacgcatgatgccacaaagcagaaaagagaaactgtgacaacccccagaaatgtgaaaggaggtttcttactggacagcagcatctttggttcaatttatataaaaacccaaataaataaaatggacagtattgctcagttttagaaattccatttcttctatgttttaagctgtacaattgtcaggtttttatggtttaaattgtaaatgtgttttcccctttgctaattatgttttttttttcagtcttaaaatgtgaaaggcatttatgaatggtaagggaaacactatatacaaatgtatatttgtaaaagctatttttatgattagcatgtttcactgttgatcatatataaagtcaggtgatattgcaattctgtatttaaagcttatttccaacaatgtcatgtaagaaaagatgcatcttatgctagtttttataatttatttataatttatagtttaaagtacttcagatcataatgataaaatacttgaaaaagttatatttctgccctgtataagcaccctttttattaataaagaatgcagatatttcagatgtgatataatagttaaagaactgttggtttgatctgtgattaagttgagcatgctccgctctactgaactaaatgatccaattattacttcagtctgggtatgagattccatggacaagtaaggactagattgccaaggaaaagactgtcttgcccttggatccaaaagtttaaattagtgcatacatcatgtcatttcacctcctgttcctaggaactctccattcccaagcattgccagtgttttccagataatcttagctgttgtcttgtgctgtggaaatggaagaaaccatcttcacagactgtaggagaattcaacatataatttcttaataaatactgtttcttttaaaacaaaaaaaaaaaaaaaa

SEQ ID NO: 733 - protein, 291 aa, Homo sapiens
MTGKTQTSNVTNKNDPKSINSRVFIGNLNTAIVKKVDIEAIFSKYGKIVGCSVHKGYAFVQYMSERHARAAVAGENARVIAGQPLDINMAGEPKPYRPKPGNKRPLSALYRLESKEPFLSVGGYVFDYDYYRDDFYNRLFDYHGRVPPPPRAVIPLKRPRVAVTTTRRGKGVFSMKGGSRSTASGSTGSKLKSDELQTIKKELTQIKTKIDSLLGRLEKIEKQQKAEAEAQKKQLEESLVLIQEECVSEIADHSTEEPAEGGPDADGEEMTDGIEEDFDEDGGHELFLQIK

SEQ ID NO: 734 - DNA, 588 bp, Homo sapiens
atcaaagcaacaagaagctagggcagaggatttagagggcaagcaagcatgggccaggactttgacagcattcatccagcagcatgcgaactccaaagagaacccgatctccaaagacaaaagtgagcctgaggggagaaaccttgactctccagttgaccactgtgtctctcgacacacggcatatggtgaaacggtgtgatgagaggcatggaaggccattacctcattcacaggaatctcagcatggctctgcaacttcaaagaaggcagttcggggaacagcagacacagctcctttggaaagaatatctgccgcccgaggatgggctctgcctatggaggcaacagtgagtgtcttcagagcccatcagtggcagtggaattaatgaagaaagcaatggcaggaaaagttgaataaagcagacccttcatggtaaatctggttggtaaattgcctgtgaccacatgtgggacaatcactggaggaaccccagttacatttggtcagagtgtggcgaggggaaccttctcaggaaagaaaatagaggtcctgttttaggaaaaaaaataaagatcagaaacctg

SEQ ID NO: 735 - protein, 101 aa, Homo sapiens
MRTPKRTRSPKTKVSLRGETLTLQLTTVSLDTRHMVKRCDERHGRPLPHSQESQHGSATSKKAVRGTADTAPLERISAARGWALPMEATVSVFRAHQWQWN

SEQ ID NO: 736 - DNA, 1928 bp, Homo sapiens
agggctgcagtcacggggcggcgcggagggccccagcccagtcaggggtgtggccgccgccaccgtaaggctaggccgcgagcttagtcctgggagccgcctccgtcgccgccgtcagagccgccctatcagattatcttaacaagaaaaccaactggaaaaaaaaatgaaattccttatcttcgcatttttcggtggtgttcaccttttatccctgtgctctgggaaagctatatgcaagaatggcatctctaagaggacttttgaagaaataaaagaagaaatagccagctgtggagatgttgctaaagcaatcatcaacctagctgtttatggtaaagcccagaacagatcctatgagcgattggcacttctggttgatactgttggacccagactgagtggctccaagaacctagaaaaagccatccaaattatgtaccaaaacctgcagcaagatgggctggagaaagttcacctggagccagtgagaataccccactgggagaggggagaagaatcagctgtgatgctggagccaagaattcataagatagccatcctgggtcttggcagcagcattgggactcctccagaaggcattacagcagaagttctggtggtgacctctttcgatgaactgcagagaagggcctcagaagcaagagggaagattgttgtttataaccaaccttacatcaactactcaaggacggtgcaataccgaacgcagggggcggtggaagctgccaaggttggggctttggcatctctcattcgatccgtggcctccttctccatctacagtcctcacacaggtattcaggaataccaggatggcgtgcccaagattccaacagcctgtattacggtggaagatgcagaaatgatgtcaagaatggcttctcatgggatcaaaattgtcattcagctaaagatgggggcaaagacctacccagatactgattccttcaacactgtagcagagatcactgggagcaaatatccagaacaggttgtactggtcagtggacatctggacagctgggatgttgggcagggtgccatggatgatggcggtggagcctttatatcatgggaagcactctcacttattaaagatcttgggctgcgtccaaagaggactctgcggctggtgctctggactgcagaagaacaaggtggagttggtgccttccagtattatcagttacacaaggtaaatatttccaactacagtctggtgatggagtctgacgcaggaaccttcttacccactgggctgcaattcactggcagtgaaaaggccagggccatcatggaggaggttatgagcctgctgcagcccctcaatatcactcaggtcctgagccatggagaagggacagacatcaacttttggatccaagctggagtgcctggagccagtctacttgatgacttatacaagtatttcttcttccatcactcccacggagacaccatgactgtcatggatccaaagcagatgaatgttgctgctgctgtttgggctgttgtttcttatgttgttgcagacatggaagaaatgctgcctaggtcctagaaacagtaagaaagaaacgttttcatgcttctggccaggaatcctgggtctgcaactttggaaaactcctcttcacataacaatttcatccaattcatcttcaaagcacaactctatttcatgctttctgttattatctttcttgatactttccaaattctctgattctagaaaaaggaatcattctcccctccctcccaccacatagaatcaacatatggtagggattacagtgggggcatttctttatatcacctcttaaaaacattgtttccactttaaaagtaaacacttaataaatttttggaagaacaaaaaaaaaaaaaaaaaaaaaaaaaaaaaa

SEQ ID NO: 737 - protein, 472 aa, Homo sapiens
MKFLIFAFFGGVHLLSLCSGKAICKNGISKRTFEEIKEEIASCGDVAKAIINLAVYGKAQNRSYERLALLVDTVGPRLSGSKNLEKAIQIMYQNLQQDGLEKVHLEPVRIPHWERGEESAVMLEPRIHKIAILGLGSSIGTPPEGITAEVLVVTSFDELQRRASEARGKIVVYNQPYINYSRTVQYRTQGAVEAAKVGALASLIRSVASFSIYSPHTGIQEYQDGVPKIPTACITVEDAEMMSRMASHGIKIVIQLKMGAKTYPDTDSFNTVAEITGSKYPEQVVLVSGHLDSWDVGQGAMDDGGGAFISWEALSLIKDLGLRPKRTLRLVLWTAEEQGGVGAFQYYQLHKVNISNYSLVMESDAGTFLPTGLQFTGSEKARAIMEEVMSLLQPLNITQVLSHGEGTDINFWIQAGVPGASLLDDLYKYFFFHHSHGDTMTVMDPKQMNVAAAVWAVVSYVVADMEEMLPRS

SEQ ID NO: 738 - DNA, 2944 bp, Homo sapiens
ggtgacaacgtttgggaagggccagggcgaccggcagtgtgcacagggactgtgtcgggcttggacctcacctgatcctctctcttagcgcgacccttcctctgctccctgtctcctctttctgccacttgtgcgctgcttccgcgcactcccggctccctagcggcaggaggaggaaggcgcacagcgggtggagagggtgcgccaaggagaggtaaccccttcgggagcccggggaatcccggccgccaccaggggccgtgccaccgccctcgcgggaccaaagcttccggcgtgtccccaactttgtggcgccctcaggccgcggcgactgggttagagatgccttccagcggcagagcgctgctggactcgccgctggacagcggctccctgacctccctggactctagtgtcttctgcagcgagggtgaaggggagcccttggcgctcggggactgcttcacggtcaacgtgggcggcagccgcttcgtgctctcgcagcaggcgctgtcctgcttcccgcacacgcgccttggcaagctggccgtggtggtggcttcctaccgccgccccggggccctggccgccgtgcccagccctctggagctttgcgacgatgccaaccccgtggacaacgagtacttcttcgaccgcagctcgcaggcgttccgatatgtcctgcactactaccgcaccggccgcctgcatgtcatggagcagctgtgcgcgctctccttcctgcaggagatccagtactggggcatcgatgagctcagcatcgattcctgctgcagggacagatacttcagaaggaaagagctgagtgaaactttagacttcaagaaggacacagaagaccaggaaagtcaacatgagagtgaacaggacttctcccaaggaccttgtcccactgttcgccagaagctctggaatatcctggagaaacctggatcttccacagctgcccgtatctttggcgtcatctccattatcttcgtggtggtgtccatcattaacatggccctgatgtcagctgagttaagctggctggacctgcagctgctggaaatcctggagtatgtgtgcattagctggttcaccggggagtttgtcctccgcttcctgtgtgtgcgggacaggtgtcgcttcctaagaaaggtgccaaacatcatagacctccttgccatcttgcccttctacatcactcttctggtagagagcctaagtgggagccagaccacgcaggagctggagaacgtggggcgcattgtccaggtgttgaggctgctcagggctctgcgcatgctaaagctgggcagacattccacaggattacgctcccttgggatgacaatcacccagtgttacgaagaagtcggcctactgctcctatttctatccgtgggaatctctatattttcaactgtagaatactttgctgagcaaagcattcctgacacaaccttcacaagtgtcccttgtgcatggtggtgggccaccacctctatgactactgtgggatatggggacattagaccagacaccaccacaggcaaaatcgtggccttcatgtgtatattatcgggaattcttgtcttggccttgcctattgctattattaacgatcgcttctctgcttgctacttcaccttgaaactcaaggaagcagctgttagacagcgtgaagccctaaagaagcttaccaagaatatagccactgactcatatatcagtgttaacttgagagatgtctatgcccggagtatcatggagatgctgcgactgaaaggcagagaaagagcaagtactaggagcagcgggggagatgatttctggttttgaattaattttcaatttatttacaaaagctatgtacaattaactaaaatgataaagcagtgatgtggatttctgtattctgatgatgagtctcttcagagtactgctcatcttaattaatttttgctgatatattgcttcatctactagaatatttcacatcacctataacaactgcacagtgttctgacacatttgagtgtccaaaatagccaattaacacaaccaaatacaactgggccaatataaacatgtttgaattgtcaaatataaaataatgttattgcaatacatacaaaaaagttaaagattttatgtatcactaacattagaagttttttgcaccactaattttttaaaaatggaaggtaaactgcatagcccagagaaagataagtaaatatttaagaacatattgaacaactttgctatttaaagatattatccaagtacataaattactccgttctctatcagttaaagctattgaatataatacttagctttacaagagaaaacccatatttgatgggcagagattatatccctatcttctttttcatgtaaaccactggtcacaaatgaactgatctctgtatcccattattactataagaggtgggaatcccaaaactgcttagattgcagtacatgagtctacacaaagacttcaacaattgcacatcttcattctcccaactgagtgtagtatgtggagcataaaacagcatatttcttagtatttcatgaatatcagatggtctttaaatgtctctttatggatgtattgttcacattatggctttaaaataatgaatatgtaaaagtgaggtagtgaacatcctaaatttctacactggaattactaaataatcttatttcataaaatgggaaatatatgttaaatgacatcactggatgaacttgaagatcttttacttgttaacaaaaaaatactatggacagctttctgattgttggggtaaatagcaaatgttcaaactttgcaggcattttgacattcatcataacaacacaattcctagacattgtattatataattaaagccaaaacctctaaagctaaaaaaaaaaaaaaaaa

SEQ ID NO: 739 - protein, 500 aa, Homo sapiens
MPSSGRALLDSPLDSGSLTSLDSSVFCSEGEGEPLALGDCFTVNVGGSRFVLSQQALSCFPHTRLGKLAVVVASYRRPGALAAVPSPLELCDDANPVDNEYFFDRSSQAFRYVLHYYRTGRLHVMEQLCALSFLQEIQYWGIDELSIDSCCRDRYFRRKELSETLDFKKDTEDQESQHESEQDFSQGPCPTVRQKLWNILEKPGSSTAARIFGVISIIFVVVSIINMALMSAELSWLDLQLLEILEYVCISWFTGEFVLRFLCVRDRCRFLRKVPNIIDLLAILPFYITLLVESLSGSQTTQELENVGRIVQVLRLLRALRMLKLGRHSTGLRSLGMTITQCYEEVGLLLLFLSVGISIFSTVEYFAEQSIPDTTFTSVPCAWWWATTSMTTVGYGDIRPDTTTGKIVAFMCILSGILVLALPIAIINDRFSACYFTLKLKEAAVRQREALKKLTKNIATDSYISVNLRDVYARSIMEMLRLKGRERASTRSSGGDDFWF

SEQ ID NO: 740 - DNA, 9990 bp, Homo sapiens
aatagtgttggtgtcttgaaactgacgtaatgcgcggagactgaggtcctgacaagcgataacatttctgataaagacccgatcttactgcaatctctagcgtcctcttttttggtgctgctggtttctccagacctcgcgtcctctcgattgctctctcgccttcctatttcttttttttttttttaaacaaaaaacaacaccccctcccctctcccacccggcaccgggcacatccttgctctatttcctttctctttctctctctctctctctctctctcttttttaataagggtgggggagggaaaggggggggaggcaggaaagacctttttctctcccccccgcaataatccaagatcaactctgcaaacaacagaagacggttcatggctttggccgccgcgccaccatctttcgggctgccgagggtgttcttgacgattaatcaacagatgtacagatcagctctcaaaatgtcttctgtgtcttctgagcgtcttctaagacaattgcattagcctcctgctagttgactaatagaattaataattgtaaaaagcactctaaagccacatgccttatgaagtcaatgctgggtatgattttacaaatatggtccggaaaaagaacccccctctgagaaacgttgcaagtgaaggcgagggccagatcctggagcctataggtacagaaagcaaggtatctggaaagaacaaagaattttctgcagatcagatgtcagaaaatacggatcagagtgatgctgcagaactaaatcataaggaggaacatagcttgcatgttcaagatccatcttctagcagtaagaaggacttgaaaagcgcagttctgagtgagaaggctggcttcaattatgaaagccccagtaagggaggaaactttccctcctttccgcatgatgaggtgacagacagaaatatgttggctttctcatctccagctgctgggggagtctgtgagcccttgaagtctccgcaaagagcagaggcagatgaccctcaagatatggcctgcaccccctcaggggactcactggagacaaaggaagatcagaagatgtcaccaaaggctacagaggaaacagggcaagcacagagtggtcaagccaattgtcaaggtttgagcccagtttcagtggcctcaaaaaacccacaagtgccttcagatgggggtgtaagactgaataaatccaaaactgacttactggtgaatgacaacccagacccggcacctctgtctccagagcttcaggactttaaatgcaatatctgtggatatggttactacggcaacgaccccacagatctgattaagcacttccgaaagtatcacttaggactgcataaccgcaccaggcaagatgctgagctggacagcaaaatcttggcccttcataacatggtgcagttcagccattccaaagacttccagaaggtcaaccgttctgtgttttctggtgtgctgcaggacatcaattcttcaaggcctgttttactaaatgggacctatgatgtgcaggtgacttcaggtggaacattcattggcattggacggaaaacaccagattgccaagggaacaccaagtatttccgctgtaaattctgcaatttcacttatatgggcaactcatccaccgaattagaacaacattttcttcagactcacccaaacaaaataaaagcttctctcccctcctctgaggttgcaaaaccttcagagaaaaactctaacaagtccatccctgcacttcaatccagtgattctggagacttgggaaaatggcaggacaagataacagtcaaagcaggagatgacactcctgttgggtactcagtgcccataaagcccctcgattcctctagacaaaatggtacagaggccaccagttactactggtgtaaattttgtagtttcagctgtgagtcatctagctcacttaaactgctagaacattatggcaagcagcacggagcagtgcagtcaggcggccttaatccagagttaaatgataagctttccaggggctctgtcattaatcagaatgatctagccaaaagttcagaaggagagacaatgaccaagacagacaagagctcgagtggggctaaaaagaaggacttctccagcaagggagccgaggataatatggtaacgagctataattgtcagttctgtgacttccgatattccaaaagccatggccctgatgtaattgtagtggggccacttctccgtcattatcaacagctccataacattcacaagtgtaccattaaacactgtccattctgtcccagaggactttgcagcccagaaaagcaccttggagaaattacttatccgtttgcttgtagaaaaagtaattgttcccactgtgcactcttgcttctgcacttgtctcctggggcggctggaagctcgcgagtcaaacatcagtgccatcagtgttcattcaccacccctgacgtagatgtactcctctttcactatgaaagtgtgcatgagtcccaagcatcggatgtcaaacaagaagcaaatcacctgcaaggatcggatgggcagcagtctgtcaaggaaagcaaagaacactcatgtaccaaatgtgattttattacccaagtggaagaagagatttcccgacactacaggagagcacacagctgctacaaatgccgtcagtgcagttttacagctgccgatactcagtcactactggagcacttcaacactgttcactgccaggaacaggacatcactacagccaacggcgaagaggacggtcatgccatatccaccatcaaagaggagcccaaaattgacttcagggtctacaatctgctaactccagactctaaaatgggagagccagtttctgagagtgtggtgaagagagagaagctggaagagaaggacgggctcaaagagaaagtttggaccgagagttccagtgatgaccttcgcaatgtgacttggagaggggcagacatcctgcgggggagtccgtcatacacccaagcaagcctggggctgctgacgcctgtgtctggcacccaagagcagacaaagactctaagggatagtcccaatgtggaggccgcccatctggcgcgacctatttatggcttggctgtggaaaccaagggattcctgcagggggcgccagctggcggagagaagtctggggccctcccccagcagtatcctgcatcgggagaaaacaagtccaaggatgaatcccagtccctgttacggaggcgtagaggctccggtgttttttgtgccaattgcctgaccacaaagacctctctctggcgaaagaatgcaaatggcggatatgtatgcaacgcgtgtggcctctaccagaagcttcactcgactcccaggcctttaaacatcattaaacaaaacaacggtgagcagattattaggaggagaacaagaaagcgccttaacccagaggcacttcaggctgagcagctcaacaaacagcagaggggcagcaatgaggagcaagtcaatggaagcccgttagagaggaggtcagaagatcatctaactgaaagtcaccagagagaaattccactccccagcctaagtaaatacgaagcccagggttcattgactaaaagccattctgctcagcagccagtcctggtcagccaaactctggatattcacaaaaggatgcaacctttgcacattcagataaaaagtcctcaggaaagtactggagatccaggaaatagttcatccgtatctgaagggaaaggaagttctgagagaggcagtcctatagaaaagtacatgagacctgcgaaacacccaaattattcaccaccaggcagccctattgaaaagtaccagtacccactttttggacttccctttgtacataatgacttccagagtgaagctgattggctgcggttctggagtaaatataagctctccgttcctgggaatccgcactacttgagtcacgtgcctggcctaccaaatccttgccaaaactatgtgccttatcccaccttcaatctgcctcctcatttttcagctgttggatcagacaatgacattcctctagatttggcgatcaagcattccagacctgggccaactgcaaacggtgcctccaaggagaaaacgaaggcaccaccaaatgtaaaaaatgaaggtcccttgaatgtagtaaaaacagagaaagttgatagaagtactcaagatgaactttcaacaaaatgtgtgcactgtggcattgtctttctggatgaagtgatgtatgctttgcatatgagttgccatggtgacagtggacctttccagtgcagcatatgccagcatctttgcacggacaaatatgacttcacaacacatatccagaggggcctgcataggaacaatgcacaagtggaaaaaaatggaaaacctaaagagtaaaaccttagcacttagcacaattaaatagaaataggttttcttgatgggaattcaatagcttgtaatgtcttatgaagacctattaaaaaaatacttcatagagcctgccttatccaacatgaaattcccttcttttgttattctttcttttgatgagtaggttaccaagattaaaaagtgagataaatggtcaatgagaaagaatggaagatggtaaacaatcactttttaaaacctgttaagtcaaaaccatcttggctaatatgtactggggaaataatccataagagatatcaccagactagaattaatatatttataaagaaagagaccaaaactgtctagaatttgaaagggtttacatattattatactaaagcagtactggactggccattggaccatttgttccaaaacccataaattgttgcctaaatttataatgatcatgaaaccctaggcagaggaggagaaattgaaggtccagggcaatgaaagaaaaatggcgccctctcaatttagtcttctctcattggccatgtttcagattttgacctagaaatgcgagctgtggttaggcttggttagagtgcagcaagcaacatgacagatggtggcacgctgtttttacccagccctgcctgtacatacacatgcacaccctctctgatatttttgtcctttagatgttcaaatactcagtagtccttttgtttgcggtttagattcattttgtccacacatgtacccattttaaaaaacaatgtcctcgatgcttctgtagtgatttcattttagccaggtatttctttcttgtgtgtgatgaaccagtatggatttgcttttctaagcctcctgttggttactaatctcacttggcacattataactaaaggaatcccctcaattcaaaagcatagatggatacaaatgtcagaccgtgggtttaatttgtttagaacacatggcatttcttcacaaggtaacctgctgtatttatttattttcttttggttaaatataatttccaaactttgtggtcaggcagcgtctaaggttacgttaccacagactgacagttggtatatgtaccagccaatcccttcattaaatgtatacagatttagttaagtagcattaaataggattcttagaagtatgtcctcatagaacttttaatacttaaggctttgtaaaaactatccatgaagggaaagctcctcagcataactgctcagggaaatagggctaaataactgaacattaaataattggttaaaggtgctgttagtcgagcctcaatgcttgctacaaggatgtatgtacaaggactgactttaataatttgcattatattgtcccaaccagtagtttattttttgccacggagatgtagaagatattacaagctactggatgcactgtcagattaacttatttcattaaagaagttgggagaacaaataggaaaaaaaaaacttatttttctagtaaatattaatgtattacatttcaaataatggtgcctgacatattgaataattattttctacagtgtacgtatgcaacaaagatattccatcatgcattagagtcagttctggctctgcctagctgtttacatttgcaaatgtagcaaacaaggtaatgaagcaactatttctattgcagtagatatccttttgtgtgtgtgtgtgtgcattaaagttgtaaacggtaacatgaaacaaatgaaagttcttgctataatggtatggaaaacaagaaggaaatgaaaatatttttatgcctacttaggaaaaaaagggtagcacttattcattccaagtacttttttttttttaatttttaagctcttaactcacattgttatgcttaagatgataaacatatatcctctttttattgctttgtctatgtttcatatgaaacatttcagaaattattttgataagtgttgctggaatctgcaacgctgatttttttttgcattctgtagtcgcatttgcactccatttttacattaattcgcagttgctttgtatcattgttttgtttgggttttgtttctttttcacagtgccgggtcttcgtttcttaaagttggatggcaggtagagttcaaccagttcgtgactgttgtagcgaatgaagttaaaaaaatgtctttctgatgttgtgttgtcattttcatttttgcatttttttgtttgcatattaaaaaaagagaaaagagaaagcaagagacagaaatcaggactaagtcctctgcttcagtttcattgttaacgggccttattctgatctcacctgtcgcgtagctctaatattcacataaactgaaataaagaagtggaatgaggagctttgacattcaaattatgtgatgtaatttatcttccttaggaattttgatggatgcatctcaaaatgtatagccagacttgagaggtgacaattaaagatctaaaaaagagaggagattcccccaaacaacaatatttaattttcttagtaaaaagaataacagaatgcatcgtggcaatccttaagcaacattatctatgtggactgcttaaatcagcaaaacaccagaagtttggttaacttgggcaatatgacaagtattactttttgggcaaaactactcattaagcaatttctctagtgtgtcggacacaaataggttctttatttttggcatgtatgcctttttattttcattcaattttttttttttctcagacagacatagtagtatcaactagcattggaaaatacatatcactattcttggaatatttatggtcagtctactttttagtaaaatatttttggatagcgttgacacgatagatcttattccatacttctttattattgataattttattttcattttttgctttcattattatacatattttggtggagaagaggttgggcttttttgaaagagacaaaaatttattataacactaaacactccttttttgacatattaaagcctttattccatctctcaagatatattataaaatttatttttttaatttaagatttctgaattattttatcttaaattgtgattttaaacgagctattatggtacggaactttttttaatgaggaatttcatgatgatttaggaattttctctcttggaaaaggcttcccctgtgatgaaaatgatgtgccagctaaaattgtgtgccatttaaaaactgaaaatattttaaaattatttgtctatattctaaattgagctttggatcaaactttaggccaggaccagctcatgcgttctcattcttccttttctcactctttctctcatcactcacctctgtattcattctgttgtttgggatagaaaaatcataaagagccaacccatctcagaacgttgtggattgagagagacactacatgactccaagtatatgagaaaaggacagagctctaattgataactctgtagttcaaaaggaaaagagtatgcccaattctctctacatgacatattgagattttttttaatcaacttttaagatagtgatgttctgttctaaactgttctgttttagtgaaggtagatttttataaaacaagcatggggattcttttctaaggtaatattaatgagaagggaaaaaagtatctttaacagctctttgttgaagcctgtggtagcacattatgtttataattgcacatgtgcacataatctattatgatccaatgcaaatacagctccaaaaatattaaatgtatatatattttaaaatgcctgaggaaatacatttttcttaataaactgaagagtctcagtatggctattaaaataattattagcctcctgttgtgtggctgcaaaacatcacaaagtgaccggtcttgagacctgtgaactgctgccctgtttagtaaataaaattaatgcatttctagagggggaatatctgccatccagtggtggaaatgtggagtaaagaagctggtggtctgcttctgtgctgtatgccagccttttgccttaagttgagaggaggtcaactttagctactgtctttggtttgagagccatggcaaaaaaaaaaaaagaaaaaaagatcaagtcgtctttggtgagccagtaaggtgaaagcttgctgactgtccaaggcacaagagaaaattgaggaattgaaatgcaacctgagtatcaaactaaatattctaatcaaaggtaggtactgttaggtggaattctatcagcaggcaactgcaaatgagaagaagatagaaggacgcccgtcgggactttggagggcattgttattttcccaaagaaagacggccaagggcagaggcatggattctttgcagagcacttccttttggtttttcagtactgtttcatagacagtgggctcacatgttcctgatagtgctgcagttgcttagaaagcatcccagttaattgcagtaattagaacttctggaatatgctagggcagaagtatgtcaagtatgtcacatgaagaaaatgtgaaattcaagagtaatccacacgtgagaaactagacaatgtacattcatgtgttctcttgaaaggaaagggagagctgtaagcttcactctgtcctacaccggagaaaagcaggaataactttaccgtggaaataatgtttagcttttatcagagaaaattgtccttctagagcatagagtcccaaaactcaattctggttttcccctgttttttttttttttttttttcccaacatatgaactgcagcatatcactttttctttttgtgcctcaggttcctcacctgtaaaattgaaaaatatatgtattaataatattattaataataataatggtaatgtagtacttgtttgtaaagcactttgagatccttggttgaaaggcaccataggagtgccaagtattattatgtggccaagggggttatttaaactgtcagttcccaaaggccaggaaaggttggggtcatttttcttaaagacgagctgtaaatatcaactaggcagccaatagtgttgactatgaagatgcaaaactattactaggctgataaaatcatagtttcttaatggctaccaataaggcaaatatcacaataataaacgccaaattccttagggcggactatttgacaaccacatggaaaactttgggggaggcatgaggggggaacatctcaaaatgccaatgtaaaatttaacttacagcaatattcaccagcagaaaatgtctttcatatggaatgatttcatgttgctaagaaaaagaattcaatttgtagtcctgatttgaatactagaatgttggctataatagttctgttcttacaacacatgaaattttttcgttttattttattttgttttcatagtgcatgttcatttctactcacaaacatgttcttggtgtatttcttatgcaaacaatcttcaggcagcaaagatgtctgttacatctaaacttgaataataaagttttaccaccagttacaca

SEQ ID NO: 741 - protein, 1294 aa, Homo sapiens
MPYEVNAGYDFTNMVRKKNPPLRNVASEGEGQILEPIGTESKVSGKNKEFSADQMSENTDQSDAAELNHKEEHSLHVQDPSSSSKKDLKSAVLSEKAGFNYESPSKGGNFPSFPHDEVTDRNMLAFSSPAAGGVCEPLKSPQRAEADDPQDMACTPSGDSLETKEDQKMSPKATEETGQAQSGQANCQGLSPVSVASKNPQVPSDGGVRLNKSKTDLLVNDNPDPAPLSPELQDFKCNICGYGYYGNDPTDLIKHFRKYHLGLHNRTRQDAELDSKILALHNMVQFSHSKDFQKVNRSVFSGVLQDINSSRPVLLNGTYDVQVTSGGTFIGIGRKTPDCQGNTKYFRCKFCNFTYMGNSSTELEQHFLQTHPNKIKASLPSSEVAKPSEKNSNKSIPALQSSDSGDLGKWQDKITVKAGDDTPVGYSVPIKPLDSSRQNGTEATSYYWCKFCSFSCESSSSLKLLEHYGKQHGAVQSGGLNPELNDKLSRGSVINQNDLAKSSEGETMTKTDKSSSGAKKKDFSSKGAEDNMVTSYNCQFCDFRYSKSHGPDVIVVGPLLRHYQQLHNIHKCTIKHCPFCPRGLCSPEKHLGEITYPFACRKSNCSHCALLLLHLSPGAAGSSRVKHQCHQCSFTTPDVDVLLFHYESVHESQASDVKQEANHLQGSDGQQSVKESKEHSCTKCDFITQVEEEISRHYRRAHSCYKCRQCSFTAADTQSLLEHFNTVHCQEQDITTANGEEDGHAISTIKEEPKIDFRVYNLLTPDSKMGEPVSESVVKREKLEEKDGLKEKVWTESSSDDLRNVTWRGADILRGSPSYTQASLGLLTPVSGTQEQTKTLRDSPNVEAAHLARPIYGLAVETKGFLQGAPAGGEKSGALPQQYPASGENKSKDESQSLLRRRRGSGVFCANCLTTKTSLWRKNANGGYVCNACGLYQKLHSTPRPLNIIKQNNGEQIIRRRTRKRLNPEALQAEQLNKQQRGSNEEQVNGSPLERRSEDHLTESHQREIPLPSLSKYEAQGSLTKSHSAQQPVLVSQTLDIHKRMQPLHIQIKSPQESTGDPGNSSSVSEGKGSSERGSPIEKYMRPAKHPNYSPPGSPIEKYQYPLFGLPFVHNDFQSEADWLRFWSKYKLSVPGNPHYLSHVPGLPNPCQNYVPYPTFNLPPHFSAVGSDNDIPLDLAIKHSRPGPTANGASKEKTKAPPNVKNEGPLNVVKTEKVDRSTQDELSTKCVHCGIVFLDEVMYALHMSCHGDSGPFQCSICQHLCTDKYDFTTHIQRGLHRNNAQVEKNGKPKE

SEQ ID NO: 742 - DNA, 7155 bp, Homo sapiens
atgtttggcagggagttctgttacgccatggaaaccgctctggtcacaccaatactgttgcagattggccttccggagcagtactacagcctcacctggttcctgagccccatccttggcctcatcttcacacctctcattgggtctgcgagtgaccggtgcaccctgagctggggccgccggcggcccttcatcctcgccctctgcgttggcgtcctctttggcgttgcacttttccttaacggctctgccatcggtctggccctcggcgatgtccccaaccggcagcccattggcatcgtgctcacggtgctgggagtggtggtcctggacttcagcgccgatgccaccgaggggcccatccgtgcctatctgctggacgtggtggacagcgaggagcaggacatggccctcaacatccacgccttctctgccggcctcggcggagccatcggctacgtgctgggtgggctggactggacccagaccttcctgggcagctggttccggacccagaaccaggtgctcttcttctttgccgccatcatcttcacggtgtccgtggccctgcacctgttcagcatcgacgaggagcagtacagcccgcagcaggagcgcagcgctgaggagcccggcgccctggatgggggcgagccgcacggcgtccctgccttcccagacgaggtacagtcggagcacgagctggccctggactacccggacgtggacatcatgcgcagcaaaagcgactcggcattgcacgtgccggacaccgcgctggacctggagcccgagctgctgttcctgcacgacatcgagccctccatcttccacgacgcctcctaccccgccaccccccgcagcaccagccaggagctcgccaagaccaagctgccccgcctggccaccttcctcaaggaagccgccaaggaggacgagaccttgctggataatcacttgaatgaagctaaagtcccaaacggaagtggctcccccacaaaagacgccctcggcggctacaccagggtggacacgaagccctcggccacgtcgagctccatgcggcggcggcggcacgcgttccgcaggcaggcctccagcaccttctcctactacggcaagcttgggtcccactgctaccgctaccggcgcgccaacgccgtggtgctgatcaagccgtcgcgcagcatgagcgacctgtacgacatgcagaagcggcagcggcagcaccggcaccggaaccagagcggggccaccacctccagcggggacaccgagagtgaggagggggagggcgagaccacggtgcgcctgctgtggctctccatgctgaagatgcccagggagctgatgcggctgtgcctctgccacctcctcacctggttctctgtcatcgccgaggccgtgttctacaccgacttcatgggccaggtcatcttcgaaggcgaccccaaggccccctcgaactcgaccgcctggcaagcctacaacgccggggtcaagatgggctgctggggcctggtcatttatgccgccactggtgctatttgttcagccctgttacagaagtacttggacaactacgacctgagcgtcagggtgatctacgtgctggggacgctgggcttctctgtcggcacagccgtgatggccatgtttcccaacgtctacgtcgccatggtcaccatcagcaccatgggcatcgtctccatgagcatctcctactgcccgtacgccctgctgggccagtaccatgacatcaagcagtacatccaccacagccccgggaactccaagcgagggtttggcatagattgtgccatcctgtcctgccaagtgtacatctcgcagatcctggtggcctctgcccttgggggcgtggtcgacgccgtggggactgtccgcgtcatccccatggtggcctctgtgggctctttcctgggcttcctgacggccacattcctggtgatctatcccaacgtgtcagaggaggccaaggaggagcagaaaggcctgtcttccccgttggccggcgaaggcagggccggtgggaacagcgaaaagcccaccgtgctgaagctcacgcggaaggagggcctgcagggaccggtggagacagagtccgtggtctgagccgcactcccgtttacacacattccagtgggcgggtgggcgggcgggcgggcggcggggccaggccatgggcgggagcagagacaccgcggaaccctgcagatgctgtggccgacccggcagtgcgggccagagcccctccgcccccatagccacaattcagtagtcgtagggtaggtttgagctactaagcaaataccacactaaccactttttcgataattaaaagaatcatttgaaatattttttttaattgaaaaagatattttaatttcagctcttttattctgcaggtgtattattctgcatgtttttaaatgatataaaacatttatatagacaataagcaacttagaaaaaataagattttgcatttctaaaattataattgaaaacaaaatctgacattctctgctaagtcttatctgaatgcttcagataatggtagtgtagtcagtgactaaaatatttttatcaaatttcctctctgtagacgcctgcaggtattgacgtctgtcagatctcgtcacattggctggtgccgcagctgttggagagtatttttctttatgattattttagaaaaaaaattttcttttccacaatgtggttctcttagaagaatgacgtatcttcttttcctcagcgagttggacacattgtgcccagggcagccctgtccttgggcagcgaccgcacaccaaagctgggaggaggctggtccggggggcctgggcagaagacagtgatttgcaggggtggctcccagacaccctgcccagggatgggctgggcaccacctgggggcggagcgtgagctccagacgagctcctgcgtgcgcgtgtgagtgtgtctgcgcccagccatgtgaccccgctcgtcccgtctgaaggactctcctaggaggccaggttgcccctccagaccgctcccaacgtcagggggaaggaaacgttgactttcactgcactttgattcgtctctaaaccatttgctggggattcctgagagcagagctcccagcgggccctgcctcccaagtcccgccgcaaggctacctcgggtgtgtggatgtgcgagggcctcccccgcttgcgaaggggacatgcgtgctggaacctgtcggaactccatgccttcctcgcctgctcacctgctcgacgctggaatcgggacaggtgcaaagggacgcagacgtctgggacagctaaggcccgtgtcaccggagggctccgcacagtcgttctggtttcaacgaataagcaaaactcgggcaagtactgcagctatttggaaatgttttccaaaccacagtctctttagaactaagcctatttgaaacggtcggtgtaggcttactgagatcaggagacagggaggccccgcacatcacacagataaagtcagacaattgtaattaatacttttgctgcctcaagttgttttttaaataaagtactttgaaatgcatgagaatcatgctgcaatatgatcattctagagcaaatatatatatacacgtatatatatttcaagatgaaactaaagcagtttttaaataaattacttgaattttctgtgtatttaaaggaacgactgtttaatgtacttgatgggcctctggtcttgccgtgtctcctgccgctggtggcactttgtagattgtgtgtttgtgtccgggtggcagttgggtacctgctcacgcacggtgtgtctgccaggccacggtgtcccaggatcgcagagggctgactttcaagacttcaagaacattttctggatgtgtggaaacttgagaatggccttgtgaatctcgtgcttggacagggcaagtccgactactgaaagtgctgccagctttgctgcgagccctccggccagcgggagccccgtgggctgggcactgtggcccttcttctctgggggacggcacccctggcttcctcacctcggccgggcgtccgtggcagctcactctatgcaacttgatcctctagcggctttaagactgtagatcccctctctgagacctggctgtacttgtcaggatctcgaggcgcagctcccgtcttagctggtttctccggcttctcgtcctgacgactataaaacagttggaggcaagaaagcagcggatgtggggtggcagtggcctgacccgaatcaagatccgacccaaaccacaccaaatgtgggttcatctgggggccaccccttgcctgaggcttcccaccctcatctgaaggcccaggggccggatccagggctcaccaaagccgattcctcgccagctgggagtgcagaagtctcagggcctggctgcgacttgatttttaggaggaagaggggcttcgcaacccccctctgaatagtgtgttaacccttgagatcccagcctcgactaatctgaagtaaggacaacaaaggccattcagtgccctccacatggccttgccacagtcactgtcagggtatgaacgtgccggaagccagtgccagccagggacaggcgtgactgttgtgtgctcctcggtgacaggagtcggtggctgcacactttgtagactcgtcaagctgtcagcacttcaggtgtttgcaagcaaagcccttcttagtgtgcaggtcagtgtgcagagcccaaatgaggggaccgcaggggctggggtccagggtcagtagagtcggtttctggagctgccttcctgggaggcaggtgtgggtgaccggggctctggcggtgcgtgtgggcccggcctggccacagcggggaccaggtcacgacatctttggcctcaacccctcccctgcactgagattatttccagattgcactcacttgaaaccgtccgtgtcgtcaccttgtgtcttaagggaagccgagaagaagggcagacgggcaggctgtcttgtctgcaaagcgccattgcgcccgcagcttgtgtgggtcaggctgcagctcgggtgtctgtggcttctaaccttgtacctcagacggatgcagtaacaaggcggggctggggacgccggtcagtgtcaaaggggaggtgctctggctgatagccttgcccgagagggacgaggaggccgtgcgggtgccccctggggaagctggccagccatccagtgctgaggacgcagctggagttgggctcgtggcacccttggggtgtgggctgtgcaggctggtggcctgggtgcctctgcacactgagtggagtgtcaggcagggtgtgtcggttggtcgagtcttgtgtaatgtgcgcagaccagttaccaaactaggataatgttggtctcatttgtggtggttttgttccctatacaagtcagctaagtaaagactcttttaacgagcttccccttaacacatggcagaagtttccaggtgcaggaatgcgagctggcgggaaggggcagaggccgtgagctctcagctgggccggcctgcctgtgtcccctttcctgggtctgtcggcagactggcatcatgacgttccctggtggctgaagagctagctttggagtgttgtttttctcactctcaggcaggggccttagctggaatcctccaacctgccactgaacacgtcagtgctgtgtgctgcctcttggacacctgcccttgaaagcctcaggcccctgggagaagcactctgtccagtcctgtccccgggggggaggcagggccactgagccctcctcagatggttagtggcttccaacagccatcaggagtgtttcttgaatgccccaggtgtggaggacttggtctgtgaccacctagaaccccagagctgaacaggaagccgtccctgcagcaacaagagggctggaagggggagctgcaggccaccctcggctctcccactgctggggcggtgatgttcgggtgacatgtttgaaaaatactcttaaagataccaactgttcccttatatggctaatggtttgtgcagccaccagcgatggcggcccctattagagaccaggtttgttaaaacaccaaatattgctgtccacactagacattaaccggcttcagaaaagatggacaccttttcccacgctgtttcgcttcttaactttggtccagctttagccaccacacagcgtgtgagggactgctgctgcggagtcagcctcgtttgtccctccgcctcccaccagcacgcgccgcttctgagagacaccagctccctgcctccaagcctggtgccacaggcctgtcgtgagggacccctgcttccgagagctcctgggggggttctgcccttcaccacctgggagaggtgtcagttcagttccgagttgaacaaggcccgtgcacacagcatgttgggggcccagcccaaagttcttgtcacctcctcatgcaaagccagccatcaccctccggccagagctcaaggtggccccttggccagcccctccttgggtcctccaggaggactgagcacccctcctagcggcatcccttgccctccacagtgctgccaggggcacgtcgctctgtgccgtggactgagaccatcccctggtgacagaatgacccgtttgttggaaatgcctcgttgccagagaaactccccaggcatctcggaacgaaactatttagttccattgtgaactggccacgggacagctttttatcaacttattaagttggagcactgtaatcgcgcttgctgagttagcagtggtggtaagcgtgtgttaaacacataatgttacgttttaggagagagaggtcgtaaggaagtgtcgtgtcgctcatgactctcttctattagttgggtaacagtggcctcatgtttgtgtctgtgtgtacacagagcccttaggttctgctctgtttctttgccaggtgaatgtttgtggcatgcgctgctgtccgcgcccctctgtcctgcgcagggttcagctgtgcggcgccctgatttcctccatgcacacagaacctccttgtgtctgtttctctgttcctctgtggctgactcaataaacttttccctctgacatga

SEQ ID NO: 743 - protein, 710 aa, Homo sapiens
MFGREFCYAMETALVTPILLQIGLPEQYYSLTWFLSPILGLIFTPLIGSASDRCTLSWGRRRPFILALCVGVLFGVALFLNGSAIGLALGDVPNRQPIGIVLTVLGVVVLDFSADATEGPIRAYLLDVVDSEEQDMALNIHAFSAGLGGAIGYVLGGLDWTQTFLGSWFRTQNQVLFFFAAIIFTVSVALHLFSIDEEQYSPQQERSAEEPGALDGGEPHGVPAFPDEVQSEHELALDYPDVDIMRSKSDSALHVPDTALDLEPELLFLHDIEPSIFHDASYPATPRSTSQELAKTKLPRLATFLKEAAKEDETLLDNHLNEAKVPNGSGSPTKDALGGYTRVDTKPSATSSSMRRRRHAFRRQASSTFSYYGKLGSHCYRYRRANAVVLIKPSRSMSDLYDMQKRQRQHRHRNQSGATTSSGDTESEEGEGETTVRLLWLSMLKMPRELMRLCLCHLLTWFSVIAEAVFYTDFMGQVIFEGDPKAPSNSTAWQAYNAGVKMGCWGLVIYAATGAICSALLQKYLDNYDLSVRVIYVLGTLGFSVGTAVMAMFPNVYVAMVTISTMGIVSMSISYCPYALLGQYHDIKQYIHHSPGNSKRGFGIDCAILSCQVYISQILVASALGGVVDAVGTVRVIPMVASVGSFLGFLTATFLVIYPNVSEEAKEEQKGLSSPLAGEGRAGGNSEKPTVLKLTRKEGLQGPVETESVV

SEQ ID NO: 744 - DNA, 14755 bp, Homo sapiens
gaggccatgtcgggtgaggacgctgaggtccgggcagtctctgaagatgtctccaatggaagcagtggctcgcccagccctggggacacactgccctggaaccttgggaaaacgcagcggagccggcgcagcgggggtggcgctgggagcaacgggagtgtcctggacccagctgagcgggcggtcattcgcatcgcagatgagcgggatcgtgtgcagaagaaaaccttcaccaagtgggtcaacaagcacctcatcaaggcccagaggcacatcagtgacctgtatgaagacctccgcgatggccacaacctcatctccctgctggaggtcctctcgggggacagcctgccccgggagaaggggaggatgcgtttccacaagctgcagaatgtccagattgccctggactacctccggcaccgccaggtgaagctggtgaacatcaggaatgatgacatcgctgacggcaaccccaagctgacccttggcctcatctggacaatcattctgcacttccagatctcagatatccaggtgagtgggcagtcggaggacatgacggccaaggagaagctgctgctgtggtcgcagcgaatggtggaggggtaccagggcctgcgatgcgacaacttcacctccagctggagagacggccgcctcttcaatgccatcatccaccggcacaagcccctgctcatcgacatgaacaaggtgtaccggcagaccaacctggagaacctggaccaggccttctctgtggcggagcgggacctgggagtgacgcggctcctggaccctgaggacgtggatgtccctcagcccgacgagaagtccatcatcacctacgtctcgtcgctgtatgacgccatgccccgcgtgccggacgtgcaggatggggtgagggccaacgagctgcagctgcgctggcaggagtaccgggagctggtgctgctgctgcttcagtggatgcgacaccacacggccgcctttgaggaacgcaggttcccctccagcttcgaggagattgagatcctgtggtctcagttcctgaagtttaaggagatggagctaccagccaaggaggccgacaagaacaggtccaagggcatctaccaatccctggagggagcggtgcaagcaggccagctcaaggtgccccctggctaccacccgctggatgtggagaaggagtggggcaagctgcacgtggccatcctggagcgggagaagcagctccgcagcgagtttgagaggctggagtgtcttcagcgcatcgtgaccaagctgcagatggaggcggggctgtgtgaggagcagctgaaccaggccgacgccctgctgcagtcggatgtccggctgctggctgcaggcaaagtgccacagcgggcgggggaggtggaacgggacttggacaaggcggatagcatgatccggctgctcttcaacgacgtgcagaccctcaaggatggacggcacccgcagggcgagcagatgtaccgcagggtgtaccgtctgcacgagcgcctggtagccatccgcaccgagtacaacctacggctgaaggcaggcgtggcggcccctgcaacccaggtggcccaggtgactctgcagagtgtgcagaggcgccccgagctggaggactccactctgcgctacctgcaggacctgctggcctgggtggaggagaaccagcaccgtgtggatggcgctgagtggggtgtggacctgcccagcgtggaggcgcagctgggcagccaccgaggcctgcaccagtccatcgaagaattccgggccaagatcgagcgggcacggagtgacgagggccagctctcccccgccacccggggtgcctaccgtgactgcctgggtcggctggacctgcagtacgccaagctgctgaactcctccaaggcccgcctcaggtccctggagagcttgcacagctttgtggcagccgccactaaggagctaatgtggctgaatgagaaggaggaggaggaggtgggcttcgactggagcgaccgcaacaccaacatgaccgccaagaaggagagctactcggcgctgatgcgggagctggagctgaaggagaagaagatcaaggagctccaaaatgctggggaccggctgctgcgggaggaccacccggcccggcccacggtggagtccttccaggcggccctgcagacgcagtggagctggatgctacagctgtgctgctgtatcgaggcacacctgaaggagaacgctgcctactttcagttcttctcagatgtgcgggaggccgaggggcagttgcagaagctgcaggaggcactgcgtaggaaatacagttgtgatcgctccgccaccgtcacccggctggaggacctgctgcaggatgcccaggacgagaaggaacagctgaacgagtacaagggccacctctcaggcctggccaagcgggccaaggccgtcgtgcagctgaagccccgccacccagcccaccccatgcggggccgcctgcccctgctggccgtgtgcgactataagcaggtggaggtgactgtgcacaagggtgacgagtgccagctggtgggccctgcacagccgtcccactggaaggtgctcagcagctccggcagcgaggccgccgtgccctccgtgtgcttcctggtgcccccgcccaaccaggaggcccaggaggccgtcaccaggctggaggcccagcaccaggccctggtcacgctgtggcaccagttgcacgtggacatgaagagccttctggcctggcagagccttcgccgcgacgtgcagctcatccgctcctggtccctggccacgttccgcaccctgaagccagaggagcagcgccaagccctgcacagcctggagctgcactaccaggccttcctgcgggacagccaggacgcgggcggcttcggacccgaggaccggctgatggctgagcgcgagtacggctcctgcagccaccactaccagcagctgctgcagagcctggaacagggtgcacaggaagagtctcgctgccagcgctgcatctccgagctcaaagacatccggctgcagctggaggcctgtgagacgcgcaccgtgcaccgcctgcggctgccgctggacaaagagccggcacgggagtgtgcccagcgcatcgccgagcagcagaaggcacaggcagaggtggaggggctgggcaagggggtcgcccggctctctgccgaggccgagaaggtcttggccctaccagagccatcgcctgcggcccccacgctgcgctcggagctggagctgacgctgggcaagctggagcaggtccgcagcctgtctgccatctacctggagaagctcaagaccatcagcctggtgatccgcggcacgcagggggccgaggaggtgctcagggcccacgaggagcagctcaaggaggcccaggccgtgccggccaccctcccggagctcgaggccaccaaggcctctctgaagaagctgcgggcccaggccgaggcacagcagcccacgttcgacgccctgcgggatgagctgcggggggcacaggaggtgggggagcgactgcagcagcggcacggggagcgggacgtggaggtggagcgctggcgggagcgggtcgcccagttgcttgagcgctggcaggctgtgctggcccagaccgacgtgcggcagcgcgagctcgagcaactgggccgccagctgcgttactaccgcgagagtgcagaccccttgggcgcctggctgcaggacgccaggcggcggcaggagcagatccaggccatgccgctggccgacagccaggctgtgcgggagcagctgcggcaggagcaggccctgctggaggagatcgagcgccacggcgagaaggtcgaggagtgccagaggtttgcgaaacagtacatcaacgccatcaaggactatgaactccagctggtgacgtacaaggcgcagcttgagccggtggcctccccggccaagaagcccaaggtccagtcgggatcagagagtgtcatccaggagtacgtggacctgcgtacgcactacagcgagctgaccacactgacgagccagtacatcaagttcatcagcgagactctgcggcgcatggaggaggaggagaggctggctgagcagcagcgggcagaggagcgcgagcggctggccgaggtggaggccgcgctggagaagcagcggcagctggccgaggcgcacgcccaggcaaaggcacaggcggagcgggaggcgaaggagctgcagcagcgcatgcaggaggaggtggtgcggcgggaggaggcggcggtggacgcgcagcagcagaagcgcagcattcaggaggagctgcagcagctgcggcagagctcggaggcggagatccaggccaaggcccggcaggcagaggcggctgagcgcagccggctgcgcatcgaggaggagatccgcgtggtgcgcctgcagttggaggccaccgagcgccagcgtggcggggctgagggggagctgcaggcactgcgtgcacgggcggaggaggctgaggcacaaaagcgacaggcgcaggaggaggccgagcgcttgcggaggcaggtgcaggacgagagccagcgtaagcggcaggcggaggtggagctggcctcgcgcgtgaaggccgaggccgaggcggcgcgcgagaagcagcgggccctgcaggccctggaggagctgcggctgcaggcggaggaggcggagcggcgcctgcggcaggccgaggtggagcgagcgcggcaggtacaggtggccctggagacggcgcagcgcagtgcagaggcggagctgcagagcaaacgcgcctccttcgccgagaagacggcacagctggagcgctccctgcaggaggaacacgtggctgtggcacagctgcgggaggaggctgagcggcgggcacagcagcaggccgaggccgagcgggcgcgcgaggaggcagagcgggagctggagcgctggcagctcaaggccaacgaggcgctacggctgcggctgcaggcggaggaggtggcgcagcagaagagcctggcgcaggccgaggctgagaagcagaaggaggaggcggagcgcgaggcgcggcggcgcggcaaggcggaggagcaggccgtccggcagcgggagctggctgaacaagagctggagaagcagcggcagctggcggaaggcaccgcgcagcagcgcctggccgcggagcaggagttgatccggctgcgggccgagacggagcagggggagcagcagcggcagctgctggaggaggagctggcccggctgcagcgtgaggcggctgcagccacgcagaaacggcaggagctggaagccgagctggccaaggtgcgggccgagatggaggtgctgctggccagcaaggcgagggctgaggaggagtcgcgctccaccagcgagaagtccaagcagaggctggaggccgaggccggccggttccgcgagctggccgaggaggccgcccgcctgcgtgccctggcggaagaggccaagcggcagcggcagctggccgaggaagacgcggcgcggcagcgggccgaggcggagcgggtgcttgcggagaagctggccgccatcggcgaggccacgcggctcaagacggaggcggagatcgcgctcaaggagaaggaggcggagaacgagcgcctgcggcggctggcggaggacgaggccttccagcggcggcggctggaggagcaggccgcgcaacacaaggctgacatcgaggagcgcctggcccagctgcgcaaggcatcggacagcgagctggagcggcagaaggggctggtggaggacacgctgaggcagcggcggcaggtggaggaggagatcctggcgctgaaggcgagcttcgagaaggcggccgctggcaaggcggagctggagctggagctgggacgcatccgcagcaacgcggaggacacgctgcgcagcaaggagcaggccgagctggaggctgcgaggcagcggcagctggcggcggaggaggagcggcggcgccgtgaggctgaggagcgcgtgcagaagagcctggcggccgaggaggaggccgcacggcagcggaaggcggcgctggaggaagtcgagcggctgaaagccaaggtggaggaggcgcggcgcctgcgggagcgagcggagcaggagtcggcgcggcagctgcagctggcccaggaggccgcccagaagcggctgcaggcggaagagaaggcacacgccttcgcggtgcagcagaaggagcaggagctacagcagacgctgcagcaggagcagagcgtgctggaccagctgcgcggcgaggcggaggcggcccggcgggcggctgaggaggcggaggaggcccgggtgcaggcggagcgtgaggcggcgcagtcccggcggcaggtggaagaggccgagcggctgaagcagtcggcagaggagcaggcacaggcccgggctcaggcacaggcggctgcagagaagctgcgcaaggaggccgagcaagaggcggcgcggcgggcacaggcggagcaggcggccctgcggcagaagcaggcagctgacgcggagatggagaagcataagaaattcgccgagcagacgctgcggcagaaggcgcaggtggagcaggagctgacaacactgcggctgcagctggaggagaccgaccaccagaagaacctgctggacgaggagctgcagcggctgaaggcggaggccacggaggccgcacgccagcgcagccaggtggaggaggagctcttctcggtgcgcgtgcagatggaggagctgagcaagctcaaggcacgcatcgaggctgagaaccgcgcactcatcttgcgtgacaaggacaatacgcagcgcttcctgcaggaggaggctgagaagatgaagcaggtggcggaggaggccgcgcggctgagtgtggcggcccaagaggctgcgcgactgcggcagctggcagaggaggacctggcacagcagcgggccttggcagagaagatgctcaaggagaagatgcaggcggtgcaggaggccacgcgactcaaggctgaggcggaactgctgcagcagcagaaggagcttgcgcaggagcaggcgcggcggctgcaggaggacaaggagcagatggcgcagcagctggcggaggagacgcagggcttccagcggacgctggaggccgagcggcagcggcagctggagatgagcgctgaggctgagcgcctcaagctgcgtgtggccgagatgagccgagcccaggcccgcgctgaggaggacgcccagcgcttccggaagcaggcggaggagatcggtgagaagctgcaccgcacggagctcgccacccaggagaaggtgaccctggtgcagacactggagatccagcgacagcagagtgaccatgatgccgagcgcctgcgggaggccatcgctgagctggagcgtgagaaggagaagctccaacaggaggccaaactgctgcagctcaagtctgaggagatgcagacggtgcagcaggagcagctgctgcaggagacgcaggccctgcagcaaagcttcctctctgaaaaggacagcctgctacagcgggagcgcttcatcgagcaggagaaggccaagctggagcagctcttccaggacgaggtggccaaggcacagcagctgcgtgaggagcagcagcggcagcagcagcagatggagcaggaacggcagcggctggtggccagcatggaggaggcgcggcggcggcagcatgaggccgaggagggcgtgcggcgcaagcaggaggagctgcagcagctggagcagcagcggcggcagcaggaggagctgctggctgaggagaaccagaggctgcgtgagcagctgcagctcctggaggagcagcaccgggccgcgctggcgcactcagaggaggtcactgcctcgcaggtggctgccacaaagaccctgcccaatggccgggatgcacttgatggccccgcggcagaggcagagccggagcacagcttcgatggcctgcggcggaaggtgtcagctcagaggctgcaggaggccggcatcctgagtgcggaggagctgcagcggttggcgcagggccacaccacggtggacgagctcgcacggcgggaagacgtgcgccactacctgcagggccgcagcagtatcgcagggctgttgctgaaggccaccaatgagaagctgagtgtttacgccgccctgcagaggcagctgctgagtcccggcacggccctcatcctgctggaggcgcaggcggcctcaggcttcctgctggaccctgtgcggaaccggcggctgaccgtcaacgaggctgtgaaggagggtgtggtgggccccgagctgcaccacaagctgctgtcggccgagcgcgccgtcactggctacaaggacccctacactggccagcagatctctctcttccaagccatgcagaagggcctcatcgtccgggagcacggcatccgcctgctggaggcccagatcgccacgggcggcgttatcgaccccgtgcacagccaccgcgtgcccgtggacgtggcctaccggcgcggctacttcgacgaggagatgaaccgcgtcctggcggaccccagcgacgacaccaagggcttctttgaccccaacacgcacgagaacctcacgtacctgcagctactggagcgctgcgtggaggaccccgagacgggcctgtgccttctgccactcacggataaggctgccaagggcggggagctggtctacactgactccgaggcccgggacgtctttgagaaggccaccgtgtctgcgccgttcggcaagttccagggcaagacggtgaccatttgggagatcatcaactcggaatacttcacggcagagcagcggcgggacctgctgcggcagttccgcacgggccggatcacagtggagaagatcatcaagatcatcatcacggtggtggaggagcaggagcagaagggccggctttgctttgagggcctgcgcagcctggtgccagccgccgagctgctggagagcagggtcatcgaccgcgagctctaccagcagctgcagcgaggtgagcgctctgtgcgagacgtagccgaggtggacactgtgcggcgggctctccggggtgccaacgtcatcgcgggtgtatggctggaggaggcggggcagaagctgagtatctacaatgccctgaagaaagacctgctgccatccgacatggccgtggccctgttggaagcccaggccggcaccgggcacatcatcgaccccgccaccagcgcccggctgaccgtggacgaggcagtgcgtgctggcctggtgggccccgagtttcatgagaagctgctatcagccgagaaggctgtgacagggtacagggacccctacacagggcagagcgtctccctgttccaggccctgaagaagggcctcattccccgggagcagggcctgcgcctgttggacgcccagctgtccacgggcggcatcgtggaccccagcaagagccaccgcgtgcccctggatgtcgcctgcgcccgaggctgcctggatgaggagaccagcagggccctgtcggcaccaagggccgacgccaaggcctacagtgaccccagcacaggggagccggccacctacggcgagctccagcagcggtgccggcccgaccagctgaccgggctgagcctgctgccgctctcagaaaaggctgctcgggcccggcaggaggagctctactcagagctgcaggcccgtgagacctttgaaaagaccccggttgaggtccccgtgggtggcttcaagggcaggacggtgacggtgtgggagctcatcagctctgagtacttcactgcggagcagcggcaggagctgttgcgtcagttccgcacgggcaaggtcaccgtggagaaggtcatcaagattctcattaccatcgtggaggaggtggagaccctgcggcaggagaggctgtccttcagcggcctccgtgcccctgtgccagccagcgagctcctggcttccggggtcctcagcagagcccagtttgagcagctcaaggacggcaagacgacggtcaaggacctttcggagctgggctccgtgcggacgctgctgcagggcagtggctgcctcgccggcatctacctggaggacaccaaggagaaggtgtccatctacgaggccatgcgccggggcctgctgagagccacaacggctgcgctcctgctggaggcgcaggcggccactggcttcctggtggaccccgtgcggaaccagcgcctgtatgtccacgaggccgtgaaggcgggcgtggtgggccccgagcttcacgagcagctgctgtctgccgagaaggccgtcaccggctacagagacccctactcgggcagcaccatctccctcttccaggccatgcagaagggcctggttctccggcagcacggcatccgcctgctggaggcccagatcgccacgggcggcatcatcgaccccgtgcacagccaccgcgtgcctgtggacgtggcctaccagcgcggctacttcagtgaggagatgaaccgcgtcctggcggaccccagcgacgacaccaagggcttctttgaccccaacacgcatgagaacctcacgtacaggcagctgctggagcggtgcgtggaggaccccgagacgggcttgcgccttctgccactgaaaggggcggagaaggctgaggtggtggagaccacgcaggtgtacactgaggaggagacaagaagggcatttgaagagacacagatcgacattcccggcggcggcagccacggcggctccaccatgtccctgtgggaggtgatgcagtcggacctgatccccgaggagcagcgggcccagctgatggctgacttccaggccggccgggtgaccaaggaacgcatgatcatcatcatcatcgagatcattgagaagacagagatcatccgccagcagggtctggcctcctacgactacgtgcgccgccgcctcacggctgaggacctgttcgaggctcggatcatctctctcgagacctacaacctgctccgggagggcaccaggagcctccgtgaggctctcgaggcggagtccgcctggtgctacctctatggcacgggctccgtggctggtgtctacctgcccggttccaggcagacactgagcatctaccaggctctcaagaaagggctgctgagtgccgaggtggcccgcctgctgctggaggcacaggcagccacaggcttcctgctggacccggtgaagggggagcggctgactgtggatgaggctgtgcggaagggcctcgtggggcccgagctgcacgaccgcctgctctcggctgagcgggcggtcaccggctaccgtgacccctacaccgagcagaccatctcgctcttccaggccatgaagaaggagctgatccctactgaggaggccctgcggctgctggatgcccagctggccaccggcggcatcgtggacccccgcctgggcttccaccttcccctggaggtggcttaccagcgtggctacctcaacaaggacacgcacgaccagctgtcagagcccagcgaggtgcgcagctacgtggacccgtccaccgacgagcgcctcagctacacgcagctgctcaggcggtgccgtcgtgacgacggcaccggccagctgctcctgccactgtcggacgcccgcaagctgaccttccgtggcctgcggaagcagatcaccatggaggagctggtgcgctcgcaggtcatggacgaggccacggcgctgcagctgcgggagggcctgacctccatcgaggaggtcaccaagaacttgcagaagttcctggaaggcaccagctgcatcgctggtgtcttcgtggacgccaccaaggaacggctctcggtgtaccaggccatgaagaagggcatcatccgccccggcacagcctttgagctcctggaggcgcaggcggccaccggttacgtcatcgaccccatcaagggactgaagctgacggtggaggaggctgtgcgtatgggcattgtgggccccgagttcaaggacaagctgctgtcggccgagcgcgccgtcactgggtacaaggacccctactctgggaagctcatctccctcttccaggccatgaagaagggcctgatcctgaaggaccatggcatccgcctgctggaggcccagatcgccacgggcggcatcatcgaccctgaggagagccaccggctgcccgtggaggtggcctacaagcgcggcctcttcgatgaggagatgaacgagatcctgaccgacccctcggacgacaccaagggcttctttgaccctaacacggaggagaacctcacctacctgcagctgatggagcgttgtatcactgacccccagacgggcctgtgtctcttgccgctgaaggagaagaagcgggagcggaagacgtcctccaagtcctccgtgcgcaagcgccgagtggtcatcgtggaccccgagacgggcaaggagatgtcagtgtacgaggcctaccgcaagggcctgattgaccaccagacgtacctggagctgtccgagcaggagtgcgagtgggaggagatcaccatctcctcctcggacggcgtggtcaagtccatgatcatcgaccgccgctccgggcgccagtacgacatcgatgatgccatcgccaagaacctcatcgaccgctcggcactggaccagtaccgcgccggcacgctctccatcaccgagttcgccgacatgctctcgggcaacgccggtggtttccgctcccgttcctcctcggtgggatcctcctcctcctaccccatcagccccgccgtctccaggacccagctggcctcctggtcagaccccactgaggagacgggccccgtggctggcatcctggacacggagacgctggagaaggtgtccatcaccgaggccatgcaccggaacctggtggataacatcacggggcagcggctgctggaggcgcaggcctgcaccgggggcatcatcgaccccagcaccggtgagcgcttccctgtcaccgacgccgtcaacaagggcctggtggacaagatcatggtggaccgcatcaacctggcccagaaggccttctgcggcttcgaggacccacgcaccaagaccaagatgtcggccgcccaggccctgaagaagggctggctctactacgaggccggccagcgcttcctggaggtgcagtacctgaccggcggcttgatcgagcccgacacgccgggccgcgtgcccctggacgaggccctgcagcgcggcacggtggacgcccgcaccgcacagaagctgcgtgacgtgggcgcctactccaagtacctcacctgccctaagaccaagctcaagatctcctataaggacgcgctggaccgcagcatggtggaggagggcacggggctgcggctgctggaggctgccgcgcagtccaccaagggctactacagcccctacagcgtcagcggctccggctctaccgctggctcccgcaccggctcgcgcaccggctcccgggccggctcccgccgcggcagctttgacgccaccggctccggcttctccatgaccttctcttcatcctcctactcctcctcgggctacggccgccgctacgcctcggggtcctcggcctccctggggggccctgagtctgccgtggcctgaggctgcctgcgcccaccccgctctgcatgcggcccagcccggctcccaccgaggcgcgggggccgttttcaacgcttaaaggtgtcttcctcccaagtggtgcctaaagtttaaccaaaaagaccagactaatatattaatatatatctgctgtccagacagcctgtatcttgggggacagggctggcccagccctgctggccgcctcaccccctcgggtctcctcactcccttctacctgccactcacacagccaggtgccttggagggtcccaagctgggccccagcccaccctcctgtcttcccagggtagcccgcctgccagtcctagctgcacagggcagctgggcccaaccctgtctgtagagggccctggtgtttctagcactggcctgcacggtgggccttgctggggacggggggccccagtcagcctctctcccagtctacccagagaagccccttccccatgggaagacgaggccctcgggcccagcccccacagtgctgtctgatctgtgctttccagctcaccccccacactcactcctgagacccctggcctccggcgtcagcctccagcctctgttcccctagtaagtgccttccatgtcggcctctaaccccaggccccgaggacccagacccagtggggaggcggacgttccagccggcatggctgggaactgcagacctgtcctcctggtgggtccaggggcccctccagcttgtggagccccacactggggtgccgcctgcccgtctctctcccatggagccccagccccctttgggcccagggacaccagccaggctctgtgctgaccctcctgttgcacccagccctggtctcagcagcgaccacccctgcctccaccctctgagctttgcatgttccactaaccccgggcgggtggcaggtggaggtgtcaggctgctggcgcctctgcaagggcagaacactaacctgaccgtgggcggggccttgcggtatccgcccccaataaaagcaattccaacctt

SEQ ID NO: 745 - protein, 4574 aa, Homo sapiens
MSGEDAEVRAVSEDVSNGSSGSPSPGDTLPWNLGKTQRSRRSGGGAGSNGSVLDPAERAVIRIADERDRVQKKTFTKWVNKHLIKAQRHISDLYEDLRDGHNLISLLEVLSGDSLPREKGRMRFHKLQNVQIALDYLRHRQVKLVNIRNDDIADGNPKLTLGLIWTIILHFQISDIQVSGQSEDMTAKEKLLLWSQRMVEGYQGLRCDNFTSSWRDGRLFNAIIHRHKPLLIDMNKVYRQTNLENLDQAFSVAERDLGVTRLLDPEDVDVPQPDEKSIITYVSSLYDAMPRVPDVQDGVRANELQLRWQEYRELVLLLLQWMRHHTAAFEERRFPSSFEEIEILWSQFLKFKEMELPAKEADKNRSKGIYQSLEGAVQAGQLKVPPGYHPLDVEKEWGKLHVAILEREKQLRSEFERLECLQRIVTKLQMEAGLCEEQLNQADALLQSDVRLLAAGKVPQRAGEVERDLDKADSMIRLLFNDVQTLKDGRHPQGEQMYRRVYRLHERLVAIRTEYNLRLKAGVAAPATQVAQVTLQSVQRRPELEDSTLRYLQDLLAWVEENQHRVDGAEWGVDLPSVEAQLGSHRGLHQSIEEFRAKIERARSDEGQLSPATRGAYRDCLGRLDLQYAKLLNSSKARLRSLESLHSFVAAATKELMWLNEKEEEEVGFDWSDRNTNMTAKKESYSALMRELELKEKKIKELQNAGDRLLREDHPARPTVESFQAALQTQWSWMLQLCCCIEAHLKENAAYFQFFSDVREAEGQLQKLQEALRRKYSCDRSATVTRLEDLLQDAQDEKEQLNEYKGHLSGLAKRAKAVVQLKPRHPAHPMRGRLPLLAVCDYKQVEVTVHKGDECQLVGPAQPSHWKVLSSSGSEAAVPSVCFLVPPPNQEAQEAVTRLEAQHQALVTLWHQLHVDMKSLLAWQSLRRDVQLIRSWSLATFRTLKPEEQRQALHSLELHYQAFLRDSQDAGGFGPEDRLMAEREYGSCSHHYQQLLQSLEQGAQEESRCQRCISELKDIRLQLEACETRTVHRLRLPLDKEPARECAQRIAEQQKAQAEVEGLGKGVARLSAEAEKVLALPEPSPAAPTLRSELELTLGKLEQVRSLSAIYLEKLKTISLVIRGTQGAEEVLRAHEEQLKEAQAVPATLPELEATKASLKKLRAQAEAQQPTFDALRDELRGAQEVGERLQQRHGERDVEVERWRERVAQLLERWQAVLAQTDVRQRELEQLGRQLRYYRESADPLGAWLQDARRRQEQIQAMPLADSQAVREQLRQEQALLEEIERHGEKVEECQRFAKQYINAIKDYELQLVTYKAQLEPVASPAKKPKVQSGSESVIQEYVDLRTHYSELTTLTSQYIKFISETLRRMEEEERLAEQQRAEERERLAEVEAALEKQRQLAEAHAQAKAQAEREAKELQQRMQEEVVRREEAAVDAQQQKRSIQEELQQLRQSSEAEIQAKARQAEAAERSRLRIEEEIRVVRLQLEATERQRGGAEGELQALRARAEEAEAQKRQAQEEAERLRRQVQDESQRKRQAEVELASRVKAEAEAAREKQRALQALEELRLQAEEAERRLRQAEVERARQVQVALETAQRSAEAELQSKRASFAEKTAQLERSLQEEHVAVAQLREEAERRAQQQAEAERAREEAERELERWQLKANEALRLRLQAEEVAQQKSLAQAEAEKQKEEAEREARRRGKAEEQAVRQRELAEQELEKQRQLAEGTAQQRLAAEQELIRLRAETEQGEQQRQLLEEELARLQREAAAATQKRQELEAELAKVRAEMEVLLASKARAEEESRSTSEKSKQRLEAEAGRFRELAEEAARLRALAEEAKRQRQLAEEDAARQRAEAERVLAEKLAAIGEATRLKTEAEIALKEKEAENERLRRLAEDEAFQRRRLEEQAAQHKADIEERLAQLRKASDSELERQKGLVEDTLRQRRQVEEEILALKASFEKAAAGKAELELELGRIRSNAEDTLRSKEQAELEAARQRQLAAEEERRRREAEERVQKSLAAEEEAARQRKAALEEVERLKAKVEEARRLRERAEQESARQLQLAQEAAQKRLQAEEKAHAFAVQQKEQELQQTLQQEQSVLDQLRGEAEAARRAAEEAEEARVQAEREAAQSRRQVEEAERLKQSAEEQAQARAQAQAAAEKLRKEAEQEAARRAQAEQAALRQKQAADAEMEKHKKFAEQTLRQKAQVEQELTTLRLQLEETDHQKNLLDEELQRLKAEATEAARQRSQVEEELFSVRVQMEELSKLKARIEAENRALILRDKDNTQRFLQEEAEKMKQVAEEAARLSVAAQEAARLRQLAEEDLAQQRALAEKMLKEKMQAVQEATRLKAEAELLQQQKELAQEQARRLQEDKEQMAQQLAEETQGFQRTLEAERQRQLEMSAEAERLKLRVAEMSRAQARAEEDAQRFRKQAEEIGEKLHRTELATQEKVTLVQTLEIQRQQSDHDAERLREAIAELEREKEKLQQEAKLLQLKSEEMQTVQQEQLLQETQALQQSFLSEKDSLLQRERFIEQEKAKLEQLFQDEVAKAQQLREEQQRQQQQMEQERQRLVASMEEARRRQHEAEEGVRRKQEELQQLEQQRRQQEELLAEENQRLREQLQLLEEQHRAALAHSEEVTASQVAATKTLPNGRDALDGPAAEAEPEHSFDGLRRKVSAQRLQEAGILSAEELQRLAQGHTTVDELARREDVRHYLQGRSSIAGLLLKATNEKLSVYAALQRQLLSPGTALILLEAQAASGFLLDPVRNRRLTVNEAVKEGVVGPELHHKLLSAERAVTGYKDPYTGQQISLFQAMQKGLIVREHGIRLLEAQIATGGVIDPVHSHRVPVDVAYRRGYFDEEMNRVLADPSDDTKGFFDPNTHENLTYLQLLERCVEDPETGLCLLPLTDKAAKGGELVYTDSEARDVFEKATVSAPFGKFQGKTVTIWEIINSEYFTAEQRRDLLRQFRTGRITVEKIIKIIITVVEEQEQKGRLCFEGLRSLVPAAELLESRVIDRELYQQLQRGERSVRDVAEVDTVRRALRGANVIAGVWLEEAGQKLSIYNALKKDLLPSDMAVALLEAQAGTGHIIDPATSARLTVDEAVRAGLVGPEFHEKLLSAEKAVTGYRDPYTGQSVSLFQALKKGLIPREQGLRLLDAQLSTGGIVDPSKSHRVPLDVACARGCLDEETSRALSAPRADAKAYSDPSTGEPATYGELQQRCRPDQLTGLSLLPLSEKAARARQEELYSELQARETFEKTPVEVPVGGFKGRTVTVWELISSEYFTAEQRQELLRQFRTGKVTVEKVIKILITIVEEVETLRQERLSFSGLRAPVPASELLASGVLSRAQFEQLKDGKTTVKDLSELGSVRTLLQGSGCLAGIYLEDTKEKVSIYEAMRRGLLRATTAALLLEAQAATGFLVDPVRNQRLYVHEAVKAGVVGPELHEQLLSAEKAVTGYRDPYSGSTISLFQAMQKGLVLRQHGIRLLEAQIATGGIIDPVHSHRVPVDVAYQRGYFSEEMNRVLADPSDDTKGFFDPNTHENLTYRQLLERCVEDPETGLRLLPLKGAEKAEVVETTQVYTEEETRRAFEETQIDIPGGGSHGGSTMSLWEVMQSDLIPEEQRAQLMADFQAGRVTKERMIIIIIEIIEKTEIIRQQGLASYDYVRRRLTAEDLFEARIISLETYNLLREGTRSLREALEAESAWCYLYGTGSVAGVYLPGSRQTLSIYQALKKGLLSAEVARLLLEAQAATGFLLDPVKGERLTVDEAVRKGLVGPELHDRLLSAERAVTGYRDPYTEQTISLFQAMKKELIPTEEALRLLDAQLATGGIVDPRLGFHLPLEVAYQRGYLNKDTHDQLSEPSEVRSYVDPSTDERLSYTQLLRRCRRDDGTGQLLLPLSDARKLTFRGLRKQITMEELVRSQVMDEATALQLREGLTSIEEVTKNLQKFLEGTSCIAGVFVDATKERLSVYQAMKKGIIRPGTAFELLEAQAATGYVIDPIKGLKLTVEEAVRMGIVGPEFKDKLLSAERAVTGYKDPYSGKLISLFQAMKKGLILKDHGIRLLEAQIATGGIIDPEESHRLPVEVAYKRGLFDEEMNEILTDPSDDTKGFFDPNTEENLTYLQLMERCITDPQTGLCLLPLKEKKRERKTSSKSSVRKRRVVIVDPETGKEMSVYEAYRKGLIDHQTYLELSEQECEWEEITISSSDGVVKSMIIDRRSGRQYDIDDAIAKNLIDRSALDQYRAGTLSITEFADMLSGNAGGFRSRSSSVGSSSSYPISPAVSRTQLASWSDPTEETGPVAGILDTETLEKVSITEAMHRNLVDNITGQRLLEAQACTGGIIDPSTGERFPVTDAVNKGLVDKIMVDRINLAQKAFCGFEDPRTKTKMSAAQALKKGWLYYEAGQRFLEVQYLTGGLIEPDTPGRVPLDEALQRGTVDARTAQKLRDVGAYSKYLTCPKTKLKISYKDALDRSMVEEGTGLRLLEAAAQSTKGYYSPYSVSGSGSTAGSRTGSRTGSRAGSRRGSFDATGSGFSMTFSSSSYSSSGYGRRYASGSSASLGGPESAVA

SEQ ID NO: 746 - DNA, 14626 bp, Homo sapiens
atggccggcccgctgcccgacgagcaggacttcatccaggcctacgaggaggtgcgcgagaagtacaaagatgagcgggatcgtgtgcagaagaaaaccttcaccaagtgggtcaacaagcacctcatcaaggcccagaggcacatcagtgacctgtatgaagacctccgcgatggccacaacctcatctccctgctggaggtcctctcgggggacagcctgccccgggagaaggggaggatgcgtttccacaagctgcagaatgtccagattgccctggactacctccggcaccgccaggtgaagctggtgaacatcaggaatgatgacatcgctgacggcaaccccaagctgacccttggcctcatctggacaatcattctgcacttccagatctcagatatccaggtgagtgggcagtcggaggacatgacggccaaggagaagctgctgctgtggtcgcagcgaatggtggaggggtaccagggcctgcgatgcgacaacttcacctccagctggagagacggccgcctcttcaatgccatcatccaccggcacaagcccctgctcatcgacatgaacaaggtgtaccggcagaccaacctggagaacctggaccaggccttctctgtggcggagcgggacctgggagtgacgcggctcctggaccctgaggacgtggatgtccctcagcccgacgagaagtccatcatcacctacgtctcgtcgctgtatgacgccatgccccgcgtgccggacgtgcaggatggggtgagggccaacgagctgcagctgcgctggcaggagtaccgggagctggtgctgctgctgcttcagtggatgcgacaccacacggccgcctttgaggaacgcaggttcccctccagcttcgaggagattgagatcctgtggtctcagttcctgaagtttaaggagatggagctaccagccaaggaggccgacaagaacaggtccaagggcatctaccaatccctggagggagcggtgcaagcaggccagctcaaggtgccccctggctaccacccgctggatgtggagaaggagtggggcaagctgcacgtggccatcctggagcgggagaagcagctccgcagcgagtttgagaggctggagtgtcttcagcgcatcgtgaccaagctgcagatggaggcggggctgtgtgaggagcagctgaaccaggccgacgccctgctgcagtcggatgtccggctgctggctgcaggcaaagtgccacagcgggcgggggaggtggaacgggacttggacaaggcggatagcatgatccggctgctcttcaacgacgtgcagaccctcaaggatggacggcacccgcagggcgagcagatgtaccgcagggtgtaccgtctgcacgagcgcctggtagccatccgcaccgagtacaacctacggctgaaggcaggcgtggcggcccctgcaacccaggtggcccaggtgactctgcagagtgtgcagaggcgccccgagctggaggactccactctgcgctacctgcaggacctgctggcctgggtggaggagaaccagcaccgtgtggatggcgctgagtggggtgtggacctgcccagcgtggaggcgcagctgggcagccaccgaggcctgcaccagtccatcgaagaattccgggccaagatcgagcgggcacggagtgacgagggccagctctcccccgccacccggggtgcctaccgtgactgcctgggtcggctggacctgcagtacgccaagctgctgaactcctccaaggcccgcctcaggtccctggagagcttgcacagctttgtggcagccgccactaaggagctaatgtggctgaatgagaaggaggaggaggaggtgggcttcgactggagcgaccgcaacaccaacatgaccgccaagaaggagagctactcggcgctgatgcgggagctggagctgaaggagaagaagatcaaggagctccaaaatgctggggaccggctgctgcgggaggaccacccggcccggcccacggtggagtccttccaggcggccctgcagacgcagtggagctggatgctacagctgtgctgctgtatcgaggcacacctgaaggagaacgctgcctactttcagttcttctcagatgtgcgggaggccgaggggcagttgcagaagctgcaggaggcactgcgtaggaaatacagttgtgatcgctccgccaccgtcacccggctggaggacctgctgcaggatgcccaggacgagaaggaacagctgaacgagtacaagggccacctctcaggcctggccaagcgggccaaggccgtcgtgcagctgaagccccgccacccagcccaccccatgcggggccgcctgcccctgctggccgtgtgcgactataagcaggtggaggtgactgtgcacaagggtgacgagtgccagctggtgggccctgcacagccgtcccactggaaggtgctcagcagctccggcagcgaggccgccgtgccctccgtgtgcttcctggtgcccccgcccaaccaggaggcccaggaggccgtcaccaggctggaggcccagcaccaggccctggtcacgctgtggcaccagttgcacgtggacatgaagagccttctggcctggcagagccttcgccgcgacgtgcagctcatccgctcctggtccctggccacgttccgcaccctgaagccagaggagcagcgccaagccctgcacagcctggagctgcactaccaggccttcctgcgggacagccaggacgcgggcggcttcggacccgaggaccggctgatggctgagcgcgagtacggctcctgcagccaccactaccagcagctgctgcagagcctggaacagggtgcacaggaagagtctcgctgccagcgctgcatctccgagctcaaagacatccggctgcagctggaggcctgtgagacgcgcaccgtgcaccgcctgcggctgccgctggacaaagagccggcacgggagtgtgcccagcgcatcgccgagcagcagaaggcacaggcagaggtggaggggctgggcaagggggtcgcccggctctctgccgaggccgagaaggtcttggccctaccagagccatcgcctgcggcccccacgctgcgctcggagctggagctgacgctgggcaagctggagcaggtccgcagcctgtctgccatctacctggagaagctcaagaccatcagcctggtgatccgcggcacgcagggggccgaggaggtgctcagggcccacgaggagcagctcaaggaggcccaggccgtgccggccaccctcccggagctcgaggccaccaaggcctctctgaagaagctgcgggcccaggccgaggcacagcagcccacgttcgacgccctgcgggatgagctgcggggggcacaggaggtgggggagcgactgcagcagcggcacggggagcgggacgtggaggtggagcgctggcgggagcgggtcgcccagttgcttgagcgctggcaggctgtgctggcccagaccgacgtgcggcagcgcgagctcgagcaactgggccgccagctgcgttactaccgcgagagtgcagaccccttgggcgcctggctgcaggacgccaggcggcggcaggagcagatccaggccatgccgctggccgacagccaggctgtgcgggagcagctgcggcaggagcaggccctgctggaggagatcgagcgccacggcgagaaggtcgaggagtgccagaggtttgcgaaacagtacatcaacgccatcaaggactatgaactccagctggtgacgtacaaggcgcagcttgagccggtggcctccccggccaagaagcccaaggtccagtcgggatcagagagtgtcatccaggagtacgtggacctgcgtacgcactacagcgagctgaccacactgacgagccagtacatcaagttcatcagcgagactctgcggcgcatggaggaggaggagaggctggctgagcagcagcgggcagaggagcgcgagcggctggccgaggtggaggccgcgctggagaagcagcggcagctggccgaggcgcacgcccaggcaaaggcacaggcggagcgggaggcgaaggagctgcagcagcgcatgcaggaggaggtggtgcggcgggaggaggcggcggtggacgcgcagcagcagaagcgcagcattcaggaggagctgcagcagctgcggcagagctcggaggcggagatccaggccaaggcccggcaggcagaggcggctgagcgcagccggctgcgcatcgaggaggagatccgcgtggtgcgcctgcagttggaggccaccgagcgccagcgtggcggggctgagggggagctgcaggcactgcgtgcacgggcggaggaggctgaggcacaaaagcgacaggcgcaggaggaggccgagcgcttgcggaggcaggtgcaggacgagagccagcgtaagcggcaggcggaggtggagctggcctcgcgcgtgaaggccgaggccgaggcggcgcgcgagaagcagcgggccctgcaggccctggaggagctgcggctgcaggcggaggaggcggagcggcgcctgcggcaggccgaggtggagcgagcgcggcaggtacaggtggccctggagacggcgcagcgcagtgcagaggcggagctgcagagcaaacgcgcctccttcgccgagaagacggcacagctggagcgctccctgcaggaggaacacgtggctgtggcacagctgcgggaggaggctgagcggcgggcacagcagcaggccgaggccgagcgggcgcgcgaggaggcagagcgggagctggagcgctggcagctcaaggccaacgaggcgctacggctgcggctgcaggcggaggaggtggcgcagcagaagagcctggcgcaggccgaggctgagaagcagaaggaggaggcggagcgcgaggcgcggcggcgcggcaaggcggaggagcaggccgtccggcagcgggagctggctgaacaagagctggagaagcagcggcagctggcggaaggcaccgcgcagcagcgcctggccgcggagcaggagttgatccggctgcgggccgagacggagcagggggagcagcagcggcagctgctggaggaggagctggcccggctgcagcgtgaggcggctgcagccacgcagaaacggcaggagctggaagccgagctggccaaggtgcgggccgagatggaggtgctgctggccagcaaggcgagggctgaggaggagtcgcgctccaccagcgagaagtccaagcagaggctggaggccgaggccggccggttccgcgagctggccgaggaggccgcccgcctgcgtgccctggcggaagaggccaagcggcagcggcagctggccgaggaagacgcggcgcggcagcgggccgaggcggagcgggtgcttgcggagaagctggccgccatcggcgaggccacgcggctcaagacggaggcggagatcgcgctcaaggagaaggaggcggagaacgagcgcctgcggcggctggcggaggacgaggccttccagcggcggcggctggaggagcaggccgcgcaacacaaggctgacatcgaggagcgcctggcccagctgcgcaaggcatcggacagcgagctggagcggcagaaggggctggtggaggacacgctgaggcagcggcggcaggtggaggaggagatcctggcgctgaaggcgagcttcgagaaggcggccgctggcaaggcggagctggagctggagctgggacgcatccgcagcaacgcggaggacacgctgcgcagcaaggagcaggccgagctggaggctgcgaggcagcggcagctggcggcggaggaggagcggcggcgccgtgaggctgaggagcgcgtgcagaagagcctggcggccgaggaggaggccgcacggcagcggaaggcggcgctggaggaagtcgagcggctgaaagccaaggtggaggaggcgcggcgcctgcgggagcgagcggagcaggagtcggcgcggcagctgcagctggcccaggaggccgcccagaagcggctgcaggcggaagagaaggcacacgccttcgcggtgcagcagaaggagcaggagctacagcagacgctgcagcaggagcagagcgtgctggaccagctgcgcggcgaggcggaggcggcccggcgggcggctgaggaggcggaggaggcccgggtgcaggcggagcgtgaggcggcgcagtcccggcggcaggtggaagaggccgagcggctgaagcagtcggcagaggagcaggcacaggcccgggctcaggcacaggcggctgcagagaagctgcgcaaggaggccgagcaagaggcggcgcggcgggcacaggcggagcaggcggccctgcggcagaagcaggcagctgacgcggagatggagaagcataagaaattcgccgagcagacgctgcggcagaaggcgcaggtggagcaggagctgacaacactgcggctgcagctggaggagaccgaccaccagaagaacctgctggacgaggagctgcagcggctgaaggcggaggccacggaggccgcacgccagcgcagccaggtggaggaggagctcttctcggtgcgcgtgcagatggaggagctgagcaagctcaaggcacgcatcgaggctgagaaccgcgcactcatcttgcgtgacaaggacaatacgcagcgcttcctgcaggaggaggctgagaagatgaagcaggtggcggaggaggccgcgcggctgagtgtggcggcccaagaggctgcgcgactgcggcagctggcagaggaggacctggcacagcagcgggccttggcagagaagatgctcaaggagaagatgcaggcggtgcaggaggccacgcgactcaaggctgaggcggaactgctgcagcagcagaaggagcttgcgcaggagcaggcgcggcggctgcaggaggacaaggagcagatggcgcagcagctggcggaggagacgcagggcttccagcggacgctggaggccgagcggcagcggcagctggagatgagcgctgaggctgagcgcctcaagctgcgtgtggccgagatgagccgagcccaggcccgcgctgaggaggacgcccagcgcttccggaagcaggcggaggagatcggtgagaagctgcaccgcacggagctcgccacccaggagaaggtgaccctggtgcagacactggagatccagcgacagcagagtgaccatgatgccgagcgcctgcgggaggccatcgctgagctggagcgtgagaaggagaagctccaacaggaggccaaactgctgcagctcaagtctgaggagatgcagacggtgcagcaggagcagctgctgcaggagacgcaggccctgcagcaaagcttcctctctgaaaaggacagcctgctacagcgggagcgcttcatcgagcaggagaaggccaagctggagcagctcttccaggacgaggtggccaaggcacagcagctgcgtgaggagcagcagcggcagcagcagcagatggagcaggaacggcagcggctggtggccagcatggaggaggcgcggcggcggcagcatgaggccgaggagggcgtgcggcgcaagcaggaggagctgcagcagctggagcagcagcggcggcagcaggaggagctgctggctgaggagaaccagaggctgcgtgagcagctgcagctcctggaggagcagcaccgggccgcgctggcgcactcagaggaggtcactgcctcgcaggtggctgccacaaagaccctgcccaatggccgggatgcacttgatggccccgcggcagaggcagagccggagcacagcttcgatggcctgcggcggaaggtgtcagctcagaggctgcaggaggccggcatcctgagtgcggaggagctgcagcggttggcgcagggccacaccacggtggacgagctcgcacggcgggaagacgtgcgccactacctgcagggccgcagcagtatcgcagggctgttgctgaaggccaccaatgagaagctgagtgtttacgccgccctgcagaggcagctgctgagtcccggcacggccctcatcctgctggaggcgcaggcggcctcaggcttcctgctggaccctgtgcggaaccggcggctgaccgtcaacgaggctgtgaaggagggtgtggtgggccccgagctgcaccacaagctgctgtcggccgagcgcgccgtcactggctacaaggacccctacactggccagcagatctctctcttccaagccatgcagaagggcctcatcgtccgggagcacggcatccgcctgctggaggcccagatcgccacgggcggcgttatcgaccccgtgcacagccaccgcgtgcccgtggacgtggcctaccggcgcggctacttcgacgaggagatgaaccgcgtcctggcggaccccagcgacgacaccaagggcttctttgaccccaacacgcacgagaacctcacgtacctgcagctactggagcgctgcgtggaggaccccgagacgggcctgtgccttctgccactcacggataaggctgccaagggcggggagctggtctacactgactccgaggcccgggacgtctttgagaaggccaccgtgtctgcgccgttcggcaagttccagggcaagacggtgaccatttgggagatcatcaactcggaatacttcacggcagagcagcggcgggacctgctgcggcagttccgcacgggccggatcacagtggagaagatcatcaagatcatcatcacggtggtggaggagcaggagcagaagggccggctttgctttgagggcctgcgcagcctggtgccagccgccgagctgctggagagcagggtcatcgaccgcgagctctaccagcagctgcagcgaggtgagcgctctgtgcgagacgtagccgaggtggacactgtgcggcgggctctccggggtgccaacgtcatcgcgggtgtatggctggaggaggcggggcagaagctgagtatctacaatgccctgaagaaagacctgctgccatccgacatggccgtggccctgttggaagcccaggccggcaccgggcacatcatcgaccccgccaccagcgcccggctgaccgtggacgaggcagtgcgtgctggcctggtgggccccgagtttcatgagaagctgctatcagccgagaaggctgtgacagggtacagggacccctacacagggcagagcgtctccctgttccaggccctgaagaagggcctcattccccgggagcagggcctgcgcctgttggacgcccagctgtccacgggcggcatcgtggaccccagcaagagccaccgcgtgcccctggatgtcgcctgcgcccgaggctgcctggatgaggagaccagcagggccctgtcggcaccaagggccgacgccaaggcctacagtgaccccagcacaggggagccggccacctacggcgagctccagcagcggtgccggcccgaccagctgaccgggctgagcctgctgccgctctcagaaaaggctgctcgggcccggcaggaggagctctactcagagctgcaggcccgtgagacctttgaaaagaccccggttgaggtccccgtgggtggcttcaagggcaggacggtgacggtgtgggagctcatcagctctgagtacttcactgcggagcagcggcaggagctgttgcgtcagttccgcacgggcaaggtcaccgtggagaaggtcatcaagattctcattaccatcgtggaggaggtggagaccctgcggcaggagaggctgtccttcagcggcctccgtgcccctgtgccagccagcgagctcctggcttccggggtcctcagcagagcccagtttgagcagctcaaggacggcaagacgacggtcaaggacctttcggagctgggctccgtgcggacgctgctgcagggcagtggctgcctcgccggcatctacctggaggacaccaaggagaaggtgtccatctacgaggccatgcgccggggcctgctgagagccacaacggctgcgctcctgctggaggcgcaggcggccactggcttcctggtggaccccgtgcggaaccagcgcctgtatgtccacgaggccgtgaaggcgggcgtggtgggccccgagcttcacgagcagctgctgtctgccgagaaggccgtcaccggctacagagacccctactcgggcagcaccatctccctcttccaggccatgcagaagggcctggttctccggcagcacggcatccgcctgctggaggcccagatcgccacgggcggcatcatcgaccccgtgcacagccaccgcgtgcctgtggacgtggcctaccagcgcggctacttcagtgaggagatgaaccgcgtcctggcggaccccagcgacgacaccaagggcttctttgaccccaacacgcatgagaacctcacgtacaggcagctgctggagcggtgcgtggaggaccccgagacgggcttgcgccttctgccactgaaaggggcggagaaggctgaggtggtggagaccacgcaggtgtacactgaggaggagacaagaagggcatttgaagagacacagatcgacattcccggcggcggcagccacggcggctccaccatgtccctgtgggaggtgatgcagtcggacctgatccccgaggagcagcgggcccagctgatggctgacttccaggccggccgggtgaccaaggaacgcatgatcatcatcatcatcgagatcattgagaagacagagatcatccgccagcagggtctggcctcctacgactacgtgcgccgccgcctcacggctgaggacctgttcgaggctcggatcatctctctcgagacctacaacctgctccgggagggcaccaggagcctccgtgaggctctcgaggcggagtccgcctggtgctacctctatggcacgggctccgtggctggtgtctacctgcccggttccaggcagacactgagcatctaccaggctctcaagaaagggctgctgagtgccgaggtggcccgcctgctgctggaggcacaggcagccacaggcttcctgctggacccggtgaagggggagcggctgactgtggatgaggctgtgcggaagggcctcgtggggcccgagctgcacgaccgcctgctctcggctgagcgggcggtcaccggctaccgtgacccctacaccgagcagaccatctcgctcttccaggccatgaagaaggagctgatccctactgaggaggccctgcggctgctggatgcccagctggccaccggcggcatcgtggacccccgcctgggcttccaccttcccctggaggtggcttaccagcgtggctacctcaacaaggacacgcacgaccagctgtcagagcccagcgaggtgcgcagctacgtggacccgtccaccgacgagcgcctcagctacacgcagctgctcaggcggtgccgtcgtgacgacggcaccggccagctgctcctgccactgtcggacgcccgcaagctgaccttccgtggcctgcggaagcagatcaccatggaggagctggtgcgctcgcaggtcatggacgaggccacggcgctgcagctgcgggagggcctgacctccatcgaggaggtcaccaagaacttgcagaagttcctggaaggcaccagctgcatcgctggtgtcttcgtggacgccaccaaggaacggctctcggtgtaccaggccatgaagaagggcatcatccgccccggcacagcctttgagctcctggaggcgcaggcggccaccggttacgtcatcgaccccatcaagggactgaagctgacggtggaggaggctgtgcgtatgggcattgtgggccccgagttcaaggacaagctgctgtcggccgagcgcgccgtcactgggtacaaggacccctactctgggaagctcatctccctcttccaggccatgaagaagggcctgatcctgaaggaccatggcatccgcctgctggaggcccagatcgccacgggcggcatcatcgaccctgaggagagccaccggctgcccgtggaggtggcctacaagcgcggcctcttcgatgaggagatgaacgagatcctgaccgacccctcggacgacaccaagggcttctttgaccctaacacggaggagaacctcacctacctgcagctgatggagcgttgtatcactgacccccagacgggcctgtgtctcttgccgctgaaggagaagaagcgggagcggaagacgtcctccaagtcctccgtgcgcaagcgccgagtggtcatcgtggaccccgagacgggcaaggagatgtcagtgtacgaggcctaccgcaagggcctgattgaccaccagacgtacctggagctgtccgagcaggagtgcgagtgggaggagatcaccatctcctcctcggacggcgtggtcaagtccatgatcatcgaccgccgctccgggcgccagtacgacatcgatgatgccatcgccaagaacctcatcgaccgctcggcactggaccagtaccgcgccggcacgctctccatcaccgagttcgccgacatgctctcgggcaacgccggtggtttccgctcccgttcctcctcggtgggatcctcctcctcctaccccatcagccccgccgtctccaggacccagctggcctcctggtcagaccccactgaggagacgggccccgtggctggcatcctggacacggagacgctggagaaggtgtccatcaccgaggccatgcaccggaacctggtggataacatcacggggcagcggctgctggaggcgcaggcctgcaccgggggcatcatcgaccccagcaccggtgagcgcttccctgtcaccgacgccgtcaacaagggcctggtggacaagatcatggtggaccgcatcaacctggcccagaaggccttctgcggcttcgaggacccacgcaccaagaccaagatgtcggccgcccaggccctgaagaagggctggctctactacgaggccggccagcgcttcctggaggtgcagtacctgaccggcggcttgatcgagcccgacacgccgggccgcgtgcccctggacgaggccctgcagcgcggcacggtggacgcccgcaccgcacagaagctgcgtgacgtgggcgcctactccaagtacctcacctgccctaagaccaagctcaagatctcctataaggacgcgctggaccgcagcatggtggaggagggcacggggctgcggctgctggaggctgccgcgcagtccaccaagggctactacagcccctacagcgtcagcggctccggctctaccgctggctcccgcaccggctcgcgcaccggctcccgggccggctcccgccgcggcagctttgacgccaccggctccggcttctccatgaccttctcttcatcctcctactcctcctcgggctacggccgccgctacgcctcggggtcctcggcctccctggggggccctgagtctgccgtggcctgaggctgcctgcgcccaccccgctctgcatgcggcccagcccggctcccaccgaggcgcgggggccgttttcaacgcttaaaggtgtcttcctcccaagtggtgcctaaagtttaaccaaaaagaccagactaatatattaatatatatctgctgtccagacagcctgtatcttgggggacagggctggcccagccctgctggccgcctcaccccctcgggtctcctcactcccttctacctgccactcacacagccaggtgccttggagggtcccaagctgggccccagcccaccctcctgtcttcccagggtagcccgcctgccagtcctagctgcacagggcagctgggcccaaccctgtctgtagagggccctggtgtttctagcactggcctgcacggtgggccttgctggggacggggggccccagtcagcctctctcccagtctacccagagaagccccttccccatgggaagacgaggccctcgggcccagcccccacagtgctgtctgatctgtgctttccagctcaccccccacactcactcctgagacccctggcctccggcgtcagcctccagcctctgttcccctagtaagtgccttccatgtcggcctctaaccccaggccccgaggacccagacccagtggggaggcggacgttccagccggcatggctgggaactgcagacctgtcctcctggtgggtccaggggcccctccagcttgtggagccccacactggggtgccgcctgcccgtctctctcccatggagccccagccccctttgggcccagggacaccagccaggctctgtgctgaccctcctgttgcacccagccctggtctcagcagcgaccacccctgcctccaccctctgagctttgcatgttccactaaccccgggcgggtggcaggtggaggtgtcaggctgctggcgcctctgcaagggcagaacactaacctgaccgtgggcggggccttgcggtatccgcccccaataaaagcaattccaacctt

SEQ ID NO: 747 - protein, 4533 aa, Homo sapiens
MAGPLPDEQDFIQAYEEVREKYKDERDRVQKKTFTKWVNKHLIKAQRHISDLYEDLRDGHNLISLLEVLSGDSLPREKGRMRFHKLQNVQIALDYLRHRQVKLVNIRNDDIADGNPKLTLGLIWTIILHFQISDIQVSGQSEDMTAKEKLLLWSQRMVEGYQGLRCDNFTSSWRDGRLFNAIIHRHKPLLIDMNKVYRQTNLENLDQAFSVAERDLGVTRLLDPEDVDVPQPDEKSIITYVSSLYDAMPRVPDVQDGVRANELQLRWQEYRELVLLLLQWMRHHTAAFEERRFPSSFEEIEILWSQFLKFKEMELPAKEADKNRSKGIYQSLEGAVQAGQLKVPPGYHPLDVEKEWGKLHVAILEREKQLRSEFERLECLQRIVTKLQMEAGLCEEQLNQADALLQSDVRLLAAGKVPQRAGEVERDLDKADSMIRLLFNDVQTLKDGRHPQGEQMYRRVYRLHERLVAIRTEYNLRLKAGVAAPATQVAQVTLQSVQRRPELEDSTLRYLQDLLAWVEENQHRVDGAEWGVDLPSVEAQLGSHRGLHQSIEEFRAKIERARSDEGQLSPATRGAYRDCLGRLDLQYAKLLNSSKARLRSLESLHSFVAAATKELMWLNEKEEEEVGFDWSDRNTNMTAKKESYSALMRELELKEKKIKELQNAGDRLLREDHPARPTVESFQAALQTQWSWMLQLCCCIEAHLKENAAYFQFFSDVREAEGQLQKLQEALRRKYSCDRSATVTRLEDLLQDAQDEKEQLNEYKGHLSGLAKRAKAVVQLKPRHPAHPMRGRLPLLAVCDYKQVEVTVHKGDECQLVGPAQPSHWKVLSSSGSEAAVPSVCFLVPPPNQEAQEAVTRLEAQHQALVTLWHQLHVDMKSLLAWQSLRRDVQLIRSWSLATFRTLKPEEQRQALHSLELHYQAFLRDSQDAGGFGPEDRLMAEREYGSCSHHYQQLLQSLEQGAQEESRCQRCISELKDIRLQLEACETRTVHRLRLPLDKEPARECAQRIAEQQKAQAEVEGLGKGVARLSAEAEKVLALPEPSPAAPTLRSELELTLGKLEQVRSLSAIYLEKLKTISLVIRGTQGAEEVLRAHEEQLKEAQAVPATLPELEATKASLKKLRAQAEAQQPTFDALRDELRGAQEVGERLQQRHGERDVEVERWRERVAQLLERWQAVLAQTDVRQRELEQLGRQLRYYRESADPLGAWLQDARRRQEQIQAMPLADSQAVREQLRQEQALLEEIERHGEKVEECQRFAKQYINAIKDYELQLVTYKAQLEPVASPAKKPKVQSGSESVIQEYVDLRTHYSELTTLTSQYIKFISETLRRMEEEERLAEQQRAEERERLAEVEAALEKQRQLAEAHAQAKAQAEREAKELQQRMQEEVVRREEAAVDAQQQKRSIQEELQQLRQSSEAEIQAKARQAEAAERSRLRIEEEIRVVRLQLEATERQRGGAEGELQALRARAEEAEAQKRQAQEEAERLRRQVQDESQRKRQAEVELASRVKAEAEAAREKQRALQALEELRLQAEEAERRLRQAEVERARQVQVALETAQRSAEAELQSKRASFAEKTAQLERSLQEEHVAVAQLREEAERRAQQQAEAERAREEAERELERWQLKANEALRLRLQAEEVAQQKSLAQAEAEKQKEEAEREARRRGKAEEQAVRQRELAEQELEKQRQLAEGTAQQRLAAEQELIRLRAETEQGEQQRQLLEEELARLQREAAAATQKRQELEAELAKVRAEMEVLLASKARAEEESRSTSEKSKQRLEAEAGRFRELAEEAARLRALAEEAKRQRQLAEEDAARQRAEAERVLAEKLAAIGEATRLKTEAEIALKEKEAENERLRRLAEDEAFQRRRLEEQAAQHKADIEERLAQLRKASDSELERQKGLVEDTLRQRRQVEEEILALKASFEKAAAGKAELELELGRIRSNAEDTLRSKEQAELEAARQRQLAAEEERRRREAEERVQKSLAAEEEAARQRKAALEEVERLKAKVEEARRLRERAEQESARQLQLAQEAAQKRLQAEEKAHAFAVQQKEQELQQTLQQEQSVLDQLRGEAEAARRAAEEAEEARVQAEREAAQSRRQVEEAERLKQSAEEQAQARAQAQAAAEKLRKEAEQEAARRAQAEQAALRQKQAADAEMEKHKKFAEQTLRQKAQVEQELTTLRLQLEETDHQKNLLDEELQRLKAEATEAARQRSQVEEELFSVRVQMEELSKLKARIEAENRALILRDKDNTQRFLQEEAEKMKQVAEEAARLSVAAQEAARLRQLAEEDLAQQRALAEKMLKEKMQAVQEATRLKAEAELLQQQKELAQEQARRLQEDKEQMAQQLAEETQGFQRTLEAERQRQLEMSAEAERLKLRVAEMSRAQARAEEDAQRFRKQAEEIGEKLHRTELATQEKVTLVQTLEIQRQQSDHDAERLREAIAELEREKEKLQQEAKLLQLKSEEMQTVQQEQLLQETQALQQSFLSEKDSLLQRERFIEQEKAKLEQLFQDEVAKAQQLREEQQRQQQQMEQERQRLVASMEEARRRQHEAEEGVRRKQEELQQLEQQRRQQEELLAEENQRLREQLQLLEEQHRAALAHSEEVTASQVAATKTLPNGRDALDGPAAEAEPEHSFDGLRRKVSAQRLQEAGILSAEELQRLAQGHTTVDELARREDVRHYLQGRSSIAGLLLKATNEKLSVYAALQRQLLSPGTALILLEAQAASGFLLDPVRNRRLTVNEAVKEGVVGPELHHKLLSAERAVTGYKDPYTGQQISLFQAMQKGLIVREHGIRLLEAQIATGGVIDPVHSHRVPVDVAYRRGYFDEEMNRVLADPSDDTKGFFDPNTHENLTYLQLLERCVEDPETGLCLLPLTDKAAKGGELVYTDSEARDVFEKATVSAPFGKFQGKTVTIWEIINSEYFTAEQRRDLLRQFRTGRITVEKIIKIIITVVEEQEQKGRLCFEGLRSLVPAAELLESRVIDRELYQQLQRGERSVRDVAEVDTVRRALRGANVIAGVWLEEAGQKLSIYNALKKDLLPSDMAVALLEAQAGTGHIIDPATSARLTVDEAVRAGLVGPEFHEKLLSAEKAVTGYRDPYTGQSVSLFQALKKGLIPREQGLRLLDAQLSTGGIVDPSKSHRVPLDVACARGCLDEETSRALSAPRADAKAYSDPSTGEPATYGELQQRCRPDQLTGLSLLPLSEKAARARQEELYSELQARETFEKTPVEVPVGGFKGRTVTVWELISSEYFTAEQRQELLRQFRTGKVTVEKVIKILITIVEEVETLRQERLSFSGLRAPVPASELLASGVLSRAQFEQLKDGKTTVKDLSELGSVRTLLQGSGCLAGIYLEDTKEKVSIYEAMRRGLLRATTAALLLEAQAATGFLVDPVRNQRLYVHEAVKAGVVGPELHEQLLSAEKAVTGYRDPYSGSTISLFQAMQKGLVLRQHGIRLLEAQIATGGIIDPVHSHRVPVDVAYQRGYFSEEMNRVLADPSDDTKGFFDPNTHENLTYRQLLERCVEDPETGLRLLPLKGAEKAEVVETTQVYTEEETRRAFEETQIDIPGGGSHGGSTMSLWEVMQSDLIPEEQRAQLMADFQAGRVTKERMIIIIIEIIEKTEIIRQQGLASYDYVRRRLTAEDLFEARIISLETYNLLREGTRSLREALEAESAWCYLYGTGSVAGVYLPGSRQTLSIYQALKKGLLSAEVARLLLEAQAATGFLLDPVKGERLTVDEAVRKGLVGPELHDRLLSAERAVTGYRDPYTEQTISLFQAMKKELIPTEEALRLLDAQLATGGIVDPRLGFHLPLEVAYQRGYLNKDTHDQLSEPSEVRSYVDPSTDERLSYTQLLRRCRRDDGTGQLLLPLSDARKLTFRGLRKQITMEELVRSQVMDEATALQLREGLTSIEEVTKNLQKFLEGTSCIAGVFVDATKERLSVYQAMKKGIIRPGTAFELLEAQAATGYVIDPIKGLKLTVEEAVRMGIVGPEFKDKLLSAERAVTGYKDPYSGKLISLFQAMKKGLILKDHGIRLLEAQIATGGIIDPEESHRLPVEVAYKRGLFDEEMNEILTDPSDDTKGFFDPNTEENLTYLQLMERCITDPQTGLCLLPLKEKKRERKTSSKSSVRKRRVVIVDPETGKEMSVYEAYRKGLIDHQTYLELSEQECEWEEITISSSDGVVKSMIIDRRSGRQYDIDDAIAKNLIDRSALDQYRAGTLSITEFADMLSGNAGGFRSRSSSVGSSSSYPISPAVSRTQLASWSDPTEETGPVAGILDTETLEKVSITEAMHRNLVDNITGQRLLEAQACTGGIIDPSTGERFPVTDAVNKGLVDKIMVDRINLAQKAFCGFEDPRTKTKMSAAQALKKGWLYYEAGQRFLEVQYLTGGLIEPDTPGRVPLDEALQRGTVDARTAQKLRDVGAYSKYLTCPKTKLKISYKDALDRSMVEEGTGLRLLEAAAQSTKGYYSPYSVSGSGSTAGSRTGSRTGSRAGSRRGSFDATGSGFSMTFSSSSYSSSGYGRRYASGSSASLGGPESAVA

SEQ ID NO: 748 - DNA, 14751 bp, Homo sapiens
attgatcagctgaagccccgcccctggccggcaagccctgccccggacctccgggctcctcccccggctgcggcgctggcctgggcagtgcggtgcggggctggactctgcctggtggtggcacagccgccctcagccccggcgcagacatggacccctcgcgagccatccagaacgagatcagctccctcaaagatgagcgggatcgtgtgcagaagaaaaccttcaccaagtgggtcaacaagcacctcatcaaggcccagaggcacatcagtgacctgtatgaagacctccgcgatggccacaacctcatctccctgctggaggtcctctcgggggacagcctgccccgggagaaggggaggatgcgtttccacaagctgcagaatgtccagattgccctggactacctccggcaccgccaggtgaagctggtgaacatcaggaatgatgacatcgctgacggcaaccccaagctgacccttggcctcatctggacaatcattctgcacttccagatctcagatatccaggtgagtgggcagtcggaggacatgacggccaaggagaagctgctgctgtggtcgcagcgaatggtggaggggtaccagggcctgcgatgcgacaacttcacctccagctggagagacggccgcctcttcaatgccatcatccaccggcacaagcccctgctcatcgacatgaacaaggtgtaccggcagaccaacctggagaacctggaccaggccttctctgtggcggagcgggacctgggagtgacgcggctcctggaccctgaggacgtggatgtccctcagcccgacgagaagtccatcatcacctacgtctcgtcgctgtatgacgccatgccccgcgtgccggacgtgcaggatggggtgagggccaacgagctgcagctgcgctggcaggagtaccgggagctggtgctgctgctgcttcagtggatgcgacaccacacggccgcctttgaggaacgcaggttcccctccagcttcgaggagattgagatcctgtggtctcagttcctgaagtttaaggagatggagctaccagccaaggaggccgacaagaacaggtccaagggcatctaccaatccctggagggagcggtgcaagcaggccagctcaaggtgccccctggctaccacccgctggatgtggagaaggagtggggcaagctgcacgtggccatcctggagcgggagaagcagctccgcagcgagtttgagaggctggagtgtcttcagcgcatcgtgaccaagctgcagatggaggcggggctgtgtgaggagcagctgaaccaggccgacgccctgctgcagtcggatgtccggctgctggctgcaggcaaagtgccacagcgggcgggggaggtggaacgggacttggacaaggcggatagcatgatccggctgctcttcaacgacgtgcagaccctcaaggatggacggcacccgcagggcgagcagatgtaccgcagggtgtaccgtctgcacgagcgcctggtagccatccgcaccgagtacaacctacggctgaaggcaggcgtggcggcccctgcaacccaggtggcccaggtgactctgcagagtgtgcagaggcgccccgagctggaggactccactctgcgctacctgcaggacctgctggcctgggtggaggagaaccagcaccgtgtggatggcgctgagtggggtgtggacctgcccagcgtggaggcgcagctgggcagccaccgaggcctgcaccagtccatcgaagaattccgggccaagatcgagcgggcacggagtgacgagggccagctctcccccgccacccggggtgcctaccgtgactgcctgggtcggctggacctgcagtacgccaagctgctgaactcctccaaggcccgcctcaggtccctggagagcttgcacagctttgtggcagccgccactaaggagctaatgtggctgaatgagaaggaggaggaggaggtgggcttcgactggagcgaccgcaacaccaacatgaccgccaagaaggagagctactcggcgctgatgcgggagctggagctgaaggagaagaagatcaaggagctccaaaatgctggggaccggctgctgcgggaggaccacccggcccggcccacggtggagtccttccaggcggccctgcagacgcagtggagctggatgctacagctgtgctgctgtatcgaggcacacctgaaggagaacgctgcctactttcagttcttctcagatgtgcgggaggccgaggggcagttgcagaagctgcaggaggcactgcgtaggaaatacagttgtgatcgctccgccaccgtcacccggctggaggacctgctgcaggatgcccaggacgagaaggaacagctgaacgagtacaagggccacctctcaggcctggccaagcgggccaaggccgtcgtgcagctgaagccccgccacccagcccaccccatgcggggccgcctgcccctgctggccgtgtgcgactataagcaggtggaggtgactgtgcacaagggtgacgagtgccagctggtgggccctgcacagccgtcccactggaaggtgctcagcagctccggcagcgaggccgccgtgccctccgtgtgcttcctggtgcccccgcccaaccaggaggcccaggaggccgtcaccaggctggaggcccagcaccaggccctggtcacgctgtggcaccagttgcacgtggacatgaagagccttctggcctggcagagccttcgccgcgacgtgcagctcatccgctcctggtccctggccacgttccgcaccctgaagccagaggagcagcgccaagccctgcacagcctggagctgcactaccaggccttcctgcgggacagccaggacgcgggcggcttcggacccgaggaccggctgatggctgagcgcgagtacggctcctgcagccaccactaccagcagctgctgcagagcctggaacagggtgcacaggaagagtctcgctgccagcgctgcatctccgagctcaaagacatccggctgcagctggaggcctgtgagacgcgcaccgtgcaccgcctgcggctgccgctggacaaagagccggcacgggagtgtgcccagcgcatcgccgagcagcagaaggcacaggcagaggtggaggggctgggcaagggggtcgcccggctctctgccgaggccgagaaggtcttggccctaccagagccatcgcctgcggcccccacgctgcgctcggagctggagctgacgctgggcaagctggagcaggtccgcagcctgtctgccatctacctggagaagctcaagaccatcagcctggtgatccgcggcacgcagggggccgaggaggtgctcagggcccacgaggagcagctcaaggaggcccaggccgtgccggccaccctcccggagctcgaggccaccaaggcctctctgaagaagctgcgggcccaggccgaggcacagcagcccacgttcgacgccctgcgggatgagctgcggggggcacaggaggtgggggagcgactgcagcagcggcacggggagcgggacgtggaggtggagcgctggcgggagcgggtcgcccagttgcttgagcgctggcaggctgtgctggcccagaccgacgtgcggcagcgcgagctcgagcaactgggccgccagctgcgttactaccgcgagagtgcagaccccttgggcgcctggctgcaggacgccaggcggcggcaggagcagatccaggccatgccgctggccgacagccaggctgtgcgggagcagctgcggcaggagcaggccctgctggaggagatcgagcgccacggcgagaaggtcgaggagtgccagaggtttgcgaaacagtacatcaacgccatcaaggactatgaactccagctggtgacgtacaaggcgcagcttgagccggtggcctccccggccaagaagcccaaggtccagtcgggatcagagagtgtcatccaggagtacgtggacctgcgtacgcactacagcgagctgaccacactgacgagccagtacatcaagttcatcagcgagactctgcggcgcatggaggaggaggagaggctggctgagcagcagcgggcagaggagcgcgagcggctggccgaggtggaggccgcgctggagaagcagcggcagctggccgaggcgcacgcccaggcaaaggcacaggcggagcgggaggcgaaggagctgcagcagcgcatgcaggaggaggtggtgcggcgggaggaggcggcggtggacgcgcagcagcagaagcgcagcattcaggaggagctgcagcagctgcggcagagctcggaggcggagatccaggccaaggcccggcaggcagaggcggctgagcgcagccggctgcgcatcgaggaggagatccgcgtggtgcgcctgcagttggaggccaccgagcgccagcgtggcggggctgagggggagctgcaggcactgcgtgcacgggcggaggaggctgaggcacaaaagcgacaggcgcaggaggaggccgagcgcttgcggaggcaggtgcaggacgagagccagcgtaagcggcaggcggaggtggagctggcctcgcgcgtgaaggccgaggccgaggcggcgcgcgagaagcagcgggccctgcaggccctggaggagctgcggctgcaggcggaggaggcggagcggcgcctgcggcaggccgaggtggagcgagcgcggcaggtacaggtggccctggagacggcgcagcgcagtgcagaggcggagctgcagagcaaacgcgcctccttcgccgagaagacggcacagctggagcgctccctgcaggaggaacacgtggctgtggcacagctgcgggaggaggctgagcggcgggcacagcagcaggccgaggccgagcgggcgcgcgaggaggcagagcgggagctggagcgctggcagctcaaggccaacgaggcgctacggctgcggctgcaggcggaggaggtggcgcagcagaagagcctggcgcaggccgaggctgagaagcagaaggaggaggcggagcgcgaggcgcggcggcgcggcaaggcggaggagcaggccgtccggcagcgggagctggctgaacaagagctggagaagcagcggcagctggcggaaggcaccgcgcagcagcgcctggccgcggagcaggagttgatccggctgcgggccgagacggagcagggggagcagcagcggcagctgctggaggaggagctggcccggctgcagcgtgaggcggctgcagccacgcagaaacggcaggagctggaagccgagctggccaaggtgcgggccgagatggaggtgctgctggccagcaaggcgagggctgaggaggagtcgcgctccaccagcgagaagtccaagcagaggctggaggccgaggccggccggttccgcgagctggccgaggaggccgcccgcctgcgtgccctggcggaagaggccaagcggcagcggcagctggccgaggaagacgcggcgcggcagcgggccgaggcggagcgggtgcttgcggagaagctggccgccatcggcgaggccacgcggctcaagacggaggcggagatcgcgctcaaggagaaggaggcggagaacgagcgcctgcggcggctggcggaggacgaggccttccagcggcggcggctggaggagcaggccgcgcaacacaaggctgacatcgaggagcgcctggcccagctgcgcaaggcatcggacagcgagctggagcggcagaaggggctggtggaggacacgctgaggcagcggcggcaggtggaggaggagatcctggcgctgaaggcgagcttcgagaaggcggccgctggcaaggcggagctggagctggagctgggacgcatccgcagcaacgcggaggacacgctgcgcagcaaggagcaggccgagctggaggctgcgaggcagcggcagctggcggcggaggaggagcggcggcgccgtgaggctgaggagcgcgtgcagaagagcctggcggccgaggaggaggccgcacggcagcggaaggcggcgctggaggaagtcgagcggctgaaagccaaggtggaggaggcgcggcgcctgcgggagcgagcggagcaggagtcggcgcggcagctgcagctggcccaggaggccgcccagaagcggctgcaggcggaagagaaggcacacgccttcgcggtgcagcagaaggagcaggagctacagcagacgctgcagcaggagcagagcgtgctggaccagctgcgcggcgaggcggaggcggcccggcgggcggctgaggaggcggaggaggcccgggtgcaggcggagcgtgaggcggcgcagtcccggcggcaggtggaagaggccgagcggctgaagcagtcggcagaggagcaggcacaggcccgggctcaggcacaggcggctgcagagaagctgcgcaaggaggccgagcaagaggcggcgcggcgggcacaggcggagcaggcggccctgcggcagaagcaggcagctgacgcggagatggagaagcataagaaattcgccgagcagacgctgcggcagaaggcgcaggtggagcaggagctgacaacactgcggctgcagctggaggagaccgaccaccagaagaacctgctggacgaggagctgcagcggctgaaggcggaggccacggaggccgcacgccagcgcagccaggtggaggaggagctcttctcggtgcgcgtgcagatggaggagctgagcaagctcaaggcacgcatcgaggctgagaaccgcgcactcatcttgcgtgacaaggacaatacgcagcgcttcctgcaggaggaggctgagaagatgaagcaggtggcggaggaggccgcgcggctgagtgtggcggcccaagaggctgcgcgactgcggcagctggcagaggaggacctggcacagcagcgggccttggcagagaagatgctcaaggagaagatgcaggcggtgcaggaggccacgcgactcaaggctgaggcggaactgctgcagcagcagaaggagcttgcgcaggagcaggcgcggcggctgcaggaggacaaggagcagatggcgcagcagctggcggaggagacgcagggcttccagcggacgctggaggccgagcggcagcggcagctggagatgagcgctgaggctgagcgcctcaagctgcgtgtggccgagatgagccgagcccaggcccgcgctgaggaggacgcccagcgcttccggaagcaggcggaggagatcggtgagaagctgcaccgcacggagctcgccacccaggagaaggtgaccctggtgcagacactggagatccagcgacagcagagtgaccatgatgccgagcgcctgcgggaggccatcgctgagctggagcgtgagaaggagaagctccaacaggaggccaaactgctgcagctcaagtctgaggagatgcagacggtgcagcaggagcagctgctgcaggagacgcaggccctgcagcaaagcttcctctctgaaaaggacagcctgctacagcgggagcgcttcatcgagcaggagaaggccaagctggagcagctcttccaggacgaggtggccaaggcacagcagctgcgtgaggagcagcagcggcagcagcagcagatggagcaggaacggcagcggctggtggccagcatggaggaggcgcggcggcggcagcatgaggccgaggagggcgtgcggcgcaagcaggaggagctgcagcagctggagcagcagcggcggcagcaggaggagctgctggctgaggagaaccagaggctgcgtgagcagctgcagctcctggaggagcagcaccgggccgcgctggcgcactcagaggaggtcactgcctcgcaggtggctgccacaaagaccctgcccaatggccgggatgcacttgatggccccgcggcagaggcagagccggagcacagcttcgatggcctgcggcggaaggtgtcagctcagaggctgcaggaggccggcatcctgagtgcggaggagctgcagcggttggcgcagggccacaccacggtggacgagctcgcacggcgggaagacgtgcgccactacctgcagggccgcagcagtatcgcagggctgttgctgaaggccaccaatgagaagctgagtgtttacgccgccctgcagaggcagctgctgagtcccggcacggccctcatcctgctggaggcgcaggcggcctcaggcttcctgctggaccctgtgcggaaccggcggctgaccgtcaacgaggctgtgaaggagggtgtggtgggccccgagctgcaccacaagctgctgtcggccgagcgcgccgtcactggctacaaggacccctacactggccagcagatctctctcttccaagccatgcagaagggcctcatcgtccgggagcacggcatccgcctgctggaggcccagatcgccacgggcggcgttatcgaccccgtgcacagccaccgcgtgcccgtggacgtggcctaccggcgcggctacttcgacgaggagatgaaccgcgtcctggcggaccccagcgacgacaccaagggcttctttgaccccaacacgcacgagaacctcacgtacctgcagctactggagcgctgcgtggaggaccccgagacgggcctgtgccttctgccactcacggataaggctgccaagggcggggagctggtctacactgactccgaggcccgggacgtctttgagaaggccaccgtgtctgcgccgttcggcaagttccagggcaagacggtgaccatttgggagatcatcaactcggaatacttcacggcagagcagcggcgggacctgctgcggcagttccgcacgggccggatcacagtggagaagatcatcaagatcatcatcacggtggtggaggagcaggagcagaagggccggctttgctttgagggcctgcgcagcctggtgccagccgccgagctgctggagagcagggtcatcgaccgcgagctctaccagcagctgcagcgaggtgagcgctctgtgcgagacgtagccgaggtggacactgtgcggcgggctctccggggtgccaacgtcatcgcgggtgtatggctggaggaggcggggcagaagctgagtatctacaatgccctgaagaaagacctgctgccatccgacatggccgtggccctgttggaagcccaggccggcaccgggcacatcatcgaccccgccaccagcgcccggctgaccgtggacgaggcagtgcgtgctggcctggtgggccccgagtttcatgagaagctgctatcagccgagaaggctgtgacagggtacagggacccctacacagggcagagcgtctccctgttccaggccctgaagaagggcctcattccccgggagcagggcctgcgcctgttggacgcccagctgtccacgggcggcatcgtggaccccagcaagagccaccgcgtgcccctggatgtcgcctgcgcccgaggctgcctggatgaggagaccagcagggccctgtcggcaccaagggccgacgccaaggcctacagtgaccccagcacaggggagccggccacctacggcgagctccagcagcggtgccggcccgaccagctgaccgggctgagcctgctgccgctctcagaaaaggctgctcgggcccggcaggaggagctctactcagagctgcaggcccgtgagacctttgaaaagaccccggttgaggtccccgtgggtggcttcaagggcaggacggtgacggtgtgggagctcatcagctctgagtacttcactgcggagcagcggcaggagctgttgcgtcagttccgcacgggcaaggtcaccgtggagaaggtcatcaagattctcattaccatcgtggaggaggtggagaccctgcggcaggagaggctgtccttcagcggcctccgtgcccctgtgccagccagcgagctcctggcttccggggtcctcagcagagcccagtttgagcagctcaaggacggcaagacgacggtcaaggacctttcggagctgggctccgtgcggacgctgctgcagggcagtggctgcctcgccggcatctacctggaggacaccaaggagaaggtgtccatctacgaggccatgcgccggggcctgctgagagccacaacggctgcgctcctgctggaggcgcaggcggccactggcttcctggtggaccccgtgcggaaccagcgcctgtatgtccacgaggccgtgaaggcgggcgtggtgggccccgagcttcacgagcagctgctgtctgccgagaaggccgtcaccggctacagagacccctactcgggcagcaccatctccctcttccaggccatgcagaagggcctggttctccggcagcacggcatccgcctgctggaggcccagatcgccacgggcggcatcatcgaccccgtgcacagccaccgcgtgcctgtggacgtggcctaccagcgcggctacttcagtgaggagatgaaccgcgtcctggcggaccccagcgacgacaccaagggcttctttgaccccaacacgcatgagaacctcacgtacaggcagctgctggagcggtgcgtggaggaccccgagacgggcttgcgccttctgccactgaaaggggcggagaaggctgaggtggtggagaccacgcaggtgtacactgaggaggagacaagaagggcatttgaagagacacagatcgacattcccggcggcggcagccacggcggctccaccatgtccctgtgggaggtgatgcagtcggacctgatccccgaggagcagcgggcccagctgatggctgacttccaggccggccgggtgaccaaggaacgcatgatcatcatcatcatcgagatcattgagaagacagagatcatccgccagcagggtctggcctcctacgactacgtgcgccgccgcctcacggctgaggacctgttcgaggctcggatcatctctctcgagacctacaacctgctccgggagggcaccaggagcctccgtgaggctctcgaggcggagtccgcctggtgctacctctatggcacgggctccgtggctggtgtctacctgcccggttccaggcagacactgagcatctaccaggctctcaagaaagggctgctgagtgccgaggtggcccgcctgctgctggaggcacaggcagccacaggcttcctgctggacccggtgaagggggagcggctgactgtggatgaggctgtgcggaagggcctcgtggggcccgagctgcacgaccgcctgctctcggctgagcgggcggtcaccggctaccgtgacccctacaccgagcagaccatctcgctcttccaggccatgaagaaggagctgatccctactgaggaggccctgcggctgctggatgcccagctggccaccggcggcatcgtggacccccgcctgggcttccaccttcccctggaggtggcttaccagcgtggctacctcaacaaggacacgcacgaccagctgtcagagcccagcgaggtgcgcagctacgtggacccgtccaccgacgagcgcctcagctacacgcagctgctcaggcggtgccgtcgtgacgacggcaccggccagctgctcctgccactgtcggacgcccgcaagctgaccttccgtggcctgcggaagcagatcaccatggaggagctggtgcgctcgcaggtcatggacgaggccacggcgctgcagctgcgggagggcctgacctccatcgaggaggtcaccaagaacttgcagaagttcctggaaggcaccagctgcatcgctggtgtcttcgtggacgccaccaaggaacggctctcggtgtaccaggccatgaagaagggcatcatccgccccggcacagcctttgagctcctggaggcgcaggcggccaccggttacgtcatcgaccccatcaagggactgaagctgacggtggaggaggctgtgcgtatgggcattgtgggccccgagttcaaggacaagctgctgtcggccgagcgcgccgtcactgggtacaaggacccctactctgggaagctcatctccctcttccaggccatgaagaagggcctgatcctgaaggaccatggcatccgcctgctggaggcccagatcgccacgggcggcatcatcgaccctgaggagagccaccggctgcccgtggaggtggcctacaagcgcggcctcttcgatgaggagatgaacgagatcctgaccgacccctcggacgacaccaagggcttctttgaccctaacacggaggagaacctcacctacctgcagctgatggagcgttgtatcactgacccccagacgggcctgtgtctcttgccgctgaaggagaagaagcgggagcggaagacgtcctccaagtcctccgtgcgcaagcgccgagtggtcatcgtggaccccgagacgggcaaggagatgtcagtgtacgaggcctaccgcaagggcctgattgaccaccagacgtacctggagctgtccgagcaggagtgcgagtgggaggagatcaccatctcctcctcggacggcgtggtcaagtccatgatcatcgaccgccgctccgggcgccagtacgacatcgatgatgccatcgccaagaacctcatcgaccgctcggcactggaccagtaccgcgccggcacgctctccatcaccgagttcgccgacatgctctcgggcaacgccggtggtttccgctcccgttcctcctcggtgggatcctcctcctcctaccccatcagccccgccgtctccaggacccagctggcctcctggtcagaccccactgaggagacgggccccgtggctggcatcctggacacggagacgctggagaaggtgtccatcaccgaggccatgcaccggaacctggtggataacatcacggggcagcggctgctggaggcgcaggcctgcaccgggggcatcatcgaccccagcaccggtgagcgcttccctgtcaccgacgccgtcaacaagggcctggtggacaagatcatggtggaccgcatcaacctggcccagaaggccttctgcggcttcgaggacccacgcaccaagaccaagatgtcggccgcccaggccctgaagaagggctggctctactacgaggccggccagcgcttcctggaggtgcagtacctgaccggcggcttgatcgagcccgacacgccgggccgcgtgcccctggacgaggccctgcagcgcggcacggtggacgcccgcaccgcacagaagctgcgtgacgtgggcgcctactccaagtacctcacctgccctaagaccaagctcaagatctcctataaggacgcgctggaccgcagcatggtggaggagggcacggggctgcggctgctggaggctgccgcgcagtccaccaagggctactacagcccctacagcgtcagcggctccggctctaccgctggctcccgcaccggctcgcgcaccggctcccgggccggctcccgccgcggcagctttgacgccaccggctccggcttctccatgaccttctcttcatcctcctactcctcctcgggctacggccgccgctacgcctcggggtcctcggcctccctggggggccctgagtctgccgtggcctgaggctgcctgcgcccaccccgctctgcatgcggcccagcccggctcccaccgaggcgcgggggccgttttcaacgcttaaaggtgtcttcctcccaagtggtgcctaaagtttaaccaaaaagaccagactaatatattaatatatatctgctgtccagacagcctgtatcttgggggacagggctggcccagccctgctggccgcctcaccccctcgggtctcctcactcccttctacctgccactcacacagccaggtgccttggagggtcccaagctgggccccagcccaccctcctgtcttcccagggtagcccgcctgccagtcctagctgcacagggcagctgggcccaaccctgtctgtagagggccctggtgtttctagcactggcctgcacggtgggccttgctggggacggggggccccagtcagcctctctcccagtctacccagagaagccccttccccatgggaagacgaggccctcgggcccagcccccacagtgctgtctgatctgtgctttccagctcaccccccacactcactcctgagacccctggcctccggcgtcagcctccagcctctgttcccctagtaagtgccttccatgtcggcctctaaccccaggccccgaggacccagacccagtggggaggcggacgttccagccggcatggctgggaactgcagacctgtcctcctggtgggtccaggggcccctccagcttgtggagccccacactggggtgccgcctgcccgtctctctcccatggagccccagccccctttgggcccagggacaccagccaggctctgtgctgaccctcctgttgcacccagccctggtctcagcagcgaccacccctgcctccaccctctgagctttgcatgttccactaaccccgggcgggtggcaggtggaggtgtcaggctgctggcgcctctgcaagggcagaacactaacctgaccgtgggcggggccttgcggtatccgcccccaataaaagcaattccaacctt

SEQ ID NO: 749 - protein, 4525 aa, Homo sapiens
MDPSRAIQNEISSLKDERDRVQKKTFTKWVNKHLIKAQRHISDLYEDLRDGHNLISLLEVLSGDSLPREKGRMRFHKLQNVQIALDYLRHRQVKLVNIRNDDIADGNPKLTLGLIWTIILHFQISDIQVSGQSEDMTAKEKLLLWSQRMVEGYQGLRCDNFTSSWRDGRLFNAIIHRHKPLLIDMNKVYRQTNLENLDQAFSVAERDLGVTRLLDPEDVDVPQPDEKSIITYVSSLYDAMPRVPDVQDGVRANELQLRWQEYRELVLLLLQWMRHHTAAFEERRFPSSFEEIEILWSQFLKFKEMELPAKEADKNRSKGIYQSLEGAVQAGQLKVPPGYHPLDVEKEWGKLHVAILEREKQLRSEFERLECLQRIVTKLQMEAGLCEEQLNQADALLQSDVRLLAAGKVPQRAGEVERDLDKADSMIRLLFNDVQTLKDGRHPQGEQMYRRVYRLHERLVAIRTEYNLRLKAGVAAPATQVAQVTLQSVQRRPELEDSTLRYLQDLLAWVEENQHRVDGAEWGVDLPSVEAQLGSHRGLHQSIEEFRAKIERARSDEGQLSPATRGAYRDCLGRLDLQYAKLLNSSKARLRSLESLHSFVAAATKELMWLNEKEEEEVGFDWSDRNTNMTAKKESYSALMRELELKEKKIKELQNAGDRLLREDHPARPTVESFQAALQTQWSWMLQLCCCIEAHLKENAAYFQFFSDVREAEGQLQKLQEALRRKYSCDRSATVTRLEDLLQDAQDEKEQLNEYKGHLSGLAKRAKAVVQLKPRHPAHPMRGRLPLLAVCDYKQVEVTVHKGDECQLVGPAQPSHWKVLSSSGSEAAVPSVCFLVPPPNQEAQEAVTRLEAQHQALVTLWHQLHVDMKSLLAWQSLRRDVQLIRSWSLATFRTLKPEEQRQALHSLELHYQAFLRDSQDAGGFGPEDRLMAEREYGSCSHHYQQLLQSLEQGAQEESRCQRCISELKDIRLQLEACETRTVHRLRLPLDKEPARECAQRIAEQQKAQAEVEGLGKGVARLSAEAEKVLALPEPSPAAPTLRSELELTLGKLEQVRSLSAIYLEKLKTISLVIRGTQGAEEVLRAHEEQLKEAQAVPATLPELEATKASLKKLRAQAEAQQPTFDALRDELRGAQEVGERLQQRHGERDVEVERWRERVAQLLERWQAVLAQTDVRQRELEQLGRQLRYYRESADPLGAWLQDARRRQEQIQAMPLADSQAVREQLRQEQALLEEIERHGEKVEECQRFAKQYINAIKDYELQLVTYKAQLEPVASPAKKPKVQSGSESVIQEYVDLRTHYSELTTLTSQYIKFISETLRRMEEEERLAEQQRAEERERLAEVEAALEKQRQLAEAHAQAKAQAEREAKELQQRMQEEVVRREEAAVDAQQQKRSIQEELQQLRQSSEAEIQAKARQAEAAERSRLRIEEEIRVVRLQLEATERQRGGAEGELQALRARAEEAEAQKRQAQEEAERLRRQVQDESQRKRQAEVELASRVKAEAEAAREKQRALQALEELRLQAEEAERRLRQAEVERARQVQVALETAQRSAEAELQSKRASFAEKTAQLERSLQEEHVAVAQLREEAERRAQQQAEAERAREEAERELERWQLKANEALRLRLQAEEVAQQKSLAQAEAEKQKEEAEREARRRGKAEEQAVRQRELAEQELEKQRQLAEGTAQQRLAAEQELIRLRAETEQGEQQRQLLEEELARLQREAAAATQKRQELEAELAKVRAEMEVLLASKARAEEESRSTSEKSKQRLEAEAGRFRELAEEAARLRALAEEAKRQRQLAEEDAARQRAEAERVLAEKLAAIGEATRLKTEAEIALKEKEAENERLRRLAEDEAFQRRRLEEQAAQHKADIEERLAQLRKASDSELERQKGLVEDTLRQRRQVEEEILALKASFEKAAAGKAELELELGRIRSNAEDTLRSKEQAELEAARQRQLAAEEERRRREAEERVQKSLAAEEEAARQRKAALEEVERLKAKVEEARRLRERAEQESARQLQLAQEAAQKRLQAEEKAHAFAVQQKEQELQQTLQQEQSVLDQLRGEAEAARRAAEEAEEARVQAEREAAQSRRQVEEAERLKQSAEEQAQARAQAQAAAEKLRKEAEQEAARRAQAEQAALRQKQAADAEMEKHKKFAEQTLRQKAQVEQELTTLRLQLEETDHQKNLLDEELQRLKAEATEAARQRSQVEEELFSVRVQMEELSKLKARIEAENRALILRDKDNTQRFLQEEAEKMKQVAEEAARLSVAAQEAARLRQLAEEDLAQQRALAEKMLKEKMQAVQEATRLKAEAELLQQQKELAQEQARRLQEDKEQMAQQLAEETQGFQRTLEAERQRQLEMSAEAERLKLRVAEMSRAQARAEEDAQRFRKQAEEIGEKLHRTELATQEKVTLVQTLEIQRQQSDHDAERLREAIAELEREKEKLQQEAKLLQLKSEEMQTVQQEQLLQETQALQQSFLSEKDSLLQRERFIEQEKAKLEQLFQDEVAKAQQLREEQQRQQQQMEQERQRLVASMEEARRRQHEAEEGVRRKQEELQQLEQQRRQQEELLAEENQRLREQLQLLEEQHRAALAHSEEVTASQVAATKTLPNGRDALDGPAAEAEPEHSFDGLRRKVSAQRLQEAGILSAEELQRLAQGHTTVDELARREDVRHYLQGRSSIAGLLLKATNEKLSVYAALQRQLLSPGTALILLEAQAASGFLLDPVRNRRLTVNEAVKEGVVGPELHHKLLSAERAVTGYKDPYTGQQISLFQAMQKGLIVREHGIRLLEAQIATGGVIDPVHSHRVPVDVAYRRGYFDEEMNRVLADPSDDTKGFFDPNTHENLTYLQLLERCVEDPETGLCLLPLTDKAAKGGELVYTDSEARDVFEKATVSAPFGKFQGKTVTIWEIINSEYFTAEQRRDLLRQFRTGRITVEKIIKIIITVVEEQEQKGRLCFEGLRSLVPAAELLESRVIDRELYQQLQRGERSVRDVAEVDTVRRALRGANVIAGVWLEEAGQKLSIYNALKKDLLPSDMAVALLEAQAGTGHIIDPATSARLTVDEAVRAGLVGPEFHEKLLSAEKAVTGYRDPYTGQSVSLFQALKKGLIPREQGLRLLDAQLSTGGIVDPSKSHRVPLDVACARGCLDEETSRALSAPRADAKAYSDPSTGEPATYGELQQRCRPDQLTGLSLLPLSEKAARARQEELYSELQARETFEKTPVEVPVGGFKGRTVTVWELISSEYFTAEQRQELLRQFRTGKVTVEKVIKILITIVEEVETLRQERLSFSGLRAPVPASELLASGVLSRAQFEQLKDGKTTVKDLSELGSVRTLLQGSGCLAGIYLEDTKEKVSIYEAMRRGLLRATTAALLLEAQAATGFLVDPVRNQRLYVHEAVKAGVVGPELHEQLLSAEKAVTGYRDPYSGSTISLFQAMQKGLVLRQHGIRLLEAQIATGGIIDPVHSHRVPVDVAYQRGYFSEEMNRVLADPSDDTKGFFDPNTHENLTYRQLLERCVEDPETGLRLLPLKGAEKAEVVETTQVYTEEETRRAFEETQIDIPGGGSHGGSTMSLWEVMQSDLIPEEQRAQLMADFQAGRVTKERMIIIIIEIIEKTEIIRQQGLASYDYVRRRLTAEDLFEARIISLETYNLLREGTRSLREALEAESAWCYLYGTGSVAGVYLPGSRQTLSIYQALKKGLLSAEVARLLLEAQAATGFLLDPVKGERLTVDEAVRKGLVGPELHDRLLSAERAVTGYRDPYTEQTISLFQAMKKELIPTEEALRLLDAQLATGGIVDPRLGFHLPLEVAYQRGYLNKDTHDQLSEPSEVRSYVDPSTDERLSYTQLLRRCRRDDGTGQLLLPLSDARKLTFRGLRKQITMEELVRSQVMDEATALQLREGLTSIEEVTKNLQKFLEGTSCIAGVFVDATKERLSVYQAMKKGIIRPGTAFELLEAQAATGYVIDPIKGLKLTVEEAVRMGIVGPEFKDKLLSAERAVTGYKDPYSGKLISLFQAMKKGLILKDHGIRLLEAQIATGGIIDPEESHRLPVEVAYKRGLFDEEMNEILTDPSDDTKGFFDPNTEENLTYLQLMERCITDPQTGLCLLPLKEKKRERKTSSKSSVRKRRVVIVDPETGKEMSVYEAYRKGLIDHQTYLELSEQECEWEEITISSSDGVVKSMIIDRRSGRQYDIDDAIAKNLIDRSALDQYRAGTLSITEFADMLSGNAGGFRSRSSSVGSSSSYPISPAVSRTQLASWSDPTEETGPVAGILDTETLEKVSITEAMHRNLVDNITGQRLLEAQACTGGIIDPSTGERFPVTDAVNKGLVDKIMVDRINLAQKAFCGFEDPRTKTKMSAAQALKKGWLYYEAGQRFLEVQYLTGGLIEPDTPGRVPLDEALQRGTVDARTAQKLRDVGAYSKYLTCPKTKLKISYKDALDRSMVEEGTGLRLLEAAAQSTKGYYSPYSVSGSGSTAGSRTGSRTGSRAGSRRGSFDATGSGFSMTFSSSSYSSSGYGRRYASGSSASLGGPESAVA

SEQ ID NO: 750 - DNA, 15249 bp, Homo sapiens
gagcccgcgccctcacgctcagcaccccagcctgcctgcccgcccgcctgccctgccgctgcccgctgtcacaccctgtagcgcgggagcttctcgcagcgccccgggccttctcgtggtaccctgcctgctgcctttgcccccgcactgactgcccggctccagcagccatggtggccggcatgctcatgccacgggaccagctgcgggccatctatgaggtgctcttccgcgagggcgtgatggtggccaagaaggaccggcggccccgcagcttgcacccccatgtgcccggcgtcaccaacctgcaggtcatgcgtgccatggcgtccctgcgggcacggggcctggtccgcgagacctttgcctggtgccacttttactggtacctcaccaatgaaggcatcgcccacctccgccagtacctgcacctgccgccagagatcgtgcccgcctctctgcagcgcgtgcgccgccccgtcgccatggtgatgcccgcacgccgcaccccccacgtgcaggctgtgcagggtcccctgggctccccacccaagcgggggccgctgccgacggaggagcagcgggtctaccgtcggaaggagcttgaggaggtgtcacctgagacccctgtggtgcctgctaccacccagcggaccctggccaggccaggcccggagcctgccccagccacagatgagcgggatcgtgtgcagaagaaaaccttcaccaagtgggtcaacaagcacctcatcaaggcccagaggcacatcagtgacctgtatgaagacctccgcgatggccacaacctcatctccctgctggaggtcctctcgggggacagcctgccccgggagaaggggaggatgcgtttccacaagctgcagaatgtccagattgccctggactacctccggcaccgccaggtgaagctggtgaacatcaggaatgatgacatcgctgacggcaaccccaagctgacccttggcctcatctggacaatcattctgcacttccagatctcagatatccaggtgagtgggcagtcggaggacatgacggccaaggagaagctgctgctgtggtcgcagcgaatggtggaggggtaccagggcctgcgatgcgacaacttcacctccagctggagagacggccgcctcttcaatgccatcatccaccggcacaagcccctgctcatcgacatgaacaaggtgtaccggcagaccaacctggagaacctggaccaggccttctctgtggcggagcgggacctgggagtgacgcggctcctggaccctgaggacgtggatgtccctcagcccgacgagaagtccatcatcacctacgtctcgtcgctgtatgacgccatgccccgcgtgccggacgtgcaggatggggtgagggccaacgagctgcagctgcgctggcaggagtaccgggagctggtgctgctgctgcttcagtggatgcgacaccacacggccgcctttgaggaacgcaggttcccctccagcttcgaggagattgagatcctgtggtctcagttcctgaagtttaaggagatggagctaccagccaaggaggccgacaagaacaggtccaagggcatctaccaatccctggagggagcggtgcaagcaggccagctcaaggtgccccctggctaccacccgctggatgtggagaaggagtggggcaagctgcacgtggccatcctggagcgggagaagcagctccgcagcgagtttgagaggctggagtgtcttcagcgcatcgtgaccaagctgcagatggaggcggggctgtgtgaggagcagctgaaccaggccgacgccctgctgcagtcggatgtccggctgctggctgcaggcaaagtgccacagcgggcgggggaggtggaacgggacttggacaaggcggatagcatgatccggctgctcttcaacgacgtgcagaccctcaaggatggacggcacccgcagggcgagcagatgtaccgcagggtgtaccgtctgcacgagcgcctggtagccatccgcaccgagtacaacctacggctgaaggcaggcgtggcggcccctgcaacccaggtggcccaggtgactctgcagagtgtgcagaggcgccccgagctggaggactccactctgcgctacctgcaggacctgctggcctgggtggaggagaaccagcaccgtgtggatggcgctgagtggggtgtggacctgcccagcgtggaggcgcagctgggcagccaccgaggcctgcaccagtccatcgaagaattccgggccaagatcgagcgggcacggagtgacgagggccagctctcccccgccacccggggtgcctaccgtgactgcctgggtcggctggacctgcagtacgccaagctgctgaactcctccaaggcccgcctcaggtccctggagagcttgcacagctttgtggcagccgccactaaggagctaatgtggctgaatgagaaggaggaggaggaggtgggcttcgactggagcgaccgcaacaccaacatgaccgccaagaaggagagctactcggcgctgatgcgggagctggagctgaaggagaagaagatcaaggagctccaaaatgctggggaccggctgctgcgggaggaccacccggcccggcccacggtggagtccttccaggcggccctgcagacgcagtggagctggatgctacagctgtgctgctgtatcgaggcacacctgaaggagaacgctgcctactttcagttcttctcagatgtgcgggaggccgaggggcagttgcagaagctgcaggaggcactgcgtaggaaatacagttgtgatcgctccgccaccgtcacccggctggaggacctgctgcaggatgcccaggacgagaaggaacagctgaacgagtacaagggccacctctcaggcctggccaagcgggccaaggccgtcgtgcagctgaagccccgccacccagcccaccccatgcggggccgcctgcccctgctggccgtgtgcgactataagcaggtggaggtgactgtgcacaagggtgacgagtgccagctggtgggccctgcacagccgtcccactggaaggtgctcagcagctccggcagcgaggccgccgtgccctccgtgtgcttcctggtgcccccgcccaaccaggaggcccaggaggccgtcaccaggctggaggcccagcaccaggccctggtcacgctgtggcaccagttgcacgtggacatgaagagccttctggcctggcagagccttcgccgcgacgtgcagctcatccgctcctggtccctggccacgttccgcaccctgaagccagaggagcagcgccaagccctgcacagcctggagctgcactaccaggccttcctgcgggacagccaggacgcgggcggcttcggacccgaggaccggctgatggctgagcgcgagtacggctcctgcagccaccactaccagcagctgctgcagagcctggaacagggtgcacaggaagagtctcgctgccagcgctgcatctccgagctcaaagacatccggctgcagctggaggcctgtgagacgcgcaccgtgcaccgcctgcggctgccgctggacaaagagccggcacgggagtgtgcccagcgcatcgccgagcagcagaaggcacaggcagaggtggaggggctgggcaagggggtcgcccggctctctgccgaggccgagaaggtcttggccctaccagagccatcgcctgcggcccccacgctgcgctcggagctggagctgacgctgggcaagctggagcaggtccgcagcctgtctgccatctacctggagaagctcaagaccatcagcctggtgatccgcggcacgcagggggccgaggaggtgctcagggcccacgaggagcagctcaaggaggcccaggccgtgccggccaccctcccggagctcgaggccaccaaggcctctctgaagaagctgcgggcccaggccgaggcacagcagcccacgttcgacgccctgcgggatgagctgcggggggcacaggaggtgggggagcgactgcagcagcggcacggggagcgggacgtggaggtggagcgctggcgggagcgggtcgcccagttgcttgagcgctggcaggctgtgctggcccagaccgacgtgcggcagcgcgagctcgagcaactgggccgccagctgcgttactaccgcgagagtgcagaccccttgggcgcctggctgcaggacgccaggcggcggcaggagcagatccaggccatgccgctggccgacagccaggctgtgcgggagcagctgcggcaggagcaggccctgctggaggagatcgagcgccacggcgagaaggtcgaggagtgccagaggtttgcgaaacagtacatcaacgccatcaaggactatgaactccagctggtgacgtacaaggcgcagcttgagccggtggcctccccggccaagaagcccaaggtccagtcgggatcagagagtgtcatccaggagtacgtggacctgcgtacgcactacagcgagctgaccacactgacgagccagtacatcaagttcatcagcgagactctgcggcgcatggaggaggaggagaggctggctgagcagcagcgggcagaggagcgcgagcggctggccgaggtggaggccgcgctggagaagcagcggcagctggccgaggcgcacgcccaggcaaaggcacaggcggagcgggaggcgaaggagctgcagcagcgcatgcaggaggaggtggtgcggcgggaggaggcggcggtggacgcgcagcagcagaagcgcagcattcaggaggagctgcagcagctgcggcagagctcggaggcggagatccaggccaaggcccggcaggcagaggcggctgagcgcagccggctgcgcatcgaggaggagatccgcgtggtgcgcctgcagttggaggccaccgagcgccagcgtggcggggctgagggggagctgcaggcactgcgtgcacgggcggaggaggctgaggcacaaaagcgacaggcgcaggaggaggccgagcgcttgcggaggcaggtgcaggacgagagccagcgtaagcggcaggcggaggtggagctggcctcgcgcgtgaaggccgaggccgaggcggcgcgcgagaagcagcgggccctgcaggccctggaggagctgcggctgcaggcggaggaggcggagcggcgcctgcggcaggccgaggtggagcgagcgcggcaggtacaggtggccctggagacggcgcagcgcagtgcagaggcggagctgcagagcaaacgcgcctccttcgccgagaagacggcacagctggagcgctccctgcaggaggaacacgtggctgtggcacagctgcgggaggaggctgagcggcgggcacagcagcaggccgaggccgagcgggcgcgcgaggaggcagagcgggagctggagcgctggcagctcaaggccaacgaggcgctacggctgcggctgcaggcggaggaggtggcgcagcagaagagcctggcgcaggccgaggctgagaagcagaaggaggaggcggagcgcgaggcgcggcggcgcggcaaggcggaggagcaggccgtccggcagcgggagctggctgaacaagagctggagaagcagcggcagctggcggaaggcaccgcgcagcagcgcctggccgcggagcaggagttgatccggctgcgggccgagacggagcagggggagcagcagcggcagctgctggaggaggagctggcccggctgcagcgtgaggcggctgcagccacgcagaaacggcaggagctggaagccgagctggccaaggtgcgggccgagatggaggtgctgctggccagcaaggcgagggctgaggaggagtcgcgctccaccagcgagaagtccaagcagaggctggaggccgaggccggccggttccgcgagctggccgaggaggccgcccgcctgcgtgccctggcggaagaggccaagcggcagcggcagctggccgaggaagacgcggcgcggcagcgggccgaggcggagcgggtgcttgcggagaagctggccgccatcggcgaggccacgcggctcaagacggaggcggagatcgcgctcaaggagaaggaggcggagaacgagcgcctgcggcggctggcggaggacgaggccttccagcggcggcggctggaggagcaggccgcgcaacacaaggctgacatcgaggagcgcctggcccagctgcgcaaggcatcggacagcgagctggagcggcagaaggggctggtggaggacacgctgaggcagcggcggcaggtggaggaggagatcctggcgctgaaggcgagcttcgagaaggcggccgctggcaaggcggagctggagctggagctgggacgcatccgcagcaacgcggaggacacgctgcgcagcaaggagcaggccgagctggaggctgcgaggcagcggcagctggcggcggaggaggagcggcggcgccgtgaggctgaggagcgcgtgcagaagagcctggcggccgaggaggaggccgcacggcagcggaaggcggcgctggaggaagtcgagcggctgaaagccaaggtggaggaggcgcggcgcctgcgggagcgagcggagcaggagtcggcgcggcagctgcagctggcccaggaggccgcccagaagcggctgcaggcggaagagaaggcacacgccttcgcggtgcagcagaaggagcaggagctacagcagacgctgcagcaggagcagagcgtgctggaccagctgcgcggcgaggcggaggcggcccggcgggcggctgaggaggcggaggaggcccgggtgcaggcggagcgtgaggcggcgcagtcccggcggcaggtggaagaggccgagcggctgaagcagtcggcagaggagcaggcacaggcccgggctcaggcacaggcggctgcagagaagctgcgcaaggaggccgagcaagaggcggcgcggcgggcacaggcggagcaggcggccctgcggcagaagcaggcagctgacgcggagatggagaagcataagaaattcgccgagcagacgctgcggcagaaggcgcaggtggagcaggagctgacaacactgcggctgcagctggaggagaccgaccaccagaagaacctgctggacgaggagctgcagcggctgaaggcggaggccacggaggccgcacgccagcgcagccaggtggaggaggagctcttctcggtgcgcgtgcagatggaggagctgagcaagctcaaggcacgcatcgaggctgagaaccgcgcactcatcttgcgtgacaaggacaatacgcagcgcttcctgcaggaggaggctgagaagatgaagcaggtggcggaggaggccgcgcggctgagtgtggcggcccaagaggctgcgcgactgcggcagctggcagaggaggacctggcacagcagcgggccttggcagagaagatgctcaaggagaagatgcaggcggtgcaggaggccacgcgactcaaggctgaggcggaactgctgcagcagcagaaggagcttgcgcaggagcaggcgcggcggctgcaggaggacaaggagcagatggcgcagcagctggcggaggagacgcagggcttccagcggacgctggaggccgagcggcagcggcagctggagatgagcgctgaggctgagcgcctcaagctgcgtgtggccgagatgagccgagcccaggcccgcgctgaggaggacgcccagcgcttccggaagcaggcggaggagatcggtgagaagctgcaccgcacggagctcgccacccaggagaaggtgaccctggtgcagacactggagatccagcgacagcagagtgaccatgatgccgagcgcctgcgggaggccatcgctgagctggagcgtgagaaggagaagctccaacaggaggccaaactgctgcagctcaagtctgaggagatgcagacggtgcagcaggagcagctgctgcaggagacgcaggccctgcagcaaagcttcctctctgaaaaggacagcctgctacagcgggagcgcttcatcgagcaggagaaggccaagctggagcagctcttccaggacgaggtggccaaggcacagcagctgcgtgaggagcagcagcggcagcagcagcagatggagcaggaacggcagcggctggtggccagcatggaggaggcgcggcggcggcagcatgaggccgaggagggcgtgcggcgcaagcaggaggagctgcagcagctggagcagcagcggcggcagcaggaggagctgctggctgaggagaaccagaggctgcgtgagcagctgcagctcctggaggagcagcaccgggccgcgctggcgcactcagaggaggtcactgcctcgcaggtggctgccacaaagaccctgcccaatggccgggatgcacttgatggccccgcggcagaggcagagccggagcacagcttcgatggcctgcggcggaaggtgtcagctcagaggctgcaggaggccggcatcctgagtgcggaggagctgcagcggttggcgcagggccacaccacggtggacgagctcgcacggcgggaagacgtgcgccactacctgcagggccgcagcagtatcgcagggctgttgctgaaggccaccaatgagaagctgagtgtttacgccgccctgcagaggcagctgctgagtcccggcacggccctcatcctgctggaggcgcaggcggcctcaggcttcctgctggaccctgtgcggaaccggcggctgaccgtcaacgaggctgtgaaggagggtgtggtgggccccgagctgcaccacaagctgctgtcggccgagcgcgccgtcactggctacaaggacccctacactggccagcagatctctctcttccaagccatgcagaagggcctcatcgtccgggagcacggcatccgcctgctggaggcccagatcgccacgggcggcgttatcgaccccgtgcacagccaccgcgtgcccgtggacgtggcctaccggcgcggctacttcgacgaggagatgaaccgcgtcctggcggaccccagcgacgacaccaagggcttctttgaccccaacacgcacgagaacctcacgtacctgcagctactggagcgctgcgtggaggaccccgagacgggcctgtgccttctgccactcacggataaggctgccaagggcggggagctggtctacactgactccgaggcccgggacgtctttgagaaggccaccgtgtctgcgccgttcggcaagttccagggcaagacggtgaccatttgggagatcatcaactcggaatacttcacggcagagcagcggcgggacctgctgcggcagttccgcacgggccggatcacagtggagaagatcatcaagatcatcatcacggtggtggaggagcaggagcagaagggccggctttgctttgagggcctgcgcagcctggtgccagccgccgagctgctggagagcagggtcatcgaccgcgagctctaccagcagctgcagcgaggtgagcgctctgtgcgagacgtagccgaggtggacactgtgcggcgggctctccggggtgccaacgtcatcgcgggtgtatggctggaggaggcggggcagaagctgagtatctacaatgccctgaagaaagacctgctgccatccgacatggccgtggccctgttggaagcccaggccggcaccgggcacatcatcgaccccgccaccagcgcccggctgaccgtggacgaggcagtgcgtgctggcctggtgggccccgagtttcatgagaagctgctatcagccgagaaggctgtgacagggtacagggacccctacacagggcagagcgtctccctgttccaggccctgaagaagggcctcattccccgggagcagggcctgcgcctgttggacgcccagctgtccacgggcggcatcgtggaccccagcaagagccaccgcgtgcccctggatgtcgcctgcgcccgaggctgcctggatgaggagaccagcagggccctgtcggcaccaagggccgacgccaaggcctacagtgaccccagcacaggggagccggccacctacggcgagctccagcagcggtgccggcccgaccagctgaccgggctgagcctgctgccgctctcagaaaaggctgctcgggcccggcaggaggagctctactcagagctgcaggcccgtgagacctttgaaaagaccccggttgaggtccccgtgggtggcttcaagggcaggacggtgacggtgtgggagctcatcagctctgagtacttcactgcggagcagcggcaggagctgttgcgtcagttccgcacgggcaaggtcaccgtggagaaggtcatcaagattctcattaccatcgtggaggaggtggagaccctgcggcaggagaggctgtccttcagcggcctccgtgcccctgtgccagccagcgagctcctggcttccggggtcctcagcagagcccagtttgagcagctcaaggacggcaagacgacggtcaaggacctttcggagctgggctccgtgcggacgctgctgcagggcagtggctgcctcgccggcatctacctggaggacaccaaggagaaggtgtccatctacgaggccatgcgccggggcctgctgagagccacaacggctgcgctcctgctggaggcgcaggcggccactggcttcctggtggaccccgtgcggaaccagcgcctgtatgtccacgaggccgtgaaggcgggcgtggtgggccccgagcttcacgagcagctgctgtctgccgagaaggccgtcaccggctacagagacccctactcgggcagcaccatctccctcttccaggccatgcagaagggcctggttctccggcagcacggcatccgcctgctggaggcccagatcgccacgggcggcatcatcgaccccgtgcacagccaccgcgtgcctgtggacgtggcctaccagcgcggctacttcagtgaggagatgaaccgcgtcctggcggaccccagcgacgacaccaagggcttctttgaccccaacacgcatgagaacctcacgtacaggcagctgctggagcggtgcgtggaggaccccgagacgggcttgcgccttctgccactgaaaggggcggagaaggctgaggtggtggagaccacgcaggtgtacactgaggaggagacaagaagggcatttgaagagacacagatcgacattcccggcggcggcagccacggcggctccaccatgtccctgtgggaggtgatgcagtcggacctgatccccgaggagcagcgggcccagctgatggctgacttccaggccggccgggtgaccaaggaacgcatgatcatcatcatcatcgagatcattgagaagacagagatcatccgccagcagggtctggcctcctacgactacgtgcgccgccgcctcacggctgaggacctgttcgaggctcggatcatctctctcgagacctacaacctgctccgggagggcaccaggagcctccgtgaggctctcgaggcggagtccgcctggtgctacctctatggcacgggctccgtggctggtgtctacctgcccggttccaggcagacactgagcatctaccaggctctcaagaaagggctgctgagtgccgaggtggcccgcctgctgctggaggcacaggcagccacaggcttcctgctggacccggtgaagggggagcggctgactgtggatgaggctgtgcggaagggcctcgtggggcccgagctgcacgaccgcctgctctcggctgagcgggcggtcaccggctaccgtgacccctacaccgagcagaccatctcgctcttccaggccatgaagaaggagctgatccctactgaggaggccctgcggctgctggatgcccagctggccaccggcggcatcgtggacccccgcctgggcttccaccttcccctggaggtggcttaccagcgtggctacctcaacaaggacacgcacgaccagctgtcagagcccagcgaggtgcgcagctacgtggacccgtccaccgacgagcgcctcagctacacgcagctgctcaggcggtgccgtcgtgacgacggcaccggccagctgctcctgccactgtcggacgcccgcaagctgaccttccgtggcctgcggaagcagatcaccatggaggagctggtgcgctcgcaggtcatggacgaggccacggcgctgcagctgcgggagggcctgacctccatcgaggaggtcaccaagaacttgcagaagttcctggaaggcaccagctgcatcgctggtgtcttcgtggacgccaccaaggaacggctctcggtgtaccaggccatgaagaagggcatcatccgccccggcacagcctttgagctcctggaggcgcaggcggccaccggttacgtcatcgaccccatcaagggactgaagctgacggtggaggaggctgtgcgtatgggcattgtgggccccgagttcaaggacaagctgctgtcggccgagcgcgccgtcactgggtacaaggacccctactctgggaagctcatctccctcttccaggccatgaagaagggcctgatcctgaaggaccatggcatccgcctgctggaggcccagatcgccacgggcggcatcatcgaccctgaggagagccaccggctgcccgtggaggtggcctacaagcgcggcctcttcgatgaggagatgaacgagatcctgaccgacccctcggacgacaccaagggcttctttgaccctaacacggaggagaacctcacctacctgcagctgatggagcgttgtatcactgacccccagacgggcctgtgtctcttgccgctgaaggagaagaagcgggagcggaagacgtcctccaagtcctccgtgcgcaagcgccgagtggtcatcgtggaccccgagacgggcaaggagatgtcagtgtacgaggcctaccgcaagggcctgattgaccaccagacgtacctggagctgtccgagcaggagtgcgagtgggaggagatcaccatctcctcctcggacggcgtggtcaagtccatgatcatcgaccgccgctccgggcgccagtacgacatcgatgatgccatcgccaagaacctcatcgaccgctcggcactggaccagtaccgcgccggcacgctctccatcaccgagttcgccgacatgctctcgggcaacgccggtggtttccgctcccgttcctcctcggtgggatcctcctcctcctaccccatcagccccgccgtctccaggacccagctggcctcctggtcagaccccactgaggagacgggccccgtggctggcatcctggacacggagacgctggagaaggtgtccatcaccgaggccatgcaccggaacctggtggataacatcacggggcagcggctgctggaggcgcaggcctgcaccgggggcatcatcgaccccagcaccggtgagcgcttccctgtcaccgacgccgtcaacaagggcctggtggacaagatcatggtggaccgcatcaacctggcccagaaggccttctgcggcttcgaggacccacgcaccaagaccaagatgtcggccgcccaggccctgaagaagggctggctctactacgaggccggccagcgcttcctggaggtgcagtacctgaccggcggcttgatcgagcccgacacgccgggccgcgtgcccctggacgaggccctgcagcgcggcacggtggacgcccgcaccgcacagaagctgcgtgacgtgggcgcctactccaagtacctcacctgccctaagaccaagctcaagatctcctataaggacgcgctggaccgcagcatggtggaggagggcacggggctgcggctgctggaggctgccgcgcagtccaccaagggctactacagcccctacagcgtcagcggctccggctctaccgctggctcccgcaccggctcgcgcaccggctcccgggccggctcccgccgcggcagctttgacgccaccggctccggcttctccatgaccttctcttcatcctcctactcctcctcgggctacggccgccgctacgcctcggggtcctcggcctccctggggggccctgagtctgccgtggcctgaggctgcctgcgcccaccccgctctgcatgcggcccagcccggctcccaccgaggcgcgggggccgttttcaacgcttaaaggtgtcttcctcccaagtggtgcctaaagtttaaccaaaaagaccagactaatatattaatatatatctgctgtccagacagcctgtatcttgggggacagggctggcccagccctgctggccgcctcaccccctcgggtctcctcactcccttctacctgccactcacacagccaggtgccttggagggtcccaagctgggccccagcccaccctcctgtcttcccagggtagcccgcctgccagtcctagctgcacagggcagctgggcccaaccctgtctgtagagggccctggtgtttctagcactggcctgcacggtgggccttgctggggacggggggccccagtcagcctctctcccagtctacccagagaagccccttccccatgggaagacgaggccctcgggcccagcccccacagtgctgtctgatctgtgctttccagctcaccccccacactcactcctgagacccctggcctccggcgtcagcctccagcctctgttcccctagtaagtgccttccatgtcggcctctaaccccaggccccgaggacccagacccagtggggaggcggacgttccagccggcatggctgggaactgcagacctgtcctcctggtgggtccaggggcccctccagcttgtggagccccacactggggtgccgcctgcccgtctctctcccatggagccccagccccctttgggcccagggacaccagccaggctctgtgctgaccctcctgttgcacccagccctggtctcagcagcgaccacccctgcctccaccctctgagctttgcatgttccactaaccccgggcgggtggcaggtggaggtgtcaggctgctggcgcctctgcaagggcagaacactaacctgaccgtgggcggggccttgcggtatccgcccccaataaaagcaattccaacctt

SEQ ID NO: 751 - protein, 4684 aa, Homo sapiens
MVAGMLMPRDQLRAIYEVLFREGVMVAKKDRRPRSLHPHVPGVTNLQVMRAMASLRARGLVRETFAWCHFYWYLTNEGIAHLRQYLHLPPEIVPASLQRVRRPVAMVMPARRTPHVQAVQGPLGSPPKRGPLPTEEQRVYRRKELEEVSPETPVVPATTQRTLARPGPEPAPATDERDRVQKKTFTKWVNKHLIKAQRHISDLYEDLRDGHNLISLLEVLSGDSLPREKGRMRFHKLQNVQIALDYLRHRQVKLVNIRNDDIADGNPKLTLGLIWTIILHFQISDIQVSGQSEDMTAKEKLLLWSQRMVEGYQGLRCDNFTSSWRDGRLFNAIIHRHKPLLIDMNKVYRQTNLENLDQAFSVAERDLGVTRLLDPEDVDVPQPDEKSIITYVSSLYDAMPRVPDVQDGVRANELQLRWQEYRELVLLLLQWMRHHTAAFEERRFPSSFEEIEILWSQFLKFKEMELPAKEADKNRSKGIYQSLEGAVQAGQLKVPPGYHPLDVEKEWGKLHVAILEREKQLRSEFERLECLQRIVTKLQMEAGLCEEQLNQADALLQSDVRLLAAGKVPQRAGEVERDLDKADSMIRLLFNDVQTLKDGRHPQGEQMYRRVYRLHERLVAIRTEYNLRLKAGVAAPATQVAQVTLQSVQRRPELEDSTLRYLQDLLAWVEENQHRVDGAEWGVDLPSVEAQLGSHRGLHQSIEEFRAKIERARSDEGQLSPATRGAYRDCLGRLDLQYAKLLNSSKARLRSLESLHSFVAAATKELMWLNEKEEEEVGFDWSDRNTNMTAKKESYSALMRELELKEKKIKELQNAGDRLLREDHPARPTVESFQAALQTQWSWMLQLCCCIEAHLKENAAYFQFFSDVREAEGQLQKLQEALRRKYSCDRSATVTRLEDLLQDAQDEKEQLNEYKGHLSGLAKRAKAVVQLKPRHPAHPMRGRLPLLAVCDYKQVEVTVHKGDECQLVGPAQPSHWKVLSSSGSEAAVPSVCFLVPPPNQEAQEAVTRLEAQHQALVTLWHQLHVDMKSLLAWQSLRRDVQLIRSWSLATFRTLKPEEQRQALHSLELHYQAFLRDSQDAGGFGPEDRLMAEREYGSCSHHYQQLLQSLEQGAQEESRCQRCISELKDIRLQLEACETRTVHRLRLPLDKEPARECAQRIAEQQKAQAEVEGLGKGVARLSAEAEKVLALPEPSPAAPTLRSELELTLGKLEQVRSLSAIYLEKLKTISLVIRGTQGAEEVLRAHEEQLKEAQAVPATLPELEATKASLKKLRAQAEAQQPTFDALRDELRGAQEVGERLQQRHGERDVEVERWRERVAQLLERWQAVLAQTDVRQRELEQLGRQLRYYRESADPLGAWLQDARRRQEQIQAMPLADSQAVREQLRQEQALLEEIERHGEKVEECQRFAKQYINAIKDYELQLVTYKAQLEPVASPAKKPKVQSGSESVIQEYVDLRTHYSELTTLTSQYIKFISETLRRMEEEERLAEQQRAEERERLAEVEAALEKQRQLAEAHAQAKAQAEREAKELQQRMQEEVVRREEAAVDAQQQKRSIQEELQQLRQSSEAEIQAKARQAEAAERSRLRIEEEIRVVRLQLEATERQRGGAEGELQALRARAEEAEAQKRQAQEEAERLRRQVQDESQRKRQAEVELASRVKAEAEAAREKQRALQALEELRLQAEEAERRLRQAEVERARQVQVALETAQRSAEAELQSKRASFAEKTAQLERSLQEEHVAVAQLREEAERRAQQQAEAERAREEAERELERWQLKANEALRLRLQAEEVAQQKSLAQAEAEKQKEEAEREARRRGKAEEQAVRQRELAEQELEKQRQLAEGTAQQRLAAEQELIRLRAETEQGEQQRQLLEEELARLQREAAAATQKRQELEAELAKVRAEMEVLLASKARAEEESRSTSEKSKQRLEAEAGRFRELAEEAARLRALAEEAKRQRQLAEEDAARQRAEAERVLAEKLAAIGEATRLKTEAEIALKEKEAENERLRRLAEDEAFQRRRLEEQAAQHKADIEERLAQLRKASDSELERQKGLVEDTLRQRRQVEEEILALKASFEKAAAGKAELELELGRIRSNAEDTLRSKEQAELEAARQRQLAAEEERRRREAEERVQKSLAAEEEAARQRKAALEEVERLKAKVEEARRLRERAEQESARQLQLAQEAAQKRLQAEEKAHAFAVQQKEQELQQTLQQEQSVLDQLRGEAEAARRAAEEAEEARVQAEREAAQSRRQVEEAERLKQSAEEQAQARAQAQAAAEKLRKEAEQEAARRAQAEQAALRQKQAADAEMEKHKKFAEQTLRQKAQVEQELTTLRLQLEETDHQKNLLDEELQRLKAEATEAARQRSQVEEELFSVRVQMEELSKLKARIEAENRALILRDKDNTQRFLQEEAEKMKQVAEEAARLSVAAQEAARLRQLAEEDLAQQRALAEKMLKEKMQAVQEATRLKAEAELLQQQKELAQEQARRLQEDKEQMAQQLAEETQGFQRTLEAERQRQLEMSAEAERLKLRVAEMSRAQARAEEDAQRFRKQAEEIGEKLHRTELATQEKVTLVQTLEIQRQQSDHDAERLREAIAELEREKEKLQQEAKLLQLKSEEMQTVQQEQLLQETQALQQSFLSEKDSLLQRERFIEQEKAKLEQLFQDEVAKAQQLREEQQRQQQQMEQERQRLVASMEEARRRQHEAEEGVRRKQEELQQLEQQRRQQEELLAEENQRLREQLQLLEEQHRAALAHSEEVTASQVAATKTLPNGRDALDGPAAEAEPEHSFDGLRRKVSAQRLQEAGILSAEELQRLAQGHTTVDELARREDVRHYLQGRSSIAGLLLKATNEKLSVYAALQRQLLSPGTALILLEAQAASGFLLDPVRNRRLTVNEAVKEGVVGPELHHKLLSAERAVTGYKDPYTGQQISLFQAMQKGLIVREHGIRLLEAQIATGGVIDPVHSHRVPVDVAYRRGYFDEEMNRVLADPSDDTKGFFDPNTHENLTYLQLLERCVEDPETGLCLLPLTDKAAKGGELVYTDSEARDVFEKATVSAPFGKFQGKTVTIWEIINSEYFTAEQRRDLLRQFRTGRITVEKIIKIIITVVEEQEQKGRLCFEGLRSLVPAAELLESRVIDRELYQQLQRGERSVRDVAEVDTVRRALRGANVIAGVWLEEAGQKLSIYNALKKDLLPSDMAVALLEAQAGTGHIIDPATSARLTVDEAVRAGLVGPEFHEKLLSAEKAVTGYRDPYTGQSVSLFQALKKGLIPREQGLRLLDAQLSTGGIVDPSKSHRVPLDVACARGCLDEETSRALSAPRADAKAYSDPSTGEPATYGELQQRCRPDQLTGLSLLPLSEKAARARQEELYSELQARETFEKTPVEVPVGGFKGRTVTVWELISSEYFTAEQRQELLRQFRTGKVTVEKVIKILITIVEEVETLRQERLSFSGLRAPVPASELLASGVLSRAQFEQLKDGKTTVKDLSELGSVRTLLQGSGCLAGIYLEDTKEKVSIYEAMRRGLLRATTAALLLEAQAATGFLVDPVRNQRLYVHEAVKAGVVGPELHEQLLSAEKAVTGYRDPYSGSTISLFQAMQKGLVLRQHGIRLLEAQIATGGIIDPVHSHRVPVDVAYQRGYFSEEMNRVLADPSDDTKGFFDPNTHENLTYRQLLERCVEDPETGLRLLPLKGAEKAEVVETTQVYTEEETRRAFEETQIDIPGGGSHGGSTMSLWEVMQSDLIPEEQRAQLMADFQAGRVTKERMIIIIIEIIEKTEIIRQQGLASYDYVRRRLTAEDLFEARIISLETYNLLREGTRSLREALEAESAWCYLYGTGSVAGVYLPGSRQTLSIYQALKKGLLSAEVARLLLEAQAATGFLLDPVKGERLTVDEAVRKGLVGPELHDRLLSAERAVTGYRDPYTEQTISLFQAMKKELIPTEEALRLLDAQLATGGIVDPRLGFHLPLEVAYQRGYLNKDTHDQLSEPSEVRSYVDPSTDERLSYTQLLRRCRRDDGTGQLLLPLSDARKLTFRGLRKQITMEELVRSQVMDEATALQLREGLTSIEEVTKNLQKFLEGTSCIAGVFVDATKERLSVYQAMKKGIIRPGTAFELLEAQAATGYVIDPIKGLKLTVEEAVRMGIVGPEFKDKLLSAERAVTGYKDPYSGKLISLFQAMKKGLILKDHGIRLLEAQIATGGIIDPEESHRLPVEVAYKRGLFDEEMNEILTDPSDDTKGFFDPNTEENLTYLQLMERCITDPQTGLCLLPLKEKKRERKTSSKSSVRKRRVVIVDPETGKEMSVYEAYRKGLIDHQTYLELSEQECEWEEITISSSDGVVKSMIIDRRSGRQYDIDDAIAKNLIDRSALDQYRAGTLSITEFADMLSGNAGGFRSRSSSVGSSSSYPISPAVSRTQLASWSDPTEETGPVAGILDTETLEKVSITEAMHRNLVDNITGQRLLEAQACTGGIIDPSTGERFPVTDAVNKGLVDKIMVDRINLAQKAFCGFEDPRTKTKMSAAQALKKGWLYYEAGQRFLEVQYLTGGLIEPDTPGRVPLDEALQRGTVDARTAQKLRDVGAYSKYLTCPKTKLKISYKDALDRSMVEEGTGLRLLEAAAQSTKGYYSPYSVSGSGSTAGSRTGSRTGSRAGSRRGSFDATGSGFSMTFSSSSYSSSGYGRRYASGSSASLGGPESAVA

SEQ ID NO: 752 - DNA, 14646 bp, Homo sapiens
cctccgaggggcctgtgacctcccacacccctggcccgctccgtctgccccgtgggctcctgccaccgtccccgatgaagatcgtgcccgatgagcgggatcgtgtgcagaagaaaaccttcaccaagtgggtcaacaagcacctcatcaaggcccagaggcacatcagtgacctgtatgaagacctccgcgatggccacaacctcatctccctgctggaggtcctctcgggggacagcctgccccgggagaaggggaggatgcgtttccacaagctgcagaatgtccagattgccctggactacctccggcaccgccaggtgaagctggtgaacatcaggaatgatgacatcgctgacggcaaccccaagctgacccttggcctcatctggacaatcattctgcacttccagatctcagatatccaggtgagtgggcagtcggaggacatgacggccaaggagaagctgctgctgtggtcgcagcgaatggtggaggggtaccagggcctgcgatgcgacaacttcacctccagctggagagacggccgcctcttcaatgccatcatccaccggcacaagcccctgctcatcgacatgaacaaggtgtaccggcagaccaacctggagaacctggaccaggccttctctgtggcggagcgggacctgggagtgacgcggctcctggaccctgaggacgtggatgtccctcagcccgacgagaagtccatcatcacctacgtctcgtcgctgtatgacgccatgccccgcgtgccggacgtgcaggatggggtgagggccaacgagctgcagctgcgctggcaggagtaccgggagctggtgctgctgctgcttcagtggatgcgacaccacacggccgcctttgaggaacgcaggttcccctccagcttcgaggagattgagatcctgtggtctcagttcctgaagtttaaggagatggagctaccagccaaggaggccgacaagaacaggtccaagggcatctaccaatccctggagggagcggtgcaagcaggccagctcaaggtgccccctggctaccacccgctggatgtggagaaggagtggggcaagctgcacgtggccatcctggagcgggagaagcagctccgcagcgagtttgagaggctggagtgtcttcagcgcatcgtgaccaagctgcagatggaggcggggctgtgtgaggagcagctgaaccaggccgacgccctgctgcagtcggatgtccggctgctggctgcaggcaaagtgccacagcgggcgggggaggtggaacgggacttggacaaggcggatagcatgatccggctgctcttcaacgacgtgcagaccctcaaggatggacggcacccgcagggcgagcagatgtaccgcagggtgtaccgtctgcacgagcgcctggtagccatccgcaccgagtacaacctacggctgaaggcaggcgtggcggcccctgcaacccaggtggcccaggtgactctgcagagtgtgcagaggcgccccgagctggaggactccactctgcgctacctgcaggacctgctggcctgggtggaggagaaccagcaccgtgtggatggcgctgagtggggtgtggacctgcccagcgtggaggcgcagctgggcagccaccgaggcctgcaccagtccatcgaagaattccgggccaagatcgagcgggcacggagtgacgagggccagctctcccccgccacccggggtgcctaccgtgactgcctgggtcggctggacctgcagtacgccaagctgctgaactcctccaaggcccgcctcaggtccctggagagcttgcacagctttgtggcagccgccactaaggagctaatgtggctgaatgagaaggaggaggaggaggtgggcttcgactggagcgaccgcaacaccaacatgaccgccaagaaggagagctactcggcgctgatgcgggagctggagctgaaggagaagaagatcaaggagctccaaaatgctggggaccggctgctgcgggaggaccacccggcccggcccacggtggagtccttccaggcggccctgcagacgcagtggagctggatgctacagctgtgctgctgtatcgaggcacacctgaaggagaacgctgcctactttcagttcttctcagatgtgcgggaggccgaggggcagttgcagaagctgcaggaggcactgcgtaggaaatacagttgtgatcgctccgccaccgtcacccggctggaggacctgctgcaggatgcccaggacgagaaggaacagctgaacgagtacaagggccacctctcaggcctggccaagcgggccaaggccgtcgtgcagctgaagccccgccacccagcccaccccatgcggggccgcctgcccctgctggccgtgtgcgactataagcaggtggaggtgactgtgcacaagggtgacgagtgccagctggtgggccctgcacagccgtcccactggaaggtgctcagcagctccggcagcgaggccgccgtgccctccgtgtgcttcctggtgcccccgcccaaccaggaggcccaggaggccgtcaccaggctggaggcccagcaccaggccctggtcacgctgtggcaccagttgcacgtggacatgaagagccttctggcctggcagagccttcgccgcgacgtgcagctcatccgctcctggtccctggccacgttccgcaccctgaagccagaggagcagcgccaagccctgcacagcctggagctgcactaccaggccttcctgcgggacagccaggacgcgggcggcttcggacccgaggaccggctgatggctgagcgcgagtacggctcctgcagccaccactaccagcagctgctgcagagcctggaacagggtgcacaggaagagtctcgctgccagcgctgcatctccgagctcaaagacatccggctgcagctggaggcctgtgagacgcgcaccgtgcaccgcctgcggctgccgctggacaaagagccggcacgggagtgtgcccagcgcatcgccgagcagcagaaggcacaggcagaggtggaggggctgggcaagggggtcgcccggctctctgccgaggccgagaaggtcttggccctaccagagccatcgcctgcggcccccacgctgcgctcggagctggagctgacgctgggcaagctggagcaggtccgcagcctgtctgccatctacctggagaagctcaagaccatcagcctggtgatccgcggcacgcagggggccgaggaggtgctcagggcccacgaggagcagctcaaggaggcccaggccgtgccggccaccctcccggagctcgaggccaccaaggcctctctgaagaagctgcgggcccaggccgaggcacagcagcccacgttcgacgccctgcgggatgagctgcggggggcacaggaggtgggggagcgactgcagcagcggcacggggagcgggacgtggaggtggagcgctggcgggagcgggtcgcccagttgcttgagcgctggcaggctgtgctggcccagaccgacgtgcggcagcgcgagctcgagcaactgggccgccagctgcgttactaccgcgagagtgcagaccccttgggcgcctggctgcaggacgccaggcggcggcaggagcagatccaggccatgccgctggccgacagccaggctgtgcgggagcagctgcggcaggagcaggccctgctggaggagatcgagcgccacggcgagaaggtcgaggagtgccagaggtttgcgaaacagtacatcaacgccatcaaggactatgaactccagctggtgacgtacaaggcgcagcttgagccggtggcctccccggccaagaagcccaaggtccagtcgggatcagagagtgtcatccaggagtacgtggacctgcgtacgcactacagcgagctgaccacactgacgagccagtacatcaagttcatcagcgagactctgcggcgcatggaggaggaggagaggctggctgagcagcagcgggcagaggagcgcgagcggctggccgaggtggaggccgcgctggagaagcagcggcagctggccgaggcgcacgcccaggcaaaggcacaggcggagcgggaggcgaaggagctgcagcagcgcatgcaggaggaggtggtgcggcgggaggaggcggcggtggacgcgcagcagcagaagcgcagcattcaggaggagctgcagcagctgcggcagagctcggaggcggagatccaggccaaggcccggcaggcagaggcggctgagcgcagccggctgcgcatcgaggaggagatccgcgtggtgcgcctgcagttggaggccaccgagcgccagcgtggcggggctgagggggagctgcaggcactgcgtgcacgggcggaggaggctgaggcacaaaagcgacaggcgcaggaggaggccgagcgcttgcggaggcaggtgcaggacgagagccagcgtaagcggcaggcggaggtggagctggcctcgcgcgtgaaggccgaggccgaggcggcgcgcgagaagcagcgggccctgcaggccctggaggagctgcggctgcaggcggaggaggcggagcggcgcctgcggcaggccgaggtggagcgagcgcggcaggtacaggtggccctggagacggcgcagcgcagtgcagaggcggagctgcagagcaaacgcgcctccttcgccgagaagacggcacagctggagcgctccctgcaggaggaacacgtggctgtggcacagctgcgggaggaggctgagcggcgggcacagcagcaggccgaggccgagcgggcgcgcgaggaggcagagcgggagctggagcgctggcagctcaaggccaacgaggcgctacggctgcggctgcaggcggaggaggtggcgcagcagaagagcctggcgcaggccgaggctgagaagcagaaggaggaggcggagcgcgaggcgcggcggcgcggcaaggcggaggagcaggccgtccggcagcgggagctggctgaacaagagctggagaagcagcggcagctggcggaaggcaccgcgcagcagcgcctggccgcggagcaggagttgatccggctgcgggccgagacggagcagggggagcagcagcggcagctgctggaggaggagctggcccggctgcagcgtgaggcggctgcagccacgcagaaacggcaggagctggaagccgagctggccaaggtgcgggccgagatggaggtgctgctggccagcaaggcgagggctgaggaggagtcgcgctccaccagcgagaagtccaagcagaggctggaggccgaggccggccggttccgcgagctggccgaggaggccgcccgcctgcgtgccctggcggaagaggccaagcggcagcggcagctggccgaggaagacgcggcgcggcagcgggccgaggcggagcgggtgcttgcggagaagctggccgccatcggcgaggccacgcggctcaagacggaggcggagatcgcgctcaaggagaaggaggcggagaacgagcgcctgcggcggctggcggaggacgaggccttccagcggcggcggctggaggagcaggccgcgcaacacaaggctgacatcgaggagcgcctggcccagctgcgcaaggcatcggacagcgagctggagcggcagaaggggctggtggaggacacgctgaggcagcggcggcaggtggaggaggagatcctggcgctgaaggcgagcttcgagaaggcggccgctggcaaggcggagctggagctggagctgggacgcatccgcagcaacgcggaggacacgctgcgcagcaaggagcaggccgagctggaggctgcgaggcagcggcagctggcggcggaggaggagcggcggcgccgtgaggctgaggagcgcgtgcagaagagcctggcggccgaggaggaggccgcacggcagcggaaggcggcgctggaggaagtcgagcggctgaaagccaaggtggaggaggcgcggcgcctgcgggagcgagcggagcaggagtcggcgcggcagctgcagctggcccaggaggccgcccagaagcggctgcaggcggaagagaaggcacacgccttcgcggtgcagcagaaggagcaggagctacagcagacgctgcagcaggagcagagcgtgctggaccagctgcgcggcgaggcggaggcggcccggcgggcggctgaggaggcggaggaggcccgggtgcaggcggagcgtgaggcggcgcagtcccggcggcaggtggaagaggccgagcggctgaagcagtcggcagaggagcaggcacaggcccgggctcaggcacaggcggctgcagagaagctgcgcaaggaggccgagcaagaggcggcgcggcgggcacaggcggagcaggcggccctgcggcagaagcaggcagctgacgcggagatggagaagcataagaaattcgccgagcagacgctgcggcagaaggcgcaggtggagcaggagctgacaacactgcggctgcagctggaggagaccgaccaccagaagaacctgctggacgaggagctgcagcggctgaaggcggaggccacggaggccgcacgccagcgcagccaggtggaggaggagctcttctcggtgcgcgtgcagatggaggagctgagcaagctcaaggcacgcatcgaggctgagaaccgcgcactcatcttgcgtgacaaggacaatacgcagcgcttcctgcaggaggaggctgagaagatgaagcaggtggcggaggaggccgcgcggctgagtgtggcggcccaagaggctgcgcgactgcggcagctggcagaggaggacctggcacagcagcgggccttggcagagaagatgctcaaggagaagatgcaggcggtgcaggaggccacgcgactcaaggctgaggcggaactgctgcagcagcagaaggagcttgcgcaggagcaggcgcggcggctgcaggaggacaaggagcagatggcgcagcagctggcggaggagacgcagggcttccagcggacgctggaggccgagcggcagcggcagctggagatgagcgctgaggctgagcgcctcaagctgcgtgtggccgagatgagccgagcccaggcccgcgctgaggaggacgcccagcgcttccggaagcaggcggaggagatcggtgagaagctgcaccgcacggagctcgccacccaggagaaggtgaccctggtgcagacactggagatccagcgacagcagagtgaccatgatgccgagcgcctgcgggaggccatcgctgagctggagcgtgagaaggagaagctccaacaggaggccaaactgctgcagctcaagtctgaggagatgcagacggtgcagcaggagcagctgctgcaggagacgcaggccctgcagcaaagcttcctctctgaaaaggacagcctgctacagcgggagcgcttcatcgagcaggagaaggccaagctggagcagctcttccaggacgaggtggccaaggcacagcagctgcgtgaggagcagcagcggcagcagcagcagatggagcaggaacggcagcggctggtggccagcatggaggaggcgcggcggcggcagcatgaggccgaggagggcgtgcggcgcaagcaggaggagctgcagcagctggagcagcagcggcggcagcaggaggagctgctggctgaggagaaccagaggctgcgtgagcagctgcagctcctggaggagcagcaccgggccgcgctggcgcactcagaggaggtcactgcctcgcaggtggctgccacaaagaccctgcccaatggccgggatgcacttgatggccccgcggcagaggcagagccggagcacagcttcgatggcctgcggcggaaggtgtcagctcagaggctgcaggaggccggcatcctgagtgcggaggagctgcagcggttggcgcagggccacaccacggtggacgagctcgcacggcgggaagacgtgcgccactacctgcagggccgcagcagtatcgcagggctgttgctgaaggccaccaatgagaagctgagtgtttacgccgccctgcagaggcagctgctgagtcccggcacggccctcatcctgctggaggcgcaggcggcctcaggcttcctgctggaccctgtgcggaaccggcggctgaccgtcaacgaggctgtgaaggagggtgtggtgggccccgagctgcaccacaagctgctgtcggccgagcgcgccgtcactggctacaaggacccctacactggccagcagatctctctcttccaagccatgcagaagggcctcatcgtccgggagcacggcatccgcctgctggaggcccagatcgccacgggcggcgttatcgaccccgtgcacagccaccgcgtgcccgtggacgtggcctaccggcgcggctacttcgacgaggagatgaaccgcgtcctggcggaccccagcgacgacaccaagggcttctttgaccccaacacgcacgagaacctcacgtacctgcagctactggagcgctgcgtggaggaccccgagacgggcctgtgccttctgccactcacggataaggctgccaagggcggggagctggtctacactgactccgaggcccgggacgtctttgagaaggccaccgtgtctgcgccgttcggcaagttccagggcaagacggtgaccatttgggagatcatcaactcggaatacttcacggcagagcagcggcgggacctgctgcggcagttccgcacgggccggatcacagtggagaagatcatcaagatcatcatcacggtggtggaggagcaggagcagaagggccggctttgctttgagggcctgcgcagcctggtgccagccgccgagctgctggagagcagggtcatcgaccgcgagctctaccagcagctgcagcgaggtgagcgctctgtgcgagacgtagccgaggtggacactgtgcggcgggctctccggggtgccaacgtcatcgcgggtgtatggctggaggaggcggggcagaagctgagtatctacaatgccctgaagaaagacctgctgccatccgacatggccgtggccctgttggaagcccaggccggcaccgggcacatcatcgaccccgccaccagcgcccggctgaccgtggacgaggcagtgcgtgctggcctggtgggccccgagtttcatgagaagctgctatcagccgagaaggctgtgacagggtacagggacccctacacagggcagagcgtctccctgttccaggccctgaagaagggcctcattccccgggagcagggcctgcgcctgttggacgcccagctgtccacgggcggcatcgtggaccccagcaagagccaccgcgtgcccctggatgtcgcctgcgcccgaggctgcctggatgaggagaccagcagggccctgtcggcaccaagggccgacgccaaggcctacagtgaccccagcacaggggagccggccacctacggcgagctccagcagcggtgccggcccgaccagctgaccgggctgagcctgctgccgctctcagaaaaggctgctcgggcccggcaggaggagctctactcagagctgcaggcccgtgagacctttgaaaagaccccggttgaggtccccgtgggtggcttcaagggcaggacggtgacggtgtgggagctcatcagctctgagtacttcactgcggagcagcggcaggagctgttgcgtcagttccgcacgggcaaggtcaccgtggagaaggtcatcaagattctcattaccatcgtggaggaggtggagaccctgcggcaggagaggctgtccttcagcggcctccgtgcccctgtgccagccagcgagctcctggcttccggggtcctcagcagagcccagtttgagcagctcaaggacggcaagacgacggtcaaggacctttcggagctgggctccgtgcggacgctgctgcagggcagtggctgcctcgccggcatctacctggaggacaccaaggagaaggtgtccatctacgaggccatgcgccggggcctgctgagagccacaacggctgcgctcctgctggaggcgcaggcggccactggcttcctggtggaccccgtgcggaaccagcgcctgtatgtccacgaggccgtgaaggcgggcgtggtgggccccgagcttcacgagcagctgctgtctgccgagaaggccgtcaccggctacagagacccctactcgggcagcaccatctccctcttccaggccatgcagaagggcctggttctccggcagcacggcatccgcctgctggaggcccagatcgccacgggcggcatcatcgaccccgtgcacagccaccgcgtgcctgtggacgtggcctaccagcgcggctacttcagtgaggagatgaaccgcgtcctggcggaccccagcgacgacaccaagggcttctttgaccccaacacgcatgagaacctcacgtacaggcagctgctggagcggtgcgtggaggaccccgagacgggcttgcgccttctgccactgaaaggggcggagaaggctgaggtggtggagaccacgcaggtgtacactgaggaggagacaagaagggcatttgaagagacacagatcgacattcccggcggcggcagccacggcggctccaccatgtccctgtgggaggtgatgcagtcggacctgatccccgaggagcagcgggcccagctgatggctgacttccaggccggccgggtgaccaaggaacgcatgatcatcatcatcatcgagatcattgagaagacagagatcatccgccagcagggtctggcctcctacgactacgtgcgccgccgcctcacggctgaggacctgttcgaggctcggatcatctctctcgagacctacaacctgctccgggagggcaccaggagcctccgtgaggctctcgaggcggagtccgcctggtgctacctctatggcacgggctccgtggctggtgtctacctgcccggttccaggcagacactgagcatctaccaggctctcaagaaagggctgctgagtgccgaggtggcccgcctgctgctggaggcacaggcagccacaggcttcctgctggacccggtgaagggggagcggctgactgtggatgaggctgtgcggaagggcctcgtggggcccgagctgcacgaccgcctgctctcggctgagcgggcggtcaccggctaccgtgacccctacaccgagcagaccatctcgctcttccaggccatgaagaaggagctgatccctactgaggaggccctgcggctgctggatgcccagctggccaccggcggcatcgtggacccccgcctgggcttccaccttcccctggaggtggcttaccagcgtggctacctcaacaaggacacgcacgaccagctgtcagagcccagcgaggtgcgcagctacgtggacccgtccaccgacgagcgcctcagctacacgcagctgctcaggcggtgccgtcgtgacgacggcaccggccagctgctcctgccactgtcggacgcccgcaagctgaccttccgtggcctgcggaagcagatcaccatggaggagctggtgcgctcgcaggtcatggacgaggccacggcgctgcagctgcgggagggcctgacctccatcgaggaggtcaccaagaacttgcagaagttcctggaaggcaccagctgcatcgctggtgtcttcgtggacgccaccaaggaacggctctcggtgtaccaggccatgaagaagggcatcatccgccccggcacagcctttgagctcctggaggcgcaggcggccaccggttacgtcatcgaccccatcaagggactgaagctgacggtggaggaggctgtgcgtatgggcattgtgggccccgagttcaaggacaagctgctgtcggccgagcgcgccgtcactgggtacaaggacccctactctgggaagctcatctccctcttccaggccatgaagaagggcctgatcctgaaggaccatggcatccgcctgctggaggcccagatcgccacgggcggcatcatcgaccctgaggagagccaccggctgcccgtggaggtggcctacaagcgcggcctcttcgatgaggagatgaacgagatcctgaccgacccctcggacgacaccaagggcttctttgaccctaacacggaggagaacctcacctacctgcagctgatggagcgttgtatcactgacccccagacgggcctgtgtctcttgccgctgaaggagaagaagcgggagcggaagacgtcctccaagtcctccgtgcgcaagcgccgagtggtcatcgtggaccccgagacgggcaaggagatgtcagtgtacgaggcctaccgcaagggcctgattgaccaccagacgtacctggagctgtccgagcaggagtgcgagtgggaggagatcaccatctcctcctcggacggcgtggtcaagtccatgatcatcgaccgccgctccgggcgccagtacgacatcgatgatgccatcgccaagaacctcatcgaccgctcggcactggaccagtaccgcgccggcacgctctccatcaccgagttcgccgacatgctctcgggcaacgccggtggtttccgctcccgttcctcctcggtgggatcctcctcctcctaccccatcagccccgccgtctccaggacccagctggcctcctggtcagaccccactgaggagacgggccccgtggctggcatcctggacacggagacgctggagaaggtgtccatcaccgaggccatgcaccggaacctggtggataacatcacggggcagcggctgctggaggcgcaggcctgcaccgggggcatcatcgaccccagcaccggtgagcgcttccctgtcaccgacgccgtcaacaagggcctggtggacaagatcatggtggaccgcatcaacctggcccagaaggccttctgcggcttcgaggacccacgcaccaagaccaagatgtcggccgcccaggccctgaagaagggctggctctactacgaggccggccagcgcttcctggaggtgcagtacctgaccggcggcttgatcgagcccgacacgccgggccgcgtgcccctggacgaggccctgcagcgcggcacggtggacgcccgcaccgcacagaagctgcgtgacgtgggcgcctactccaagtacctcacctgccctaagaccaagctcaagatctcctataaggacgcgctggaccgcagcatggtggaggagggcacggggctgcggctgctggaggctgccgcgcagtccaccaagggctactacagcccctacagcgtcagcggctccggctctaccgctggctcccgcaccggctcgcgcaccggctcccgggccggctcccgccgcggcagctttgacgccaccggctccggcttctccatgaccttctcttcatcctcctactcctcctcgggctacggccgccgctacgcctcggggtcctcggcctccctggggggccctgagtctgccgtggcctgaggctgcctgcgcccaccccgctctgcatgcggcccagcccggctcccaccgaggcgcgggggccgttttcaacgcttaaaggtgtcttcctcccaagtggtgcctaaagtttaaccaaaaagaccagactaatatattaatatatatctgctgtccagacagcctgtatcttgggggacagggctggcccagccctgctggccgcctcaccccctcgggtctcctcactcccttctacctgccactcacacagccaggtgccttggagggtcccaagctgggccccagcccaccctcctgtcttcccagggtagcccgcctgccagtcctagctgcacagggcagctgggcccaaccctgtctgtagagggccctggtgtttctagcactggcctgcacggtgggccttgctggggacggggggccccagtcagcctctctcccagtctacccagagaagccccttccccatgggaagacgaggccctcgggcccagcccccacagtgctgtctgatctgtgctttccagctcaccccccacactcactcctgagacccctggcctccggcgtcagcctccagcctctgttcccctagtaagtgccttccatgtcggcctctaaccccaggccccgaggacccagacccagtggggaggcggacgttccagccggcatggctgggaactgcagacctgtcctcctggtgggtccaggggcccctccagcttgtggagccccacactggggtgccgcctgcccgtctctctcccatggagccccagccccctttgggcccagggacaccagccaggctctgtgctgaccctcctgttgcacccagccctggtctcagcagcgaccacccctgcctccaccctctgagctttgcatgttccactaaccccgggcgggtggcaggtggaggtgtcaggctgctggcgcctctgcaagggcagaacactaacctgaccgtgggcggggccttgcggtatccgcccccaataaaagcaattccaacctt

SEQ ID NO: 753 - protein, 4515 aa, Homo sapiens
MKIVPDERDRVQKKTFTKWVNKHLIKAQRHISDLYEDLRDGHNLISLLEVLSGDSLPREKGRMRFHKLQNVQIALDYLRHRQVKLVNIRNDDIADGNPKLTLGLIWTIILHFQISDIQVSGQSEDMTAKEKLLLWSQRMVEGYQGLRCDNFTSSWRDGRLFNAIIHRHKPLLIDMNKVYRQTNLENLDQAFSVAERDLGVTRLLDPEDVDVPQPDEKSIITYVSSLYDAMPRVPDVQDGVRANELQLRWQEYRELVLLLLQWMRHHTAAFEERRFPSSFEEIEILWSQFLKFKEMELPAKEADKNRSKGIYQSLEGAVQAGQLKVPPGYHPLDVEKEWGKLHVAILEREKQLRSEFERLECLQRIVTKLQMEAGLCEEQLNQADALLQSDVRLLAAGKVPQRAGEVERDLDKADSMIRLLFNDVQTLKDGRHPQGEQMYRRVYRLHERLVAIRTEYNLRLKAGVAAPATQVAQVTLQSVQRRPELEDSTLRYLQDLLAWVEENQHRVDGAEWGVDLPSVEAQLGSHRGLHQSIEEFRAKIERARSDEGQLSPATRGAYRDCLGRLDLQYAKLLNSSKARLRSLESLHSFVAAATKELMWLNEKEEEEVGFDWSDRNTNMTAKKESYSALMRELELKEKKIKELQNAGDRLLREDHPARPTVESFQAALQTQWSWMLQLCCCIEAHLKENAAYFQFFSDVREAEGQLQKLQEALRRKYSCDRSATVTRLEDLLQDAQDEKEQLNEYKGHLSGLAKRAKAVVQLKPRHPAHPMRGRLPLLAVCDYKQVEVTVHKGDECQLVGPAQPSHWKVLSSSGSEAAVPSVCFLVPPPNQEAQEAVTRLEAQHQALVTLWHQLHVDMKSLLAWQSLRRDVQLIRSWSLATFRTLKPEEQRQALHSLELHYQAFLRDSQDAGGFGPEDRLMAEREYGSCSHHYQQLLQSLEQGAQEESRCQRCISELKDIRLQLEACETRTVHRLRLPLDKEPARECAQRIAEQQKAQAEVEGLGKGVARLSAEAEKVLALPEPSPAAPTLRSELELTLGKLEQVRSLSAIYLEKLKTISLVIRGTQGAEEVLRAHEEQLKEAQAVPATLPELEATKASLKKLRAQAEAQQPTFDALRDELRGAQEVGERLQQRHGERDVEVERWRERVAQLLERWQAVLAQTDVRQRELEQLGRQLRYYRESADPLGAWLQDARRRQEQIQAMPLADSQAVREQLRQEQALLEEIERHGEKVEECQRFAKQYINAIKDYELQLVTYKAQLEPVASPAKKPKVQSGSESVIQEYVDLRTHYSELTTLTSQYIKFISETLRRMEEEERLAEQQRAEERERLAEVEAALEKQRQLAEAHAQAKAQAEREAKELQQRMQEEVVRREEAAVDAQQQKRSIQEELQQLRQSSEAEIQAKARQAEAAERSRLRIEEEIRVVRLQLEATERQRGGAEGELQALRARAEEAEAQKRQAQEEAERLRRQVQDESQRKRQAEVELASRVKAEAEAAREKQRALQALEELRLQAEEAERRLRQAEVERARQVQVALETAQRSAEAELQSKRASFAEKTAQLERSLQEEHVAVAQLREEAERRAQQQAEAERAREEAERELERWQLKANEALRLRLQAEEVAQQKSLAQAEAEKQKEEAEREARRRGKAEEQAVRQRELAEQELEKQRQLAEGTAQQRLAAEQELIRLRAETEQGEQQRQLLEEELARLQREAAAATQKRQELEAELAKVRAEMEVLLASKARAEEESRSTSEKSKQRLEAEAGRFRELAEEAARLRALAEEAKRQRQLAEEDAARQRAEAERVLAEKLAAIGEATRLKTEAEIALKEKEAENERLRRLAEDEAFQRRRLEEQAAQHKADIEERLAQLRKASDSELERQKGLVEDTLRQRRQVEEEILALKASFEKAAAGKAELELELGRIRSNAEDTLRSKEQAELEAARQRQLAAEEERRRREAEERVQKSLAAEEEAARQRKAALEEVERLKAKVEEARRLRERAEQESARQLQLAQEAAQKRLQAEEKAHAFAVQQKEQELQQTLQQEQSVLDQLRGEAEAARRAAEEAEEARVQAEREAAQSRRQVEEAERLKQSAEEQAQARAQAQAAAEKLRKEAEQEAARRAQAEQAALRQKQAADAEMEKHKKFAEQTLRQKAQVEQELTTLRLQLEETDHQKNLLDEELQRLKAEATEAARQRSQVEEELFSVRVQMEELSKLKARIEAENRALILRDKDNTQRFLQEEAEKMKQVAEEAARLSVAAQEAARLRQLAEEDLAQQRALAEKMLKEKMQAVQEATRLKAEAELLQQQKELAQEQARRLQEDKEQMAQQLAEETQGFQRTLEAERQRQLEMSAEAERLKLRVAEMSRAQARAEEDAQRFRKQAEEIGEKLHRTELATQEKVTLVQTLEIQRQQSDHDAERLREAIAELEREKEKLQQEAKLLQLKSEEMQTVQQEQLLQETQALQQSFLSEKDSLLQRERFIEQEKAKLEQLFQDEVAKAQQLREEQQRQQQQMEQERQRLVASMEEARRRQHEAEEGVRRKQEELQQLEQQRRQQEELLAEENQRLREQLQLLEEQHRAALAHSEEVTASQVAATKTLPNGRDALDGPAAEAEPEHSFDGLRRKVSAQRLQEAGILSAEELQRLAQGHTTVDELARREDVRHYLQGRSSIAGLLLKATNEKLSVYAALQRQLLSPGTALILLEAQAASGFLLDPVRNRRLTVNEAVKEGVVGPELHHKLLSAERAVTGYKDPYTGQQISLFQAMQKGLIVREHGIRLLEAQIATGGVIDPVHSHRVPVDVAYRRGYFDEEMNRVLADPSDDTKGFFDPNTHENLTYLQLLERCVEDPETGLCLLPLTDKAAKGGELVYTDSEARDVFEKATVSAPFGKFQGKTVTIWEIINSEYFTAEQRRDLLRQFRTGRITVEKIIKIIITVVEEQEQKGRLCFEGLRSLVPAAELLESRVIDRELYQQLQRGERSVRDVAEVDTVRRALRGANVIAGVWLEEAGQKLSIYNALKKDLLPSDMAVALLEAQAGTGHIIDPATSARLTVDEAVRAGLVGPEFHEKLLSAEKAVTGYRDPYTGQSVSLFQALKKGLIPREQGLRLLDAQLSTGGIVDPSKSHRVPLDVACARGCLDEETSRALSAPRADAKAYSDPSTGEPATYGELQQRCRPDQLTGLSLLPLSEKAARARQEELYSELQARETFEKTPVEVPVGGFKGRTVTVWELISSEYFTAEQRQELLRQFRTGKVTVEKVIKILITIVEEVETLRQERLSFSGLRAPVPASELLASGVLSRAQFEQLKDGKTTVKDLSELGSVRTLLQGSGCLAGIYLEDTKEKVSIYEAMRRGLLRATTAALLLEAQAATGFLVDPVRNQRLYVHEAVKAGVVGPELHEQLLSAEKAVTGYRDPYSGSTISLFQAMQKGLVLRQHGIRLLEAQIATGGIIDPVHSHRVPVDVAYQRGYFSEEMNRVLADPSDDTKGFFDPNTHENLTYRQLLERCVEDPETGLRLLPLKGAEKAEVVETTQVYTEEETRRAFEETQIDIPGGGSHGGSTMSLWEVMQSDLIPEEQRAQLMADFQAGRVTKERMIIIIIEIIEKTEIIRQQGLASYDYVRRRLTAEDLFEARIISLETYNLLREGTRSLREALEAESAWCYLYGTGSVAGVYLPGSRQTLSIYQALKKGLLSAEVARLLLEAQAATGFLLDPVKGERLTVDEAVRKGLVGPELHDRLLSAERAVTGYRDPYTEQTISLFQAMKKELIPTEEALRLLDAQLATGGIVDPRLGFHLPLEVAYQRGYLNKDTHDQLSEPSEVRSYVDPSTDERLSYTQLLRRCRRDDGTGQLLLPLSDARKLTFRGLRKQITMEELVRSQVMDEATALQLREGLTSIEEVTKNLQKFLEGTSCIAGVFVDATKERLSVYQAMKKGIIRPGTAFELLEAQAATGYVIDPIKGLKLTVEEAVRMGIVGPEFKDKLLSAERAVTGYKDPYSGKLISLFQAMKKGLILKDHGIRLLEAQIATGGIIDPEESHRLPVEVAYKRGLFDEEMNEILTDPSDDTKGFFDPNTEENLTYLQLMERCITDPQTGLCLLPLKEKKRERKTSSKSSVRKRRVVIVDPETGKEMSVYEAYRKGLIDHQTYLELSEQECEWEEITISSSDGVVKSMIIDRRSGRQYDIDDAIAKNLIDRSALDQYRAGTLSITEFADMLSGNAGGFRSRSSSVGSSSSYPISPAVSRTQLASWSDPTEETGPVAGILDTETLEKVSITEAMHRNLVDNITGQRLLEAQACTGGIIDPSTGERFPVTDAVNKGLVDKIMVDRINLAQKAFCGFEDPRTKTKMSAAQALKKGWLYYEAGQRFLEVQYLTGGLIEPDTPGRVPLDEALQRGTVDARTAQKLRDVGAYSKYLTCPKTKLKISYKDALDRSMVEEGTGLRLLEAAAQSTKGYYSPYSVSGSGSTAGSRTGSRTGSRAGSRRGSFDATGSGFSMTFSSSSYSSSGYGRRYASGSSASLGGPESAVA

SEQ ID NO: 754 - DNA, 14675 bp, Homo sapiens
ggcggctatggagccctcgggcagcctgtttccctccctggtggttgtgggtcacgttgtcaccctggccgctgtgtggcactggcgcaggggacgtcggtgggcgcaggacgagcaagatgagcgggatcgtgtgcagaagaaaaccttcaccaagtgggtcaacaagcacctcatcaaggcccagaggcacatcagtgacctgtatgaagacctccgcgatggccacaacctcatctccctgctggaggtcctctcgggggacagcctgccccgggagaaggggaggatgcgtttccacaagctgcagaatgtccagattgccctggactacctccggcaccgccaggtgaagctggtgaacatcaggaatgatgacatcgctgacggcaaccccaagctgacccttggcctcatctggacaatcattctgcacttccagatctcagatatccaggtgagtgggcagtcggaggacatgacggccaaggagaagctgctgctgtggtcgcagcgaatggtggaggggtaccagggcctgcgatgcgacaacttcacctccagctggagagacggccgcctcttcaatgccatcatccaccggcacaagcccctgctcatcgacatgaacaaggtgtaccggcagaccaacctggagaacctggaccaggccttctctgtggcggagcgggacctgggagtgacgcggctcctggaccctgaggacgtggatgtccctcagcccgacgagaagtccatcatcacctacgtctcgtcgctgtatgacgccatgccccgcgtgccggacgtgcaggatggggtgagggccaacgagctgcagctgcgctggcaggagtaccgggagctggtgctgctgctgcttcagtggatgcgacaccacacggccgcctttgaggaacgcaggttcccctccagcttcgaggagattgagatcctgtggtctcagttcctgaagtttaaggagatggagctaccagccaaggaggccgacaagaacaggtccaagggcatctaccaatccctggagggagcggtgcaagcaggccagctcaaggtgccccctggctaccacccgctggatgtggagaaggagtggggcaagctgcacgtggccatcctggagcgggagaagcagctccgcagcgagtttgagaggctggagtgtcttcagcgcatcgtgaccaagctgcagatggaggcggggctgtgtgaggagcagctgaaccaggccgacgccctgctgcagtcggatgtccggctgctggctgcaggcaaagtgccacagcgggcgggggaggtggaacgggacttggacaaggcggatagcatgatccggctgctcttcaacgacgtgcagaccctcaaggatggacggcacccgcagggcgagcagatgtaccgcagggtgtaccgtctgcacgagcgcctggtagccatccgcaccgagtacaacctacggctgaaggcaggcgtggcggcccctgcaacccaggtggcccaggtgactctgcagagtgtgcagaggcgccccgagctggaggactccactctgcgctacctgcaggacctgctggcctgggtggaggagaaccagcaccgtgtggatggcgctgagtggggtgtggacctgcccagcgtggaggcgcagctgggcagccaccgaggcctgcaccagtccatcgaagaattccgggccaagatcgagcgggcacggagtgacgagggccagctctcccccgccacccggggtgcctaccgtgactgcctgggtcggctggacctgcagtacgccaagctgctgaactcctccaaggcccgcctcaggtccctggagagcttgcacagctttgtggcagccgccactaaggagctaatgtggctgaatgagaaggaggaggaggaggtgggcttcgactggagcgaccgcaacaccaacatgaccgccaagaaggagagctactcggcgctgatgcgggagctggagctgaaggagaagaagatcaaggagctccaaaatgctggggaccggctgctgcgggaggaccacccggcccggcccacggtggagtccttccaggcggccctgcagacgcagtggagctggatgctacagctgtgctgctgtatcgaggcacacctgaaggagaacgctgcctactttcagttcttctcagatgtgcgggaggccgaggggcagttgcagaagctgcaggaggcactgcgtaggaaatacagttgtgatcgctccgccaccgtcacccggctggaggacctgctgcaggatgcccaggacgagaaggaacagctgaacgagtacaagggccacctctcaggcctggccaagcgggccaaggccgtcgtgcagctgaagccccgccacccagcccaccccatgcggggccgcctgcccctgctggccgtgtgcgactataagcaggtggaggtgactgtgcacaagggtgacgagtgccagctggtgggccctgcacagccgtcccactggaaggtgctcagcagctccggcagcgaggccgccgtgccctccgtgtgcttcctggtgcccccgcccaaccaggaggcccaggaggccgtcaccaggctggaggcccagcaccaggccctggtcacgctgtggcaccagttgcacgtggacatgaagagccttctggcctggcagagccttcgccgcgacgtgcagctcatccgctcctggtccctggccacgttccgcaccctgaagccagaggagcagcgccaagccctgcacagcctggagctgcactaccaggccttcctgcgggacagccaggacgcgggcggcttcggacccgaggaccggctgatggctgagcgcgagtacggctcctgcagccaccactaccagcagctgctgcagagcctggaacagggtgcacaggaagagtctcgctgccagcgctgcatctccgagctcaaagacatccggctgcagctggaggcctgtgagacgcgcaccgtgcaccgcctgcggctgccgctggacaaagagccggcacgggagtgtgcccagcgcatcgccgagcagcagaaggcacaggcagaggtggaggggctgggcaagggggtcgcccggctctctgccgaggccgagaaggtcttggccctaccagagccatcgcctgcggcccccacgctgcgctcggagctggagctgacgctgggcaagctggagcaggtccgcagcctgtctgccatctacctggagaagctcaagaccatcagcctggtgatccgcggcacgcagggggccgaggaggtgctcagggcccacgaggagcagctcaaggaggcccaggccgtgccggccaccctcccggagctcgaggccaccaaggcctctctgaagaagctgcgggcccaggccgaggcacagcagcccacgttcgacgccctgcgggatgagctgcggggggcacaggaggtgggggagcgactgcagcagcggcacggggagcgggacgtggaggtggagcgctggcgggagcgggtcgcccagttgcttgagcgctggcaggctgtgctggcccagaccgacgtgcggcagcgcgagctcgagcaactgggccgccagctgcgttactaccgcgagagtgcagaccccttgggcgcctggctgcaggacgccaggcggcggcaggagcagatccaggccatgccgctggccgacagccaggctgtgcgggagcagctgcggcaggagcaggccctgctggaggagatcgagcgccacggcgagaaggtcgaggagtgccagaggtttgcgaaacagtacatcaacgccatcaaggactatgaactccagctggtgacgtacaaggcgcagcttgagccggtggcctccccggccaagaagcccaaggtccagtcgggatcagagagtgtcatccaggagtacgtggacctgcgtacgcactacagcgagctgaccacactgacgagccagtacatcaagttcatcagcgagactctgcggcgcatggaggaggaggagaggctggctgagcagcagcgggcagaggagcgcgagcggctggccgaggtggaggccgcgctggagaagcagcggcagctggccgaggcgcacgcccaggcaaaggcacaggcggagcgggaggcgaaggagctgcagcagcgcatgcaggaggaggtggtgcggcgggaggaggcggcggtggacgcgcagcagcagaagcgcagcattcaggaggagctgcagcagctgcggcagagctcggaggcggagatccaggccaaggcccggcaggcagaggcggctgagcgcagccggctgcgcatcgaggaggagatccgcgtggtgcgcctgcagttggaggccaccgagcgccagcgtggcggggctgagggggagctgcaggcactgcgtgcacgggcggaggaggctgaggcacaaaagcgacaggcgcaggaggaggccgagcgcttgcggaggcaggtgcaggacgagagccagcgtaagcggcaggcggaggtggagctggcctcgcgcgtgaaggccgaggccgaggcggcgcgcgagaagcagcgggccctgcaggccctggaggagctgcggctgcaggcggaggaggcggagcggcgcctgcggcaggccgaggtggagcgagcgcggcaggtacaggtggccctggagacggcgcagcgcagtgcagaggcggagctgcagagcaaacgcgcctccttcgccgagaagacggcacagctggagcgctccctgcaggaggaacacgtggctgtggcacagctgcgggaggaggctgagcggcgggcacagcagcaggccgaggccgagcgggcgcgcgaggaggcagagcgggagctggagcgctggcagctcaaggccaacgaggcgctacggctgcggctgcaggcggaggaggtggcgcagcagaagagcctggcgcaggccgaggctgagaagcagaaggaggaggcggagcgcgaggcgcggcggcgcggcaaggcggaggagcaggccgtccggcagcgggagctggctgaacaagagctggagaagcagcggcagctggcggaaggcaccgcgcagcagcgcctggccgcggagcaggagttgatccggctgcgggccgagacggagcagggggagcagcagcggcagctgctggaggaggagctggcccggctgcagcgtgaggcggctgcagccacgcagaaacggcaggagctggaagccgagctggccaaggtgcgggccgagatggaggtgctgctggccagcaaggcgagggctgaggaggagtcgcgctccaccagcgagaagtccaagcagaggctggaggccgaggccggccggttccgcgagctggccgaggaggccgcccgcctgcgtgccctggcggaagaggccaagcggcagcggcagctggccgaggaagacgcggcgcggcagcgggccgaggcggagcgggtgcttgcggagaagctggccgccatcggcgaggccacgcggctcaagacggaggcggagatcgcgctcaaggagaaggaggcggagaacgagcgcctgcggcggctggcggaggacgaggccttccagcggcggcggctggaggagcaggccgcgcaacacaaggctgacatcgaggagcgcctggcccagctgcgcaaggcatcggacagcgagctggagcggcagaaggggctggtggaggacacgctgaggcagcggcggcaggtggaggaggagatcctggcgctgaaggcgagcttcgagaaggcggccgctggcaaggcggagctggagctggagctgggacgcatccgcagcaacgcggaggacacgctgcgcagcaaggagcaggccgagctggaggctgcgaggcagcggcagctggcggcggaggaggagcggcggcgccgtgaggctgaggagcgcgtgcagaagagcctggcggccgaggaggaggccgcacggcagcggaaggcggcgctggaggaagtcgagcggctgaaagccaaggtggaggaggcgcggcgcctgcgggagcgagcggagcaggagtcggcgcggcagctgcagctggcccaggaggccgcccagaagcggctgcaggcggaagagaaggcacacgccttcgcggtgcagcagaaggagcaggagctacagcagacgctgcagcaggagcagagcgtgctggaccagctgcgcggcgaggcggaggcggcccggcgggcggctgaggaggcggaggaggcccgggtgcaggcggagcgtgaggcggcgcagtcccggcggcaggtggaagaggccgagcggctgaagcagtcggcagaggagcaggcacaggcccgggctcaggcacaggcggctgcagagaagctgcgcaaggaggccgagcaagaggcggcgcggcgggcacaggcggagcaggcggccctgcggcagaagcaggcagctgacgcggagatggagaagcataagaaattcgccgagcagacgctgcggcagaaggcgcaggtggagcaggagctgacaacactgcggctgcagctggaggagaccgaccaccagaagaacctgctggacgaggagctgcagcggctgaaggcggaggccacggaggccgcacgccagcgcagccaggtggaggaggagctcttctcggtgcgcgtgcagatggaggagctgagcaagctcaaggcacgcatcgaggctgagaaccgcgcactcatcttgcgtgacaaggacaatacgcagcgcttcctgcaggaggaggctgagaagatgaagcaggtggcggaggaggccgcgcggctgagtgtggcggcccaagaggctgcgcgactgcggcagctggcagaggaggacctggcacagcagcgggccttggcagagaagatgctcaaggagaagatgcaggcggtgcaggaggccacgcgactcaaggctgaggcggaactgctgcagcagcagaaggagcttgcgcaggagcaggcgcggcggctgcaggaggacaaggagcagatggcgcagcagctggcggaggagacgcagggcttccagcggacgctggaggccgagcggcagcggcagctggagatgagcgctgaggctgagcgcctcaagctgcgtgtggccgagatgagccgagcccaggcccgcgctgaggaggacgcccagcgcttccggaagcaggcggaggagatcggtgagaagctgcaccgcacggagctcgccacccaggagaaggtgaccctggtgcagacactggagatccagcgacagcagagtgaccatgatgccgagcgcctgcgggaggccatcgctgagctggagcgtgagaaggagaagctccaacaggaggccaaactgctgcagctcaagtctgaggagatgcagacggtgcagcaggagcagctgctgcaggagacgcaggccctgcagcaaagcttcctctctgaaaaggacagcctgctacagcgggagcgcttcatcgagcaggagaaggccaagctggagcagctcttccaggacgaggtggccaaggcacagcagctgcgtgaggagcagcagcggcagcagcagcagatggagcaggaacggcagcggctggtggccagcatggaggaggcgcggcggcggcagcatgaggccgaggagggcgtgcggcgcaagcaggaggagctgcagcagctggagcagcagcggcggcagcaggaggagctgctggctgaggagaaccagaggctgcgtgagcagctgcagctcctggaggagcagcaccgggccgcgctggcgcactcagaggaggtcactgcctcgcaggtggctgccacaaagaccctgcccaatggccgggatgcacttgatggccccgcggcagaggcagagccggagcacagcttcgatggcctgcggcggaaggtgtcagctcagaggctgcaggaggccggcatcctgagtgcggaggagctgcagcggttggcgcagggccacaccacggtggacgagctcgcacggcgggaagacgtgcgccactacctgcagggccgcagcagtatcgcagggctgttgctgaaggccaccaatgagaagctgagtgtttacgccgccctgcagaggcagctgctgagtcccggcacggccctcatcctgctggaggcgcaggcggcctcaggcttcctgctggaccctgtgcggaaccggcggctgaccgtcaacgaggctgtgaaggagggtgtggtgggccccgagctgcaccacaagctgctgtcggccgagcgcgccgtcactggctacaaggacccctacactggccagcagatctctctcttccaagccatgcagaagggcctcatcgtccgggagcacggcatccgcctgctggaggcccagatcgccacgggcggcgttatcgaccccgtgcacagccaccgcgtgcccgtggacgtggcctaccggcgcggctacttcgacgaggagatgaaccgcgtcctggcggaccccagcgacgacaccaagggcttctttgaccccaacacgcacgagaacctcacgtacctgcagctactggagcgctgcgtggaggaccccgagacgggcctgtgccttctgccactcacggataaggctgccaagggcggggagctggtctacactgactccgaggcccgggacgtctttgagaaggccaccgtgtctgcgccgttcggcaagttccagggcaagacggtgaccatttgggagatcatcaactcggaatacttcacggcagagcagcggcgggacctgctgcggcagttccgcacgggccggatcacagtggagaagatcatcaagatcatcatcacggtggtggaggagcaggagcagaagggccggctttgctttgagggcctgcgcagcctggtgccagccgccgagctgctggagagcagggtcatcgaccgcgagctctaccagcagctgcagcgaggtgagcgctctgtgcgagacgtagccgaggtggacactgtgcggcgggctctccggggtgccaacgtcatcgcgggtgtatggctggaggaggcggggcagaagctgagtatctacaatgccctgaagaaagacctgctgccatccgacatggccgtggccctgttggaagcccaggccggcaccgggcacatcatcgaccccgccaccagcgcccggctgaccgtggacgaggcagtgcgtgctggcctggtgggccccgagtttcatgagaagctgctatcagccgagaaggctgtgacagggtacagggacccctacacagggcagagcgtctccctgttccaggccctgaagaagggcctcattccccgggagcagggcctgcgcctgttggacgcccagctgtccacgggcggcatcgtggaccccagcaagagccaccgcgtgcccctggatgtcgcctgcgcccgaggctgcctggatgaggagaccagcagggccctgtcggcaccaagggccgacgccaaggcctacagtgaccccagcacaggggagccggccacctacggcgagctccagcagcggtgccggcccgaccagctgaccgggctgagcctgctgccgctctcagaaaaggctgctcgggcccggcaggaggagctctactcagagctgcaggcccgtgagacctttgaaaagaccccggttgaggtccccgtgggtggcttcaagggcaggacggtgacggtgtgggagctcatcagctctgagtacttcactgcggagcagcggcaggagctgttgcgtcagttccgcacgggcaaggtcaccgtggagaaggtcatcaagattctcattaccatcgtggaggaggtggagaccctgcggcaggagaggctgtccttcagcggcctccgtgcccctgtgccagccagcgagctcctggcttccggggtcctcagcagagcccagtttgagcagctcaaggacggcaagacgacggtcaaggacctttcggagctgggctccgtgcggacgctgctgcagggcagtggctgcctcgccggcatctacctggaggacaccaaggagaaggtgtccatctacgaggccatgcgccggggcctgctgagagccacaacggctgcgctcctgctggaggcgcaggcggccactggcttcctggtggaccccgtgcggaaccagcgcctgtatgtccacgaggccgtgaaggcgggcgtggtgggccccgagcttcacgagcagctgctgtctgccgagaaggccgtcaccggctacagagacccctactcgggcagcaccatctccctcttccaggccatgcagaagggcctggttctccggcagcacggcatccgcctgctggaggcccagatcgccacgggcggcatcatcgaccccgtgcacagccaccgcgtgcctgtggacgtggcctaccagcgcggctacttcagtgaggagatgaaccgcgtcctggcggaccccagcgacgacaccaagggcttctttgaccccaacacgcatgagaacctcacgtacaggcagctgctggagcggtgcgtggaggaccccgagacgggcttgcgccttctgccactgaaaggggcggagaaggctgaggtggtggagaccacgcaggtgtacactgaggaggagacaagaagggcatttgaagagacacagatcgacattcccggcggcggcagccacggcggctccaccatgtccctgtgggaggtgatgcagtcggacctgatccccgaggagcagcgggcccagctgatggctgacttccaggccggccgggtgaccaaggaacgcatgatcatcatcatcatcgagatcattgagaagacagagatcatccgccagcagggtctggcctcctacgactacgtgcgccgccgcctcacggctgaggacctgttcgaggctcggatcatctctctcgagacctacaacctgctccgggagggcaccaggagcctccgtgaggctctcgaggcggagtccgcctggtgctacctctatggcacgggctccgtggctggtgtctacctgcccggttccaggcagacactgagcatctaccaggctctcaagaaagggctgctgagtgccgaggtggcccgcctgctgctggaggcacaggcagccacaggcttcctgctggacccggtgaagggggagcggctgactgtggatgaggctgtgcggaagggcctcgtggggcccgagctgcacgaccgcctgctctcggctgagcgggcggtcaccggctaccgtgacccctacaccgagcagaccatctcgctcttccaggccatgaagaaggagctgatccctactgaggaggccctgcggctgctggatgcccagctggccaccggcggcatcgtggacccccgcctgggcttccaccttcccctggaggtggcttaccagcgtggctacctcaacaaggacacgcacgaccagctgtcagagcccagcgaggtgcgcagctacgtggacccgtccaccgacgagcgcctcagctacacgcagctgctcaggcggtgccgtcgtgacgacggcaccggccagctgctcctgccactgtcggacgcccgcaagctgaccttccgtggcctgcggaagcagatcaccatggaggagctggtgcgctcgcaggtcatggacgaggccacggcgctgcagctgcgggagggcctgacctccatcgaggaggtcaccaagaacttgcagaagttcctggaaggcaccagctgcatcgctggtgtcttcgtggacgccaccaaggaacggctctcggtgtaccaggccatgaagaagggcatcatccgccccggcacagcctttgagctcctggaggcgcaggcggccaccggttacgtcatcgaccccatcaagggactgaagctgacggtggaggaggctgtgcgtatgggcattgtgggccccgagttcaaggacaagctgctgtcggccgagcgcgccgtcactgggtacaaggacccctactctgggaagctcatctccctcttccaggccatgaagaagggcctgatcctgaaggaccatggcatccgcctgctggaggcccagatcgccacgggcggcatcatcgaccctgaggagagccaccggctgcccgtggaggtggcctacaagcgcggcctcttcgatgaggagatgaacgagatcctgaccgacccctcggacgacaccaagggcttctttgaccctaacacggaggagaacctcacctacctgcagctgatggagcgttgtatcactgacccccagacgggcctgtgtctcttgccgctgaaggagaagaagcgggagcggaagacgtcctccaagtcctccgtgcgcaagcgccgagtggtcatcgtggaccccgagacgggcaaggagatgtcagtgtacgaggcctaccgcaagggcctgattgaccaccagacgtacctggagctgtccgagcaggagtgcgagtgggaggagatcaccatctcctcctcggacggcgtggtcaagtccatgatcatcgaccgccgctccgggcgccagtacgacatcgatgatgccatcgccaagaacctcatcgaccgctcggcactggaccagtaccgcgccggcacgctctccatcaccgagttcgccgacatgctctcgggcaacgccggtggtttccgctcccgttcctcctcggtgggatcctcctcctcctaccccatcagccccgccgtctccaggacccagctggcctcctggtcagaccccactgaggagacgggccccgtggctggcatcctggacacggagacgctggagaaggtgtccatcaccgaggccatgcaccggaacctggtggataacatcacggggcagcggctgctggaggcgcaggcctgcaccgggggcatcatcgaccccagcaccggtgagcgcttccctgtcaccgacgccgtcaacaagggcctggtggacaagatcatggtggaccgcatcaacctggcccagaaggccttctgcggcttcgaggacccacgcaccaagaccaagatgtcggccgcccaggccctgaagaagggctggctctactacgaggccggccagcgcttcctggaggtgcagtacctgaccggcggcttgatcgagcccgacacgccgggccgcgtgcccctggacgaggccctgcagcgcggcacggtggacgcccgcaccgcacagaagctgcgtgacgtgggcgcctactccaagtacctcacctgccctaagaccaagctcaagatctcctataaggacgcgctggaccgcagcatggtggaggagggcacggggctgcggctgctggaggctgccgcgcagtccaccaagggctactacagcccctacagcgtcagcggctccggctctaccgctggctcccgcaccggctcgcgcaccggctcccgggccggctcccgccgcggcagctttgacgccaccggctccggcttctccatgaccttctcttcatcctcctactcctcctcgggctacggccgccgctacgcctcggggtcctcggcctccctggggggccctgagtctgccgtggcctgaggctgcctgcgcccaccccgctctgcatgcggcccagcccggctcccaccgaggcgcgggggccgttttcaacgcttaaaggtgtcttcctcccaagtggtgcctaaagtttaaccaaaaagaccagactaatatattaatatatatctgctgtccagacagcctgtatcttgggggacagggctggcccagccctgctggccgcctcaccccctcgggtctcctcactcccttctacctgccactcacacagccaggtgccttggagggtcccaagctgggccccagcccaccctcctgtcttcccagggtagcccgcctgccagtcctagctgcacagggcagctgggcccaaccctgtctgtagagggccctggtgtttctagcactggcctgcacggtgggccttgctggggacggggggccccagtcagcctctctcccagtctacccagagaagccccttccccatgggaagacgaggccctcgggcccagcccccacagtgctgtctgatctgtgctttccagctcaccccccacactcactcctgagacccctggcctccggcgtcagcctccagcctctgttcccctagtaagtgccttccatgtcggcctctaaccccaggccccgaggacccagacccagtggggaggcggacgttccagccggcatggctgggaactgcagacctgtcctcctggtgggtccaggggcccctccagcttgtggagccccacactggggtgccgcctgcccgtctctctcccatggagccccagccccctttgggcccagggacaccagccaggctctgtgctgaccctcctgttgcacccagccctggtctcagcagcgaccacccctgcctccaccctctgagctttgcatgttccactaaccccgggcgggtggcaggtggaggtgtcaggctgctggcgcctctgcaagggcagaacactaacctgaccgtgggcggggccttgcggtatccgcccccaataaaagcaattccaacctt

SEQ ID NO: 755 - protein, 4547 aa, Homo sapiens
MEPSGSLFPSLVVVGHVVTLAAVWHWRRGRRWAQDEQDERDRVQKKTFTKWVNKHLIKAQRHISDLYEDLRDGHNLISLLEVLSGDSLPREKGRMRFHKLQNVQIALDYLRHRQVKLVNIRNDDIADGNPKLTLGLIWTIILHFQISDIQVSGQSEDMTAKEKLLLWSQRMVEGYQGLRCDNFTSSWRDGRLFNAIIHRHKPLLIDMNKVYRQTNLENLDQAFSVAERDLGVTRLLDPEDVDVPQPDEKSIITYVSSLYDAMPRVPDVQDGVRANELQLRWQEYRELVLLLLQWMRHHTAAFEERRFPSSFEEIEILWSQFLKFKEMELPAKEADKNRSKGIYQSLEGAVQAGQLKVPPGYHPLDVEKEWGKLHVAILEREKQLRSEFERLECLQRIVTKLQMEAGLCEEQLNQADALLQSDVRLLAAGKVPQRAGEVERDLDKADSMIRLLFNDVQTLKDGRHPQGEQMYRRVYRLHERLVAIRTEYNLRLKAGVAAPATQVAQVTLQSVQRRPELEDSTLRYLQDLLAWVEENQHRVDGAEWGVDLPSVEAQLGSHRGLHQSIEEFRAKIERARSDEGQLSPATRGAYRDCLGRLDLQYAKLLNSSKARLRSLESLHSFVAAATKELMWLNEKEEEEVGFDWSDRNTNMTAKKESYSALMRELELKEKKIKELQNAGDRLLREDHPARPTVESFQAALQTQWSWMLQLCCCIEAHLKENAAYFQFFSDVREAEGQLQKLQEALRRKYSCDRSATVTRLEDLLQDAQDEKEQLNEYKGHLSGLAKRAKAVVQLKPRHPAHPMRGRLPLLAVCDYKQVEVTVHKGDECQLVGPAQPSHWKVLSSSGSEAAVPSVCFLVPPPNQEAQEAVTRLEAQHQALVTLWHQLHVDMKSLLAWQSLRRDVQLIRSWSLATFRTLKPEEQRQALHSLELHYQAFLRDSQDAGGFGPEDRLMAEREYGSCSHHYQQLLQSLEQGAQEESRCQRCISELKDIRLQLEACETRTVHRLRLPLDKEPARECAQRIAEQQKAQAEVEGLGKGVARLSAEAEKVLALPEPSPAAPTLRSELELTLGKLEQVRSLSAIYLEKLKTISLVIRGTQGAEEVLRAHEEQLKEAQAVPATLPELEATKASLKKLRAQAEAQQPTFDALRDELRGAQEVGERLQQRHGERDVEVERWRERVAQLLERWQAVLAQTDVRQRELEQLGRQLRYYRESADPLGAWLQDARRRQEQIQAMPLADSQAVREQLRQEQALLEEIERHGEKVEECQRFAKQYINAIKDYELQLVTYKAQLEPVASPAKKPKVQSGSESVIQEYVDLRTHYSELTTLTSQYIKFISETLRRMEEEERLAEQQRAEERERLAEVEAALEKQRQLAEAHAQAKAQAEREAKELQQRMQEEVVRREEAAVDAQQQKRSIQEELQQLRQSSEAEIQAKARQAEAAERSRLRIEEEIRVVRLQLEATERQRGGAEGELQALRARAEEAEAQKRQAQEEAERLRRQVQDESQRKRQAEVELASRVKAEAEAAREKQRALQALEELRLQAEEAERRLRQAEVERARQVQVALETAQRSAEAELQSKRASFAEKTAQLERSLQEEHVAVAQLREEAERRAQQQAEAERAREEAERELERWQLKANEALRLRLQAEEVAQQKSLAQAEAEKQKEEAEREARRRGKAEEQAVRQRELAEQELEKQRQLAEGTAQQRLAAEQELIRLRAETEQGEQQRQLLEEELARLQREAAAATQKRQELEAELAKVRAEMEVLLASKARAEEESRSTSEKSKQRLEAEAGRFRELAEEAARLRALAEEAKRQRQLAEEDAARQRAEAERVLAEKLAAIGEATRLKTEAEIALKEKEAENERLRRLAEDEAFQRRRLEEQAAQHKADIEERLAQLRKASDSELERQKGLVEDTLRQRRQVEEEILALKASFEKAAAGKAELELELGRIRSNAEDTLRSKEQAELEAARQRQLAAEEERRRREAEERVQKSLAAEEEAARQRKAALEEVERLKAKVEEARRLRERAEQESARQLQLAQEAAQKRLQAEEKAHAFAVQQKEQELQQTLQQEQSVLDQLRGEAEAARRAAEEAEEARVQAEREAAQSRRQVEEAERLKQSAEEQAQARAQAQAAAEKLRKEAEQEAARRAQAEQAALRQKQAADAEMEKHKKFAEQTLRQKAQVEQELTTLRLQLEETDHQKNLLDEELQRLKAEATEAARQRSQVEEELFSVRVQMEELSKLKARIEAENRALILRDKDNTQRFLQEEAEKMKQVAEEAARLSVAAQEAARLRQLAEEDLAQQRALAEKMLKEKMQAVQEATRLKAEAELLQQQKELAQEQARRLQEDKEQMAQQLAEETQGFQRTLEAERQRQLEMSAEAERLKLRVAEMSRAQARAEEDAQRFRKQAEEIGEKLHRTELATQEKVTLVQTLEIQRQQSDHDAERLREAIAELEREKEKLQQEAKLLQLKSEEMQTVQQEQLLQETQALQQSFLSEKDSLLQRERFIEQEKAKLEQLFQDEVAKAQQLREEQQRQQQQMEQERQRLVASMEEARRRQHEAEEGVRRKQEELQQLEQQRRQQEELLAEENQRLREQLQLLEEQHRAALAHSEEVTASQVAATKTLPNGRDALDGPAAEAEPEHSFDGLRRKVSAQRLQEAGILSAEELQRLAQGHTTVDELARREDVRHYLQGRSSIAGLLLKATNEKLSVYAALQRQLLSPGTALILLEAQAASGFLLDPVRNRRLTVNEAVKEGVVGPELHHKLLSAERAVTGYKDPYTGQQISLFQAMQKGLIVREHGIRLLEAQIATGGVIDPVHSHRVPVDVAYRRGYFDEEMNRVLADPSDDTKGFFDPNTHENLTYLQLLERCVEDPETGLCLLPLTDKAAKGGELVYTDSEARDVFEKATVSAPFGKFQGKTVTIWEIINSEYFTAEQRRDLLRQFRTGRITVEKIIKIIITVVEEQEQKGRLCFEGLRSLVPAAELLESRVIDRELYQQLQRGERSVRDVAEVDTVRRALRGANVIAGVWLEEAGQKLSIYNALKKDLLPSDMAVALLEAQAGTGHIIDPATSARLTVDEAVRAGLVGPEFHEKLLSAEKAVTGYRDPYTGQSVSLFQALKKGLIPREQGLRLLDAQLSTGGIVDPSKSHRVPLDVACARGCLDEETSRALSAPRADAKAYSDPSTGEPATYGELQQRCRPDQLTGLSLLPLSEKAARARQEELYSELQARETFEKTPVEVPVGGFKGRTVTVWELISSEYFTAEQRQELLRQFRTGKVTVEKVIKILITIVEEVETLRQERLSFSGLRAPVPASELLASGVLSRAQFEQLKDGKTTVKDLSELGSVRTLLQGSGCLAGIYLEDTKEKVSIYEAMRRGLLRATTAALLLEAQAATGFLVDPVRNQRLYVHEAVKAGVVGPELHEQLLSAEKAVTGYRDPYSGSTISLFQAMQKGLVLRQHGIRLLEAQIATGGIIDPVHSHRVPVDVAYQRGYFSEEMNRVLADPSDDTKGFFDPNTHENLTYRQLLERCVEDPETGLRLLPLKGAEKAEVVETTQVYTEEETRRAFEETQIDIPGGGSHGGSTMSLWEVMQSDLIPEEQRAQLMADFQAGRVTKERMIIIIIEIIEKTEIIRQQGLASYDYVRRRLTAEDLFEARIISLETYNLLREGTRSLREALEAESAWCYLYGTGSVAGVYLPGSRQTLSIYQALKKGLLSAEVARLLLEAQAATGFLLDPVKGERLTVDEAVRKGLVGPELHDRLLSAERAVTGYRDPYTEQTISLFQAMKKELIPTEEALRLLDAQLATGGIVDPRLGFHLPLEVAYQRGYLNKDTHDQLSEPSEVRSYVDPSTDERLSYTQLLRRCRRDDGTGQLLLPLSDARKLTFRGLRKQITMEELVRSQVMDEATALQLREGLTSIEEVTKNLQKFLEGTSCIAGVFVDATKERLSVYQAMKKGIIRPGTAFELLEAQAATGYVIDPIKGLKLTVEEAVRMGIVGPEFKDKLLSAERAVTGYKDPYSGKLISLFQAMKKGLILKDHGIRLLEAQIATGGIIDPEESHRLPVEVAYKRGLFDEEMNEILTDPSDDTKGFFDPNTEENLTYLQLMERCITDPQTGLCLLPLKEKKRERKTSSKSSVRKRRVVIVDPETGKEMSVYEAYRKGLIDHQTYLELSEQECEWEEITISSSDGVVKSMIIDRRSGRQYDIDDAIAKNLIDRSALDQYRAGTLSITEFADMLSGNAGGFRSRSSSVGSSSSYPISPAVSRTQLASWSDPTEETGPVAGILDTETLEKVSITEAMHRNLVDNITGQRLLEAQACTGGIIDPSTGERFPVTDAVNKGLVDKIMVDRINLAQKAFCGFEDPRTKTKMSAAQALKKGWLYYEAGQRFLEVQYLTGGLIEPDTPGRVPLDEALQRGTVDARTAQKLRDVGAYSKYLTCPKTKLKISYKDALDRSMVEEGTGLRLLEAAAQSTKGYYSPYSVSGSGSTAGSRTGSRTGSRAGSRRGSFDATGSGFSMTFSSSSYSSSGYGRRYASGSSASLGGPESAVA

SEQ ID NO: 756 - DNA, 14689 bp, Homo sapiens
gtggccggcatgtcgggggcggggggcgcctttgcctcgccgagggaggtcttgctggagcggccgtgctggctggacgggggctgcgagccggcccgcaggggctacctctaccagcagctgtgctgcgtagatgagcgggatcgtgtgcagaagaaaaccttcaccaagtgggtcaacaagcacctcatcaaggcccagaggcacatcagtgacctgtatgaagacctccgcgatggccacaacctcatctccctgctggaggtcctctcgggggacagcctgccccgggagaaggggaggatgcgtttccacaagctgcagaatgtccagattgccctggactacctccggcaccgccaggtgaagctggtgaacatcaggaatgatgacatcgctgacggcaaccccaagctgacccttggcctcatctggacaatcattctgcacttccagatctcagatatccaggtgagtgggcagtcggaggacatgacggccaaggagaagctgctgctgtggtcgcagcgaatggtggaggggtaccagggcctgcgatgcgacaacttcacctccagctggagagacggccgcctcttcaatgccatcatccaccggcacaagcccctgctcatcgacatgaacaaggtgtaccggcagaccaacctggagaacctggaccaggccttctctgtggcggagcgggacctgggagtgacgcggctcctggaccctgaggacgtggatgtccctcagcccgacgagaagtccatcatcacctacgtctcgtcgctgtatgacgccatgccccgcgtgccggacgtgcaggatggggtgagggccaacgagctgcagctgcgctggcaggagtaccgggagctggtgctgctgctgcttcagtggatgcgacaccacacggccgcctttgaggaacgcaggttcccctccagcttcgaggagattgagatcctgtggtctcagttcctgaagtttaaggagatggagctaccagccaaggaggccgacaagaacaggtccaagggcatctaccaatccctggagggagcggtgcaagcaggccagctcaaggtgccccctggctaccacccgctggatgtggagaaggagtggggcaagctgcacgtggccatcctggagcgggagaagcagctccgcagcgagtttgagaggctggagtgtcttcagcgcatcgtgaccaagctgcagatggaggcggggctgtgtgaggagcagctgaaccaggccgacgccctgctgcagtcggatgtccggctgctggctgcaggcaaagtgccacagcgggcgggggaggtggaacgggacttggacaaggcggatagcatgatccggctgctcttcaacgacgtgcagaccctcaaggatggacggcacccgcagggcgagcagatgtaccgcagggtgtaccgtctgcacgagcgcctggtagccatccgcaccgagtacaacctacggctgaaggcaggcgtggcggcccctgcaacccaggtggcccaggtgactctgcagagtgtgcagaggcgccccgagctggaggactccactctgcgctacctgcaggacctgctggcctgggtggaggagaaccagcaccgtgtggatggcgctgagtggggtgtggacctgcccagcgtggaggcgcagctgggcagccaccgaggcctgcaccagtccatcgaagaattccgggccaagatcgagcgggcacggagtgacgagggccagctctcccccgccacccggggtgcctaccgtgactgcctgggtcggctggacctgcagtacgccaagctgctgaactcctccaaggcccgcctcaggtccctggagagcttgcacagctttgtggcagccgccactaaggagctaatgtggctgaatgagaaggaggaggaggaggtgggcttcgactggagcgaccgcaacaccaacatgaccgccaagaaggagagctactcggcgctgatgcgggagctggagctgaaggagaagaagatcaaggagctccaaaatgctggggaccggctgctgcgggaggaccacccggcccggcccacggtggagtccttccaggcggccctgcagacgcagtggagctggatgctacagctgtgctgctgtatcgaggcacacctgaaggagaacgctgcctactttcagttcttctcagatgtgcgggaggccgaggggcagttgcagaagctgcaggaggcactgcgtaggaaatacagttgtgatcgctccgccaccgtcacccggctggaggacctgctgcaggatgcccaggacgagaaggaacagctgaacgagtacaagggccacctctcaggcctggccaagcgggccaaggccgtcgtgcagctgaagccccgccacccagcccaccccatgcggggccgcctgcccctgctggccgtgtgcgactataagcaggtggaggtgactgtgcacaagggtgacgagtgccagctggtgggccctgcacagccgtcccactggaaggtgctcagcagctccggcagcgaggccgccgtgccctccgtgtgcttcctggtgcccccgcccaaccaggaggcccaggaggccgtcaccaggctggaggcccagcaccaggccctggtcacgctgtggcaccagttgcacgtggacatgaagagccttctggcctggcagagccttcgccgcgacgtgcagctcatccgctcctggtccctggccacgttccgcaccctgaagccagaggagcagcgccaagccctgcacagcctggagctgcactaccaggccttcctgcgggacagccaggacgcgggcggcttcggacccgaggaccggctgatggctgagcgcgagtacggctcctgcagccaccactaccagcagctgctgcagagcctggaacagggtgcacaggaagagtctcgctgccagcgctgcatctccgagctcaaagacatccggctgcagctggaggcctgtgagacgcgcaccgtgcaccgcctgcggctgccgctggacaaagagccggcacgggagtgtgcccagcgcatcgccgagcagcagaaggcacaggcagaggtggaggggctgggcaagggggtcgcccggctctctgccgaggccgagaaggtcttggccctaccagagccatcgcctgcggcccccacgctgcgctcggagctggagctgacgctgggcaagctggagcaggtccgcagcctgtctgccatctacctggagaagctcaagaccatcagcctggtgatccgcggcacgcagggggccgaggaggtgctcagggcccacgaggagcagctcaaggaggcccaggccgtgccggccaccctcccggagctcgaggccaccaaggcctctctgaagaagctgcgggcccaggccgaggcacagcagcccacgttcgacgccctgcgggatgagctgcggggggcacaggaggtgggggagcgactgcagcagcggcacggggagcgggacgtggaggtggagcgctggcgggagcgggtcgcccagttgcttgagcgctggcaggctgtgctggcccagaccgacgtgcggcagcgcgagctcgagcaactgggccgccagctgcgttactaccgcgagagtgcagaccccttgggcgcctggctgcaggacgccaggcggcggcaggagcagatccaggccatgccgctggccgacagccaggctgtgcgggagcagctgcggcaggagcaggccctgctggaggagatcgagcgccacggcgagaaggtcgaggagtgccagaggtttgcgaaacagtacatcaacgccatcaaggactatgaactccagctggtgacgtacaaggcgcagcttgagccggtggcctccccggccaagaagcccaaggtccagtcgggatcagagagtgtcatccaggagtacgtggacctgcgtacgcactacagcgagctgaccacactgacgagccagtacatcaagttcatcagcgagactctgcggcgcatggaggaggaggagaggctggctgagcagcagcgggcagaggagcgcgagcggctggccgaggtggaggccgcgctggagaagcagcggcagctggccgaggcgcacgcccaggcaaaggcacaggcggagcgggaggcgaaggagctgcagcagcgcatgcaggaggaggtggtgcggcgggaggaggcggcggtggacgcgcagcagcagaagcgcagcattcaggaggagctgcagcagctgcggcagagctcggaggcggagatccaggccaaggcccggcaggcagaggcggctgagcgcagccggctgcgcatcgaggaggagatccgcgtggtgcgcctgcagttggaggccaccgagcgccagcgtggcggggctgagggggagctgcaggcactgcgtgcacgggcggaggaggctgaggcacaaaagcgacaggcgcaggaggaggccgagcgcttgcggaggcaggtgcaggacgagagccagcgtaagcggcaggcggaggtggagctggcctcgcgcgtgaaggccgaggccgaggcggcgcgcgagaagcagcgggccctgcaggccctggaggagctgcggctgcaggcggaggaggcggagcggcgcctgcggcaggccgaggtggagcgagcgcggcaggtacaggtggccctggagacggcgcagcgcagtgcagaggcggagctgcagagcaaacgcgcctccttcgccgagaagacggcacagctggagcgctccctgcaggaggaacacgtggctgtggcacagctgcgggaggaggctgagcggcgggcacagcagcaggccgaggccgagcgggcgcgcgaggaggcagagcgggagctggagcgctggcagctcaaggccaacgaggcgctacggctgcggctgcaggcggaggaggtggcgcagcagaagagcctggcgcaggccgaggctgagaagcagaaggaggaggcggagcgcgaggcgcggcggcgcggcaaggcggaggagcaggccgtccggcagcgggagctggctgaacaagagctggagaagcagcggcagctggcggaaggcaccgcgcagcagcgcctggccgcggagcaggagttgatccggctgcgggccgagacggagcagggggagcagcagcggcagctgctggaggaggagctggcccggctgcagcgtgaggcggctgcagccacgcagaaacggcaggagctggaagccgagctggccaaggtgcgggccgagatggaggtgctgctggccagcaaggcgagggctgaggaggagtcgcgctccaccagcgagaagtccaagcagaggctggaggccgaggccggccggttccgcgagctggccgaggaggccgcccgcctgcgtgccctggcggaagaggccaagcggcagcggcagctggccgaggaagacgcggcgcggcagcgggccgaggcggagcgggtgcttgcggagaagctggccgccatcggcgaggccacgcggctcaagacggaggcggagatcgcgctcaaggagaaggaggcggagaacgagcgcctgcggcggctggcggaggacgaggccttccagcggcggcggctggaggagcaggccgcgcaacacaaggctgacatcgaggagcgcctggcccagctgcgcaaggcatcggacagcgagctggagcggcagaaggggctggtggaggacacgctgaggcagcggcggcaggtggaggaggagatcctggcgctgaaggcgagcttcgagaaggcggccgctggcaaggcggagctggagctggagctgggacgcatccgcagcaacgcggaggacacgctgcgcagcaaggagcaggccgagctggaggctgcgaggcagcggcagctggcggcggaggaggagcggcggcgccgtgaggctgaggagcgcgtgcagaagagcctggcggccgaggaggaggccgcacggcagcggaaggcggcgctggaggaagtcgagcggctgaaagccaaggtggaggaggcgcggcgcctgcgggagcgagcggagcaggagtcggcgcggcagctgcagctggcccaggaggccgcccagaagcggctgcaggcggaagagaaggcacacgccttcgcggtgcagcagaaggagcaggagctacagcagacgctgcagcaggagcagagcgtgctggaccagctgcgcggcgaggcggaggcggcccggcgggcggctgaggaggcggaggaggcccgggtgcaggcggagcgtgaggcggcgcagtcccggcggcaggtggaagaggccgagcggctgaagcagtcggcagaggagcaggcacaggcccgggctcaggcacaggcggctgcagagaagctgcgcaaggaggccgagcaagaggcggcgcggcgggcacaggcggagcaggcggccctgcggcagaagcaggcagctgacgcggagatggagaagcataagaaattcgccgagcagacgctgcggcagaaggcgcaggtggagcaggagctgacaacactgcggctgcagctggaggagaccgaccaccagaagaacctgctggacgaggagctgcagcggctgaaggcggaggccacggaggccgcacgccagcgcagccaggtggaggaggagctcttctcggtgcgcgtgcagatggaggagctgagcaagctcaaggcacgcatcgaggctgagaaccgcgcactcatcttgcgtgacaaggacaatacgcagcgcttcctgcaggaggaggctgagaagatgaagcaggtggcggaggaggccgcgcggctgagtgtggcggcccaagaggctgcgcgactgcggcagctggcagaggaggacctggcacagcagcgggccttggcagagaagatgctcaaggagaagatgcaggcggtgcaggaggccacgcgactcaaggctgaggcggaactgctgcagcagcagaaggagcttgcgcaggagcaggcgcggcggctgcaggaggacaaggagcagatggcgcagcagctggcggaggagacgcagggcttccagcggacgctggaggccgagcggcagcggcagctggagatgagcgctgaggctgagcgcctcaagctgcgtgtggccgagatgagccgagcccaggcccgcgctgaggaggacgcccagcgcttccggaagcaggcggaggagatcggtgagaagctgcaccgcacggagctcgccacccaggagaaggtgaccctggtgcagacactggagatccagcgacagcagagtgaccatgatgccgagcgcctgcgggaggccatcgctgagctggagcgtgagaaggagaagctccaacaggaggccaaactgctgcagctcaagtctgaggagatgcagacggtgcagcaggagcagctgctgcaggagacgcaggccctgcagcaaagcttcctctctgaaaaggacagcctgctacagcgggagcgcttcatcgagcaggagaaggccaagctggagcagctcttccaggacgaggtggccaaggcacagcagctgcgtgaggagcagcagcggcagcagcagcagatggagcaggaacggcagcggctggtggccagcatggaggaggcgcggcggcggcagcatgaggccgaggagggcgtgcggcgcaagcaggaggagctgcagcagctggagcagcagcggcggcagcaggaggagctgctggctgaggagaaccagaggctgcgtgagcagctgcagctcctggaggagcagcaccgggccgcgctggcgcactcagaggaggtcactgcctcgcaggtggctgccacaaagaccctgcccaatggccgggatgcacttgatggccccgcggcagaggcagagccggagcacagcttcgatggcctgcggcggaaggtgtcagctcagaggctgcaggaggccggcatcctgagtgcggaggagctgcagcggttggcgcagggccacaccacggtggacgagctcgcacggcgggaagacgtgcgccactacctgcagggccgcagcagtatcgcagggctgttgctgaaggccaccaatgagaagctgagtgtttacgccgccctgcagaggcagctgctgagtcccggcacggccctcatcctgctggaggcgcaggcggcctcaggcttcctgctggaccctgtgcggaaccggcggctgaccgtcaacgaggctgtgaaggagggtgtggtgggccccgagctgcaccacaagctgctgtcggccgagcgcgccgtcactggctacaaggacccctacactggccagcagatctctctcttccaagccatgcagaagggcctcatcgtccgggagcacggcatccgcctgctggaggcccagatcgccacgggcggcgttatcgaccccgtgcacagccaccgcgtgcccgtggacgtggcctaccggcgcggctacttcgacgaggagatgaaccgcgtcctggcggaccccagcgacgacaccaagggcttctttgaccccaacacgcacgagaacctcacgtacctgcagctactggagcgctgcgtggaggaccccgagacgggcctgtgccttctgccactcacggataaggctgccaagggcggggagctggtctacactgactccgaggcccgggacgtctttgagaaggccaccgtgtctgcgccgttcggcaagttccagggcaagacggtgaccatttgggagatcatcaactcggaatacttcacggcagagcagcggcgggacctgctgcggcagttccgcacgggccggatcacagtggagaagatcatcaagatcatcatcacggtggtggaggagcaggagcagaagggccggctttgctttgagggcctgcgcagcctggtgccagccgccgagctgctggagagcagggtcatcgaccgcgagctctaccagcagctgcagcgaggtgagcgctctgtgcgagacgtagccgaggtggacactgtgcggcgggctctccggggtgccaacgtcatcgcgggtgtatggctggaggaggcggggcagaagctgagtatctacaatgccctgaagaaagacctgctgccatccgacatggccgtggccctgttggaagcccaggccggcaccgggcacatcatcgaccccgccaccagcgcccggctgaccgtggacgaggcagtgcgtgctggcctggtgggccccgagtttcatgagaagctgctatcagccgagaaggctgtgacagggtacagggacccctacacagggcagagcgtctccctgttccaggccctgaagaagggcctcattccccgggagcagggcctgcgcctgttggacgcccagctgtccacgggcggcatcgtggaccccagcaagagccaccgcgtgcccctggatgtcgcctgcgcccgaggctgcctggatgaggagaccagcagggccctgtcggcaccaagggccgacgccaaggcctacagtgaccccagcacaggggagccggccacctacggcgagctccagcagcggtgccggcccgaccagctgaccgggctgagcctgctgccgctctcagaaaaggctgctcgggcccggcaggaggagctctactcagagctgcaggcccgtgagacctttgaaaagaccccggttgaggtccccgtgggtggcttcaagggcaggacggtgacggtgtgggagctcatcagctctgagtacttcactgcggagcagcggcaggagctgttgcgtcagttccgcacgggcaaggtcaccgtggagaaggtcatcaagattctcattaccatcgtggaggaggtggagaccctgcggcaggagaggctgtccttcagcggcctccgtgcccctgtgccagccagcgagctcctggcttccggggtcctcagcagagcccagtttgagcagctcaaggacggcaagacgacggtcaaggacctttcggagctgggctccgtgcggacgctgctgcagggcagtggctgcctcgccggcatctacctggaggacaccaaggagaaggtgtccatctacgaggccatgcgccggggcctgctgagagccacaacggctgcgctcctgctggaggcgcaggcggccactggcttcctggtggaccccgtgcggaaccagcgcctgtatgtccacgaggccgtgaaggcgggcgtggtgggccccgagcttcacgagcagctgctgtctgccgagaaggccgtcaccggctacagagacccctactcgggcagcaccatctccctcttccaggccatgcagaagggcctggttctccggcagcacggcatccgcctgctggaggcccagatcgccacgggcggcatcatcgaccccgtgcacagccaccgcgtgcctgtggacgtggcctaccagcgcggctacttcagtgaggagatgaaccgcgtcctggcggaccccagcgacgacaccaagggcttctttgaccccaacacgcatgagaacctcacgtacaggcagctgctggagcggtgcgtggaggaccccgagacgggcttgcgccttctgccactgaaaggggcggagaaggctgaggtggtggagaccacgcaggtgtacactgaggaggagacaagaagggcatttgaagagacacagatcgacattcccggcggcggcagccacggcggctccaccatgtccctgtgggaggtgatgcagtcggacctgatccccgaggagcagcgggcccagctgatggctgacttccaggccggccgggtgaccaaggaacgcatgatcatcatcatcatcgagatcattgagaagacagagatcatccgccagcagggtctggcctcctacgactacgtgcgccgccgcctcacggctgaggacctgttcgaggctcggatcatctctctcgagacctacaacctgctccgggagggcaccaggagcctccgtgaggctctcgaggcggagtccgcctggtgctacctctatggcacgggctccgtggctggtgtctacctgcccggttccaggcagacactgagcatctaccaggctctcaagaaagggctgctgagtgccgaggtggcccgcctgctgctggaggcacaggcagccacaggcttcctgctggacccggtgaagggggagcggctgactgtggatgaggctgtgcggaagggcctcgtggggcccgagctgcacgaccgcctgctctcggctgagcgggcggtcaccggctaccgtgacccctacaccgagcagaccatctcgctcttccaggccatgaagaaggagctgatccctactgaggaggccctgcggctgctggatgcccagctggccaccggcggcatcgtggacccccgcctgggcttccaccttcccctggaggtggcttaccagcgtggctacctcaacaaggacacgcacgaccagctgtcagagcccagcgaggtgcgcagctacgtggacccgtccaccgacgagcgcctcagctacacgcagctgctcaggcggtgccgtcgtgacgacggcaccggccagctgctcctgccactgtcggacgcccgcaagctgaccttccgtggcctgcggaagcagatcaccatggaggagctggtgcgctcgcaggtcatggacgaggccacggcgctgcagctgcgggagggcctgacctccatcgaggaggtcaccaagaacttgcagaagttcctggaaggcaccagctgcatcgctggtgtcttcgtggacgccaccaaggaacggctctcggtgtaccaggccatgaagaagggcatcatccgccccggcacagcctttgagctcctggaggcgcaggcggccaccggttacgtcatcgaccccatcaagggactgaagctgacggtggaggaggctgtgcgtatgggcattgtgggccccgagttcaaggacaagctgctgtcggccgagcgcgccgtcactgggtacaaggacccctactctgggaagctcatctccctcttccaggccatgaagaagggcctgatcctgaaggaccatggcatccgcctgctggaggcccagatcgccacgggcggcatcatcgaccctgaggagagccaccggctgcccgtggaggtggcctacaagcgcggcctcttcgatgaggagatgaacgagatcctgaccgacccctcggacgacaccaagggcttctttgaccctaacacggaggagaacctcacctacctgcagctgatggagcgttgtatcactgacccccagacgggcctgtgtctcttgccgctgaaggagaagaagcgggagcggaagacgtcctccaagtcctccgtgcgcaagcgccgagtggtcatcgtggaccccgagacgggcaaggagatgtcagtgtacgaggcctaccgcaagggcctgattgaccaccagacgtacctggagctgtccgagcaggagtgcgagtgggaggagatcaccatctcctcctcggacggcgtggtcaagtccatgatcatcgaccgccgctccgggcgccagtacgacatcgatgatgccatcgccaagaacctcatcgaccgctcggcactggaccagtaccgcgccggcacgctctccatcaccgagttcgccgacatgctctcgggcaacgccggtggtttccgctcccgttcctcctcggtgggatcctcctcctcctaccccatcagccccgccgtctccaggacccagctggcctcctggtcagaccccactgaggagacgggccccgtggctggcatcctggacacggagacgctggagaaggtgtccatcaccgaggccatgcaccggaacctggtggataacatcacggggcagcggctgctggaggcgcaggcctgcaccgggggcatcatcgaccccagcaccggtgagcgcttccctgtcaccgacgccgtcaacaagggcctggtggacaagatcatggtggaccgcatcaacctggcccagaaggccttctgcggcttcgaggacccacgcaccaagaccaagatgtcggccgcccaggccctgaagaagggctggctctactacgaggccggccagcgcttcctggaggtgcagtacctgaccggcggcttgatcgagcccgacacgccgggccgcgtgcccctggacgaggccctgcagcgcggcacggtggacgcccgcaccgcacagaagctgcgtgacgtgggcgcctactccaagtacctcacctgccctaagaccaagctcaagatctcctataaggacgcgctggaccgcagcatggtggaggagggcacggggctgcggctgctggaggctgccgcgcagtccaccaagggctactacagcccctacagcgtcagcggctccggctctaccgctggctcccgcaccggctcgcgcaccggctcccgggccggctcccgccgcggcagctttgacgccaccggctccggcttctccatgaccttctcttcatcctcctactcctcctcgggctacggccgccgctacgcctcggggtcctcggcctccctggggggccctgagtctgccgtggcctgaggctgcctgcgcccaccccgctctgcatgcggcccagcccggctcccaccgaggcgcgggggccgttttcaacgcttaaaggtgtcttcctcccaagtggtgcctaaagtttaaccaaaaagaccagactaatatattaatatatatctgctgtccagacagcctgtatcttgggggacagggctggcccagccctgctggccgcctcaccccctcgggtctcctcactcccttctacctgccactcacacagccaggtgccttggagggtcccaagctgggccccagcccaccctcctgtcttcccagggtagcccgcctgccagtcctagctgcacagggcagctgggcccaaccctgtctgtagagggccctggtgtttctagcactggcctgcacggtgggccttgctggggacggggggccccagtcagcctctctcccagtctacccagagaagccccttccccatgggaagacgaggccctcgggcccagcccccacagtgctgtctgatctgtgctttccagctcaccccccacactcactcctgagacccctggcctccggcgtcagcctccagcctctgttcccctagtaagtgccttccatgtcggcctctaaccccaggccccgaggacccagacccagtggggaggcggacgttccagccggcatggctgggaactgcagacctgtcctcctggtgggtccaggggcccctccagcttgtggagccccacactggggtgccgcctgcccgtctctctcccatggagccccagccccctttgggcccagggacaccagccaggctctgtgctgaccctcctgttgcacccagccctggtctcagcagcgaccacccctgcctccaccctctgagctttgcatgttccactaaccccgggcgggtggcaggtggaggtgtcaggctgctggcgcctctgcaagggcagaacactaacctgaccgtgggcggggccttgcggtatccgcccccaataaaagcaattccaacctt

SEQ ID NO: 757 - protein, 4551 aa, Homo sapiens
MSGAGGAFASPREVLLERPCWLDGGCEPARRGYLYQQLCCVDERDRVQKKTFTKWVNKHLIKAQRHISDLYEDLRDGHNLISLLEVLSGDSLPREKGRMRFHKLQNVQIALDYLRHRQVKLVNIRNDDIADGNPKLTLGLIWTIILHFQISDIQVSGQSEDMTAKEKLLLWSQRMVEGYQGLRCDNFTSSWRDGRLFNAIIHRHKPLLIDMNKVYRQTNLENLDQAFSVAERDLGVTRLLDPEDVDVPQPDEKSIITYVSSLYDAMPRVPDVQDGVRANELQLRWQEYRELVLLLLQWMRHHTAAFEERRFPSSFEEIEILWSQFLKFKEMELPAKEADKNRSKGIYQSLEGAVQAGQLKVPPGYHPLDVEKEWGKLHVAILEREKQLRSEFERLECLQRIVTKLQMEAGLCEEQLNQADALLQSDVRLLAAGKVPQRAGEVERDLDKADSMIRLLFNDVQTLKDGRHPQGEQMYRRVYRLHERLVAIRTEYNLRLKAGVAAPATQVAQVTLQSVQRRPELEDSTLRYLQDLLAWVEENQHRVDGAEWGVDLPSVEAQLGSHRGLHQSIEEFRAKIERARSDEGQLSPATRGAYRDCLGRLDLQYAKLLNSSKARLRSLESLHSFVAAATKELMWLNEKEEEEVGFDWSDRNTNMTAKKESYSALMRELELKEKKIKELQNAGDRLLREDHPARPTVESFQAALQTQWSWMLQLCCCIEAHLKENAAYFQFFSDVREAEGQLQKLQEALRRKYSCDRSATVTRLEDLLQDAQDEKEQLNEYKGHLSGLAKRAKAVVQLKPRHPAHPMRGRLPLLAVCDYKQVEVTVHKGDECQLVGPAQPSHWKVLSSSGSEAAVPSVCFLVPPPNQEAQEAVTRLEAQHQALVTLWHQLHVDMKSLLAWQSLRRDVQLIRSWSLATFRTLKPEEQRQALHSLELHYQAFLRDSQDAGGFGPEDRLMAEREYGSCSHHYQQLLQSLEQGAQEESRCQRCISELKDIRLQLEACETRTVHRLRLPLDKEPARECAQRIAEQQKAQAEVEGLGKGVARLSAEAEKVLALPEPSPAAPTLRSELELTLGKLEQVRSLSAIYLEKLKTISLVIRGTQGAEEVLRAHEEQLKEAQAVPATLPELEATKASLKKLRAQAEAQQPTFDALRDELRGAQEVGERLQQRHGERDVEVERWRERVAQLLERWQAVLAQTDVRQRELEQLGRQLRYYRESADPLGAWLQDARRRQEQIQAMPLADSQAVREQLRQEQALLEEIERHGEKVEECQRFAKQYINAIKDYELQLVTYKAQLEPVASPAKKPKVQSGSESVIQEYVDLRTHYSELTTLTSQYIKFISETLRRMEEEERLAEQQRAEERERLAEVEAALEKQRQLAEAHAQAKAQAEREAKELQQRMQEEVVRREEAAVDAQQQKRSIQEELQQLRQSSEAEIQAKARQAEAAERSRLRIEEEIRVVRLQLEATERQRGGAEGELQALRARAEEAEAQKRQAQEEAERLRRQVQDESQRKRQAEVELASRVKAEAEAAREKQRALQALEELRLQAEEAERRLRQAEVERARQVQVALETAQRSAEAELQSKRASFAEKTAQLERSLQEEHVAVAQLREEAERRAQQQAEAERAREEAERELERWQLKANEALRLRLQAEEVAQQKSLAQAEAEKQKEEAEREARRRGKAEEQAVRQRELAEQELEKQRQLAEGTAQQRLAAEQELIRLRAETEQGEQQRQLLEEELARLQREAAAATQKRQELEAELAKVRAEMEVLLASKARAEEESRSTSEKSKQRLEAEAGRFRELAEEAARLRALAEEAKRQRQLAEEDAARQRAEAERVLAEKLAAIGEATRLKTEAEIALKEKEAENERLRRLAEDEAFQRRRLEEQAAQHKADIEERLAQLRKASDSELERQKGLVEDTLRQRRQVEEEILALKASFEKAAAGKAELELELGRIRSNAEDTLRSKEQAELEAARQRQLAAEEERRRREAEERVQKSLAAEEEAARQRKAALEEVERLKAKVEEARRLRERAEQESARQLQLAQEAAQKRLQAEEKAHAFAVQQKEQELQQTLQQEQSVLDQLRGEAEAARRAAEEAEEARVQAEREAAQSRRQVEEAERLKQSAEEQAQARAQAQAAAEKLRKEAEQEAARRAQAEQAALRQKQAADAEMEKHKKFAEQTLRQKAQVEQELTTLRLQLEETDHQKNLLDEELQRLKAEATEAARQRSQVEEELFSVRVQMEELSKLKARIEAENRALILRDKDNTQRFLQEEAEKMKQVAEEAARLSVAAQEAARLRQLAEEDLAQQRALAEKMLKEKMQAVQEATRLKAEAELLQQQKELAQEQARRLQEDKEQMAQQLAEETQGFQRTLEAERQRQLEMSAEAERLKLRVAEMSRAQARAEEDAQRFRKQAEEIGEKLHRTELATQEKVTLVQTLEIQRQQSDHDAERLREAIAELEREKEKLQQEAKLLQLKSEEMQTVQQEQLLQETQALQQSFLSEKDSLLQRERFIEQEKAKLEQLFQDEVAKAQQLREEQQRQQQQMEQERQRLVASMEEARRRQHEAEEGVRRKQEELQQLEQQRRQQEELLAEENQRLREQLQLLEEQHRAALAHSEEVTASQVAATKTLPNGRDALDGPAAEAEPEHSFDGLRRKVSAQRLQEAGILSAEELQRLAQGHTTVDELARREDVRHYLQGRSSIAGLLLKATNEKLSVYAALQRQLLSPGTALILLEAQAASGFLLDPVRNRRLTVNEAVKEGVVGPELHHKLLSAERAVTGYKDPYTGQQISLFQAMQKGLIVREHGIRLLEAQIATGGVIDPVHSHRVPVDVAYRRGYFDEEMNRVLADPSDDTKGFFDPNTHENLTYLQLLERCVEDPETGLCLLPLTDKAAKGGELVYTDSEARDVFEKATVSAPFGKFQGKTVTIWEIINSEYFTAEQRRDLLRQFRTGRITVEKIIKIIITVVEEQEQKGRLCFEGLRSLVPAAELLESRVIDRELYQQLQRGERSVRDVAEVDTVRRALRGANVIAGVWLEEAGQKLSIYNALKKDLLPSDMAVALLEAQAGTGHIIDPATSARLTVDEAVRAGLVGPEFHEKLLSAEKAVTGYRDPYTGQSVSLFQALKKGLIPREQGLRLLDAQLSTGGIVDPSKSHRVPLDVACARGCLDEETSRALSAPRADAKAYSDPSTGEPATYGELQQRCRPDQLTGLSLLPLSEKAARARQEELYSELQARETFEKTPVEVPVGGFKGRTVTVWELISSEYFTAEQRQELLRQFRTGKVTVEKVIKILITIVEEVETLRQERLSFSGLRAPVPASELLASGVLSRAQFEQLKDGKTTVKDLSELGSVRTLLQGSGCLAGIYLEDTKEKVSIYEAMRRGLLRATTAALLLEAQAATGFLVDPVRNQRLYVHEAVKAGVVGPELHEQLLSAEKAVTGYRDPYSGSTISLFQAMQKGLVLRQHGIRLLEAQIATGGIIDPVHSHRVPVDVAYQRGYFSEEMNRVLADPSDDTKGFFDPNTHENLTYRQLLERCVEDPETGLRLLPLKGAEKAEVVETTQVYTEEETRRAFEETQIDIPGGGSHGGSTMSLWEVMQSDLIPEEQRAQLMADFQAGRVTKERMIIIIIEIIEKTEIIRQQGLASYDYVRRRLTAEDLFEARIISLETYNLLREGTRSLREALEAESAWCYLYGTGSVAGVYLPGSRQTLSIYQALKKGLLSAEVARLLLEAQAATGFLLDPVKGERLTVDEAVRKGLVGPELHDRLLSAERAVTGYRDPYTEQTISLFQAMKKELIPTEEALRLLDAQLATGGIVDPRLGFHLPLEVAYQRGYLNKDTHDQLSEPSEVRSYVDPSTDERLSYTQLLRRCRRDDGTGQLLLPLSDARKLTFRGLRKQITMEELVRSQVMDEATALQLREGLTSIEEVTKNLQKFLEGTSCIAGVFVDATKERLSVYQAMKKGIIRPGTAFELLEAQAATGYVIDPIKGLKLTVEEAVRMGIVGPEFKDKLLSAERAVTGYKDPYSGKLISLFQAMKKGLILKDHGIRLLEAQIATGGIIDPEESHRLPVEVAYKRGLFDEEMNEILTDPSDDTKGFFDPNTEENLTYLQLMERCITDPQTGLCLLPLKEKKRERKTSSKSSVRKRRVVIVDPETGKEMSVYEAYRKGLIDHQTYLELSEQECEWEEITISSSDGVVKSMIIDRRSGRQYDIDDAIAKNLIDRSALDQYRAGTLSITEFADMLSGNAGGFRSRSSSVGSSSSYPISPAVSRTQLASWSDPTEETGPVAGILDTETLEKVSITEAMHRNLVDNITGQRLLEAQACTGGIIDPSTGERFPVTDAVNKGLVDKIMVDRINLAQKAFCGFEDPRTKTKMSAAQALKKGWLYYEAGQRFLEVQYLTGGLIEPDTPGRVPLDEALQRGTVDARTAQKLRDVGAYSKYLTCPKTKLKISYKDALDRSMVEEGTGLRLLEAAAQSTKGYYSPYSVSGSGSTAGSRTGSRTGSRAGSRRGSFDATGSGFSMTFSSSSYSSSGYGRRYASGSSASLGGPESAVA

SEQ ID NO: 758 - DNA, 14797 bp, Homo sapiens
tgagctgagcctgtgccgagtgagcgtctcgtggggccgccagccttcagctgcctgtgtgccacacggggctgcccagagcaccgtgcctgaggccgagggtccgggcgacgaaggtgtgggggcagcatgtctcagcaccagctccgcgtgccgcagcccgagggcctgggccgaaagagaaccagctcggaggacaacctgtacctggctgtgctcagggcctctgagggcaagaaagatgagcgggatcgtgtgcagaagaaaaccttcaccaagtgggtcaacaagcacctcatcaaggcccagaggcacatcagtgacctgtatgaagacctccgcgatggccacaacctcatctccctgctggaggtcctctcgggggacagcctgccccgggagaaggggaggatgcgtttccacaagctgcagaatgtccagattgccctggactacctccggcaccgccaggtgaagctggtgaacatcaggaatgatgacatcgctgacggcaaccccaagctgacccttggcctcatctggacaatcattctgcacttccagatctcagatatccaggtgagtgggcagtcggaggacatgacggccaaggagaagctgctgctgtggtcgcagcgaatggtggaggggtaccagggcctgcgatgcgacaacttcacctccagctggagagacggccgcctcttcaatgccatcatccaccggcacaagcccctgctcatcgacatgaacaaggtgtaccggcagaccaacctggagaacctggaccaggccttctctgtggcggagcgggacctgggagtgacgcggctcctggaccctgaggacgtggatgtccctcagcccgacgagaagtccatcatcacctacgtctcgtcgctgtatgacgccatgccccgcgtgccggacgtgcaggatggggtgagggccaacgagctgcagctgcgctggcaggagtaccgggagctggtgctgctgctgcttcagtggatgcgacaccacacggccgcctttgaggaacgcaggttcccctccagcttcgaggagattgagatcctgtggtctcagttcctgaagtttaaggagatggagctaccagccaaggaggccgacaagaacaggtccaagggcatctaccaatccctggagggagcggtgcaagcaggccagctcaaggtgccccctggctaccacccgctggatgtggagaaggagtggggcaagctgcacgtggccatcctggagcgggagaagcagctccgcagcgagtttgagaggctggagtgtcttcagcgcatcgtgaccaagctgcagatggaggcggggctgtgtgaggagcagctgaaccaggccgacgccctgctgcagtcggatgtccggctgctggctgcaggcaaagtgccacagcgggcgggggaggtggaacgggacttggacaaggcggatagcatgatccggctgctcttcaacgacgtgcagaccctcaaggatggacggcacccgcagggcgagcagatgtaccgcagggtgtaccgtctgcacgagcgcctggtagccatccgcaccgagtacaacctacggctgaaggcaggcgtggcggcccctgcaacccaggtggcccaggtgactctgcagagtgtgcagaggcgccccgagctggaggactccactctgcgctacctgcaggacctgctggcctgggtggaggagaaccagcaccgtgtggatggcgctgagtggggtgtggacctgcccagcgtggaggcgcagctgggcagccaccgaggcctgcaccagtccatcgaagaattccgggccaagatcgagcgggcacggagtgacgagggccagctctcccccgccacccggggtgcctaccgtgactgcctgggtcggctggacctgcagtacgccaagctgctgaactcctccaaggcccgcctcaggtccctggagagcttgcacagctttgtggcagccgccactaaggagctaatgtggctgaatgagaaggaggaggaggaggtgggcttcgactggagcgaccgcaacaccaacatgaccgccaagaaggagagctactcggcgctgatgcgggagctggagctgaaggagaagaagatcaaggagctccaaaatgctggggaccggctgctgcgggaggaccacccggcccggcccacggtggagtccttccaggcggccctgcagacgcagtggagctggatgctacagctgtgctgctgtatcgaggcacacctgaaggagaacgctgcctactttcagttcttctcagatgtgcgggaggccgaggggcagttgcagaagctgcaggaggcactgcgtaggaaatacagttgtgatcgctccgccaccgtcacccggctggaggacctgctgcaggatgcccaggacgagaaggaacagctgaacgagtacaagggccacctctcaggcctggccaagcgggccaaggccgtcgtgcagctgaagccccgccacccagcccaccccatgcggggccgcctgcccctgctggccgtgtgcgactataagcaggtggaggtgactgtgcacaagggtgacgagtgccagctggtgggccctgcacagccgtcccactggaaggtgctcagcagctccggcagcgaggccgccgtgccctccgtgtgcttcctggtgcccccgcccaaccaggaggcccaggaggccgtcaccaggctggaggcccagcaccaggccctggtcacgctgtggcaccagttgcacgtggacatgaagagccttctggcctggcagagccttcgccgcgacgtgcagctcatccgctcctggtccctggccacgttccgcaccctgaagccagaggagcagcgccaagccctgcacagcctggagctgcactaccaggccttcctgcgggacagccaggacgcgggcggcttcggacccgaggaccggctgatggctgagcgcgagtacggctcctgcagccaccactaccagcagctgctgcagagcctggaacagggtgcacaggaagagtctcgctgccagcgctgcatctccgagctcaaagacatccggctgcagctggaggcctgtgagacgcgcaccgtgcaccgcctgcggctgccgctggacaaagagccggcacgggagtgtgcccagcgcatcgccgagcagcagaaggcacaggcagaggtggaggggctgggcaagggggtcgcccggctctctgccgaggccgagaaggtcttggccctaccagagccatcgcctgcggcccccacgctgcgctcggagctggagctgacgctgggcaagctggagcaggtccgcagcctgtctgccatctacctggagaagctcaagaccatcagcctggtgatccgcggcacgcagggggccgaggaggtgctcagggcccacgaggagcagctcaaggaggcccaggccgtgccggccaccctcccggagctcgaggccaccaaggcctctctgaagaagctgcgggcccaggccgaggcacagcagcccacgttcgacgccctgcgggatgagctgcggggggcacaggaggtgggggagcgactgcagcagcggcacggggagcgggacgtggaggtggagcgctggcgggagcgggtcgcccagttgcttgagcgctggcaggctgtgctggcccagaccgacgtgcggcagcgcgagctcgagcaactgggccgccagctgcgttactaccgcgagagtgcagaccccttgggcgcctggctgcaggacgccaggcggcggcaggagcagatccaggccatgccgctggccgacagccaggctgtgcgggagcagctgcggcaggagcaggccctgctggaggagatcgagcgccacggcgagaaggtcgaggagtgccagaggtttgcgaaacagtacatcaacgccatcaaggactatgaactccagctggtgacgtacaaggcgcagcttgagccggtggcctccccggccaagaagcccaaggtccagtcgggatcagagagtgtcatccaggagtacgtggacctgcgtacgcactacagcgagctgaccacactgacgagccagtacatcaagttcatcagcgagactctgcggcgcatggaggaggaggagaggctggctgagcagcagcgggcagaggagcgcgagcggctggccgaggtggaggccgcgctggagaagcagcggcagctggccgaggcgcacgcccaggcaaaggcacaggcggagcgggaggcgaaggagctgcagcagcgcatgcaggaggaggtggtgcggcgggaggaggcggcggtggacgcgcagcagcagaagcgcagcattcaggaggagctgcagcagctgcggcagagctcggaggcggagatccaggccaaggcccggcaggcagaggcggctgagcgcagccggctgcgcatcgaggaggagatccgcgtggtgcgcctgcagttggaggccaccgagcgccagcgtggcggggctgagggggagctgcaggcactgcgtgcacgggcggaggaggctgaggcacaaaagcgacaggcgcaggaggaggccgagcgcttgcggaggcaggtgcaggacgagagccagcgtaagcggcaggcggaggtggagctggcctcgcgcgtgaaggccgaggccgaggcggcgcgcgagaagcagcgggccctgcaggccctggaggagctgcggctgcaggcggaggaggcggagcggcgcctgcggcaggccgaggtggagcgagcgcggcaggtacaggtggccctggagacggcgcagcgcagtgcagaggcggagctgcagagcaaacgcgcctccttcgccgagaagacggcacagctggagcgctccctgcaggaggaacacgtggctgtggcacagctgcgggaggaggctgagcggcgggcacagcagcaggccgaggccgagcgggcgcgcgaggaggcagagcgggagctggagcgctggcagctcaaggccaacgaggcgctacggctgcggctgcaggcggaggaggtggcgcagcagaagagcctggcgcaggccgaggctgagaagcagaaggaggaggcggagcgcgaggcgcggcggcgcggcaaggcggaggagcaggccgtccggcagcgggagctggctgaacaagagctggagaagcagcggcagctggcggaaggcaccgcgcagcagcgcctggccgcggagcaggagttgatccggctgcgggccgagacggagcagggggagcagcagcggcagctgctggaggaggagctggcccggctgcagcgtgaggcggctgcagccacgcagaaacggcaggagctggaagccgagctggccaaggtgcgggccgagatggaggtgctgctggccagcaaggcgagggctgaggaggagtcgcgctccaccagcgagaagtccaagcagaggctggaggccgaggccggccggttccgcgagctggccgaggaggccgcccgcctgcgtgccctggcggaagaggccaagcggcagcggcagctggccgaggaagacgcggcgcggcagcgggccgaggcggagcgggtgcttgcggagaagctggccgccatcggcgaggccacgcggctcaagacggaggcggagatcgcgctcaaggagaaggaggcggagaacgagcgcctgcggcggctggcggaggacgaggccttccagcggcggcggctggaggagcaggccgcgcaacacaaggctgacatcgaggagcgcctggcccagctgcgcaaggcatcggacagcgagctggagcggcagaaggggctggtggaggacacgctgaggcagcggcggcaggtggaggaggagatcctggcgctgaaggcgagcttcgagaaggcggccgctggcaaggcggagctggagctggagctgggacgcatccgcagcaacgcggaggacacgctgcgcagcaaggagcaggccgagctggaggctgcgaggcagcggcagctggcggcggaggaggagcggcggcgccgtgaggctgaggagcgcgtgcagaagagcctggcggccgaggaggaggccgcacggcagcggaaggcggcgctggaggaagtcgagcggctgaaagccaaggtggaggaggcgcggcgcctgcgggagcgagcggagcaggagtcggcgcggcagctgcagctggcccaggaggccgcccagaagcggctgcaggcggaagagaaggcacacgccttcgcggtgcagcagaaggagcaggagctacagcagacgctgcagcaggagcagagcgtgctggaccagctgcgcggcgaggcggaggcggcccggcgggcggctgaggaggcggaggaggcccgggtgcaggcggagcgtgaggcggcgcagtcccggcggcaggtggaagaggccgagcggctgaagcagtcggcagaggagcaggcacaggcccgggctcaggcacaggcggctgcagagaagctgcgcaaggaggccgagcaagaggcggcgcggcgggcacaggcggagcaggcggccctgcggcagaagcaggcagctgacgcggagatggagaagcataagaaattcgccgagcagacgctgcggcagaaggcgcaggtggagcaggagctgacaacactgcggctgcagctggaggagaccgaccaccagaagaacctgctggacgaggagctgcagcggctgaaggcggaggccacggaggccgcacgccagcgcagccaggtggaggaggagctcttctcggtgcgcgtgcagatggaggagctgagcaagctcaaggcacgcatcgaggctgagaaccgcgcactcatcttgcgtgacaaggacaatacgcagcgcttcctgcaggaggaggctgagaagatgaagcaggtggcggaggaggccgcgcggctgagtgtggcggcccaagaggctgcgcgactgcggcagctggcagaggaggacctggcacagcagcgggccttggcagagaagatgctcaaggagaagatgcaggcggtgcaggaggccacgcgactcaaggctgaggcggaactgctgcagcagcagaaggagcttgcgcaggagcaggcgcggcggctgcaggaggacaaggagcagatggcgcagcagctggcggaggagacgcagggcttccagcggacgctggaggccgagcggcagcggcagctggagatgagcgctgaggctgagcgcctcaagctgcgtgtggccgagatgagccgagcccaggcccgcgctgaggaggacgcccagcgcttccggaagcaggcggaggagatcggtgagaagctgcaccgcacggagctcgccacccaggagaaggtgaccctggtgcagacactggagatccagcgacagcagagtgaccatgatgccgagcgcctgcgggaggccatcgctgagctggagcgtgagaaggagaagctccaacaggaggccaaactgctgcagctcaagtctgaggagatgcagacggtgcagcaggagcagctgctgcaggagacgcaggccctgcagcaaagcttcctctctgaaaaggacagcctgctacagcgggagcgcttcatcgagcaggagaaggccaagctggagcagctcttccaggacgaggtggccaaggcacagcagctgcgtgaggagcagcagcggcagcagcagcagatggagcaggaacggcagcggctggtggccagcatggaggaggcgcggcggcggcagcatgaggccgaggagggcgtgcggcgcaagcaggaggagctgcagcagctggagcagcagcggcggcagcaggaggagctgctggctgaggagaaccagaggctgcgtgagcagctgcagctcctggaggagcagcaccgggccgcgctggcgcactcagaggaggtcactgcctcgcaggtggctgccacaaagaccctgcccaatggccgggatgcacttgatggccccgcggcagaggcagagccggagcacagcttcgatggcctgcggcggaaggtgtcagctcagaggctgcaggaggccggcatcctgagtgcggaggagctgcagcggttggcgcagggccacaccacggtggacgagctcgcacggcgggaagacgtgcgccactacctgcagggccgcagcagtatcgcagggctgttgctgaaggccaccaatgagaagctgagtgtttacgccgccctgcagaggcagctgctgagtcccggcacggccctcatcctgctggaggcgcaggcggcctcaggcttcctgctggaccctgtgcggaaccggcggctgaccgtcaacgaggctgtgaaggagggtgtggtgggccccgagctgcaccacaagctgctgtcggccgagcgcgccgtcactggctacaaggacccctacactggccagcagatctctctcttccaagccatgcagaagggcctcatcgtccgggagcacggcatccgcctgctggaggcccagatcgccacgggcggcgttatcgaccccgtgcacagccaccgcgtgcccgtggacgtggcctaccggcgcggctacttcgacgaggagatgaaccgcgtcctggcggaccccagcgacgacaccaagggcttctttgaccccaacacgcacgagaacctcacgtacctgcagctactggagcgctgcgtggaggaccccgagacgggcctgtgccttctgccactcacggataaggctgccaagggcggggagctggtctacactgactccgaggcccgggacgtctttgagaaggccaccgtgtctgcgccgttcggcaagttccagggcaagacggtgaccatttgggagatcatcaactcggaatacttcacggcagagcagcggcgggacctgctgcggcagttccgcacgggccggatcacagtggagaagatcatcaagatcatcatcacggtggtggaggagcaggagcagaagggccggctttgctttgagggcctgcgcagcctggtgccagccgccgagctgctggagagcagggtcatcgaccgcgagctctaccagcagctgcagcgaggtgagcgctctgtgcgagacgtagccgaggtggacactgtgcggcgggctctccggggtgccaacgtcatcgcgggtgtatggctggaggaggcggggcagaagctgagtatctacaatgccctgaagaaagacctgctgccatccgacatggccgtggccctgttggaagcccaggccggcaccgggcacatcatcgaccccgccaccagcgcccggctgaccgtggacgaggcagtgcgtgctggcctggtgggccccgagtttcatgagaagctgctatcagccgagaaggctgtgacagggtacagggacccctacacagggcagagcgtctccctgttccaggccctgaagaagggcctcattccccgggagcagggcctgcgcctgttggacgcccagctgtccacgggcggcatcgtggaccccagcaagagccaccgcgtgcccctggatgtcgcctgcgcccgaggctgcctggatgaggagaccagcagggccctgtcggcaccaagggccgacgccaaggcctacagtgaccccagcacaggggagccggccacctacggcgagctccagcagcggtgccggcccgaccagctgaccgggctgagcctgctgccgctctcagaaaaggctgctcgggcccggcaggaggagctctactcagagctgcaggcccgtgagacctttgaaaagaccccggttgaggtccccgtgggtggcttcaagggcaggacggtgacggtgtgggagctcatcagctctgagtacttcactgcggagcagcggcaggagctgttgcgtcagttccgcacgggcaaggtcaccgtggagaaggtcatcaagattctcattaccatcgtggaggaggtggagaccctgcggcaggagaggctgtccttcagcggcctccgtgcccctgtgccagccagcgagctcctggcttccggggtcctcagcagagcccagtttgagcagctcaaggacggcaagacgacggtcaaggacctttcggagctgggctccgtgcggacgctgctgcagggcagtggctgcctcgccggcatctacctggaggacaccaaggagaaggtgtccatctacgaggccatgcgccggggcctgctgagagccacaacggctgcgctcctgctggaggcgcaggcggccactggcttcctggtggaccccgtgcggaaccagcgcctgtatgtccacgaggccgtgaaggcgggcgtggtgggccccgagcttcacgagcagctgctgtctgccgagaaggccgtcaccggctacagagacccctactcgggcagcaccatctccctcttccaggccatgcagaagggcctggttctccggcagcacggcatccgcctgctggaggcccagatcgccacgggcggcatcatcgaccccgtgcacagccaccgcgtgcctgtggacgtggcctaccagcgcggctacttcagtgaggagatgaaccgcgtcctggcggaccccagcgacgacaccaagggcttctttgaccccaacacgcatgagaacctcacgtacaggcagctgctggagcggtgcgtggaggaccccgagacgggcttgcgccttctgccactgaaaggggcggagaaggctgaggtggtggagaccacgcaggtgtacactgaggaggagacaagaagggcatttgaagagacacagatcgacattcccggcggcggcagccacggcggctccaccatgtccctgtgggaggtgatgcagtcggacctgatccccgaggagcagcgggcccagctgatggctgacttccaggccggccgggtgaccaaggaacgcatgatcatcatcatcatcgagatcattgagaagacagagatcatccgccagcagggtctggcctcctacgactacgtgcgccgccgcctcacggctgaggacctgttcgaggctcggatcatctctctcgagacctacaacctgctccgggagggcaccaggagcctccgtgaggctctcgaggcggagtccgcctggtgctacctctatggcacgggctccgtggctggtgtctacctgcccggttccaggcagacactgagcatctaccaggctctcaagaaagggctgctgagtgccgaggtggcccgcctgctgctggaggcacaggcagccacaggcttcctgctggacccggtgaagggggagcggctgactgtggatgaggctgtgcggaagggcctcgtggggcccgagctgcacgaccgcctgctctcggctgagcgggcggtcaccggctaccgtgacccctacaccgagcagaccatctcgctcttccaggccatgaagaaggagctgatccctactgaggaggccctgcggctgctggatgcccagctggccaccggcggcatcgtggacccccgcctgggcttccaccttcccctggaggtggcttaccagcgtggctacctcaacaaggacacgcacgaccagctgtcagagcccagcgaggtgcgcagctacgtggacccgtccaccgacgagcgcctcagctacacgcagctgctcaggcggtgccgtcgtgacgacggcaccggccagctgctcctgccactgtcggacgcccgcaagctgaccttccgtggcctgcggaagcagatcaccatggaggagctggtgcgctcgcaggtcatggacgaggccacggcgctgcagctgcgggagggcctgacctccatcgaggaggtcaccaagaacttgcagaagttcctggaaggcaccagctgcatcgctggtgtcttcgtggacgccaccaaggaacggctctcggtgtaccaggccatgaagaagggcatcatccgccccggcacagcctttgagctcctggaggcgcaggcggccaccggttacgtcatcgaccccatcaagggactgaagctgacggtggaggaggctgtgcgtatgggcattgtgggccccgagttcaaggacaagctgctgtcggccgagcgcgccgtcactgggtacaaggacccctactctgggaagctcatctccctcttccaggccatgaagaagggcctgatcctgaaggaccatggcatccgcctgctggaggcccagatcgccacgggcggcatcatcgaccctgaggagagccaccggctgcccgtggaggtggcctacaagcgcggcctcttcgatgaggagatgaacgagatcctgaccgacccctcggacgacaccaagggcttctttgaccctaacacggaggagaacctcacctacctgcagctgatggagcgttgtatcactgacccccagacgggcctgtgtctcttgccgctgaaggagaagaagcgggagcggaagacgtcctccaagtcctccgtgcgcaagcgccgagtggtcatcgtggaccccgagacgggcaaggagatgtcagtgtacgaggcctaccgcaagggcctgattgaccaccagacgtacctggagctgtccgagcaggagtgcgagtgggaggagatcaccatctcctcctcggacggcgtggtcaagtccatgatcatcgaccgccgctccgggcgccagtacgacatcgatgatgccatcgccaagaacctcatcgaccgctcggcactggaccagtaccgcgccggcacgctctccatcaccgagttcgccgacatgctctcgggcaacgccggtggtttccgctcccgttcctcctcggtgggatcctcctcctcctaccccatcagccccgccgtctccaggacccagctggcctcctggtcagaccccactgaggagacgggccccgtggctggcatcctggacacggagacgctggagaaggtgtccatcaccgaggccatgcaccggaacctggtggataacatcacggggcagcggctgctggaggcgcaggcctgcaccgggggcatcatcgaccccagcaccggtgagcgcttccctgtcaccgacgccgtcaacaagggcctggtggacaagatcatggtggaccgcatcaacctggcccagaaggccttctgcggcttcgaggacccacgcaccaagaccaagatgtcggccgcccaggccctgaagaagggctggctctactacgaggccggccagcgcttcctggaggtgcagtacctgaccggcggcttgatcgagcccgacacgccgggccgcgtgcccctggacgaggccctgcagcgcggcacggtggacgcccgcaccgcacagaagctgcgtgacgtgggcgcctactccaagtacctcacctgccctaagaccaagctcaagatctcctataaggacgcgctggaccgcagcatggtggaggagggcacggggctgcggctgctggaggctgccgcgcagtccaccaagggctactacagcccctacagcgtcagcggctccggctctaccgctggctcccgcaccggctcgcgcaccggctcccgggccggctcccgccgcggcagctttgacgccaccggctccggcttctccatgaccttctcttcatcctcctactcctcctcgggctacggccgccgctacgcctcggggtcctcggcctccctggggggccctgagtctgccgtggcctgaggctgcctgcgcccaccccgctctgcatgcggcccagcccggctcccaccgaggcgcgggggccgttttcaacgcttaaaggtgtcttcctcccaagtggtgcctaaagtttaaccaaaaagaccagactaatatattaatatatatctgctgtccagacagcctgtatcttgggggacagggctggcccagccctgctggccgcctcaccccctcgggtctcctcactcccttctacctgccactcacacagccaggtgccttggagggtcccaagctgggccccagcccaccctcctgtcttcccagggtagcccgcctgccagtcctagctgcacagggcagctgggcccaaccctgtctgtagagggccctggtgtttctagcactggcctgcacggtgggccttgctggggacggggggccccagtcagcctctctcccagtctacccagagaagccccttccccatgggaagacgaggccctcgggcccagcccccacagtgctgtctgatctgtgctttccagctcaccccccacactcactcctgagacccctggcctccggcgtcagcctccagcctctgttcccctagtaagtgccttccatgtcggcctctaaccccaggccccgaggacccagacccagtggggaggcggacgttccagccggcatggctgggaactgcagacctgtcctcctggtgggtccaggggcccctccagcttgtggagccccacactggggtgccgcctgcccgtctctctcccatggagccccagccccctttgggcccagggacaccagccaggctctgtgctgaccctcctgttgcacccagccctggtctcagcagcgaccacccctgcctccaccctctgagctttgcatgttccactaaccccgggcgggtggcaggtggaggtgtcaggctgctggcgcctctgcaagggcagaacactaacctgaccgtgggcggggccttgcggtatccgcccccaataaaagcaattccaacctt

SEQ ID NO: 759 - protein, 4547 aa, Homo sapiens
MSQHQLRVPQPEGLGRKRTSSEDNLYLAVLRASEGKKDERDRVQKKTFTKWVNKHLIKAQRHISDLYEDLRDGHNLISLLEVLSGDSLPREKGRMRFHKLQNVQIALDYLRHRQVKLVNIRNDDIADGNPKLTLGLIWTIILHFQISDIQVSGQSEDMTAKEKLLLWSQRMVEGYQGLRCDNFTSSWRDGRLFNAIIHRHKPLLIDMNKVYRQTNLENLDQAFSVAERDLGVTRLLDPEDVDVPQPDEKSIITYVSSLYDAMPRVPDVQDGVRANELQLRWQEYRELVLLLLQWMRHHTAAFEERRFPSSFEEIEILWSQFLKFKEMELPAKEADKNRSKGIYQSLEGAVQAGQLKVPPGYHPLDVEKEWGKLHVAILEREKQLRSEFERLECLQRIVTKLQMEAGLCEEQLNQADALLQSDVRLLAAGKVPQRAGEVERDLDKADSMIRLLFNDVQTLKDGRHPQGEQMYRRVYRLHERLVAIRTEYNLRLKAGVAAPATQVAQVTLQSVQRRPELEDSTLRYLQDLLAWVEENQHRVDGAEWGVDLPSVEAQLGSHRGLHQSIEEFRAKIERARSDEGQLSPATRGAYRDCLGRLDLQYAKLLNSSKARLRSLESLHSFVAAATKELMWLNEKEEEEVGFDWSDRNTNMTAKKESYSALMRELELKEKKIKELQNAGDRLLREDHPARPTVESFQAALQTQWSWMLQLCCCIEAHLKENAAYFQFFSDVREAEGQLQKLQEALRRKYSCDRSATVTRLEDLLQDAQDEKEQLNEYKGHLSGLAKRAKAVVQLKPRHPAHPMRGRLPLLAVCDYKQVEVTVHKGDECQLVGPAQPSHWKVLSSSGSEAAVPSVCFLVPPPNQEAQEAVTRLEAQHQALVTLWHQLHVDMKSLLAWQSLRRDVQLIRSWSLATFRTLKPEEQRQALHSLELHYQAFLRDSQDAGGFGPEDRLMAEREYGSCSHHYQQLLQSLEQGAQEESRCQRCISELKDIRLQLEACETRTVHRLRLPLDKEPARECAQRIAEQQKAQAEVEGLGKGVARLSAEAEKVLALPEPSPAAPTLRSELELTLGKLEQVRSLSAIYLEKLKTISLVIRGTQGAEEVLRAHEEQLKEAQAVPATLPELEATKASLKKLRAQAEAQQPTFDALRDELRGAQEVGERLQQRHGERDVEVERWRERVAQLLERWQAVLAQTDVRQRELEQLGRQLRYYRESADPLGAWLQDARRRQEQIQAMPLADSQAVREQLRQEQALLEEIERHGEKVEECQRFAKQYINAIKDYELQLVTYKAQLEPVASPAKKPKVQSGSESVIQEYVDLRTHYSELTTLTSQYIKFISETLRRMEEEERLAEQQRAEERERLAEVEAALEKQRQLAEAHAQAKAQAEREAKELQQRMQEEVVRREEAAVDAQQQKRSIQEELQQLRQSSEAEIQAKARQAEAAERSRLRIEEEIRVVRLQLEATERQRGGAEGELQALRARAEEAEAQKRQAQEEAERLRRQVQDESQRKRQAEVELASRVKAEAEAAREKQRALQALEELRLQAEEAERRLRQAEVERARQVQVALETAQRSAEAELQSKRASFAEKTAQLERSLQEEHVAVAQLREEAERRAQQQAEAERAREEAERELERWQLKANEALRLRLQAEEVAQQKSLAQAEAEKQKEEAEREARRRGKAEEQAVRQRELAEQELEKQRQLAEGTAQQRLAAEQELIRLRAETEQGEQQRQLLEEELARLQREAAAATQKRQELEAELAKVRAEMEVLLASKARAEEESRSTSEKSKQRLEAEAGRFRELAEEAARLRALAEEAKRQRQLAEEDAARQRAEAERVLAEKLAAIGEATRLKTEAEIALKEKEAENERLRRLAEDEAFQRRRLEEQAAQHKADIEERLAQLRKASDSELERQKGLVEDTLRQRRQVEEEILALKASFEKAAAGKAELELELGRIRSNAEDTLRSKEQAELEAARQRQLAAEEERRRREAEERVQKSLAAEEEAARQRKAALEEVERLKAKVEEARRLRERAEQESARQLQLAQEAAQKRLQAEEKAHAFAVQQKEQELQQTLQQEQSVLDQLRGEAEAARRAAEEAEEARVQAEREAAQSRRQVEEAERLKQSAEEQAQARAQAQAAAEKLRKEAEQEAARRAQAEQAALRQKQAADAEMEKHKKFAEQTLRQKAQVEQELTTLRLQLEETDHQKNLLDEELQRLKAEATEAARQRSQVEEELFSVRVQMEELSKLKARIEAENRALILRDKDNTQRFLQEEAEKMKQVAEEAARLSVAAQEAARLRQLAEEDLAQQRALAEKMLKEKMQAVQEATRLKAEAELLQQQKELAQEQARRLQEDKEQMAQQLAEETQGFQRTLEAERQRQLEMSAEAERLKLRVAEMSRAQARAEEDAQRFRKQAEEIGEKLHRTELATQEKVTLVQTLEIQRQQSDHDAERLREAIAELEREKEKLQQEAKLLQLKSEEMQTVQQEQLLQETQALQQSFLSEKDSLLQRERFIEQEKAKLEQLFQDEVAKAQQLREEQQRQQQQMEQERQRLVASMEEARRRQHEAEEGVRRKQEELQQLEQQRRQQEELLAEENQRLREQLQLLEEQHRAALAHSEEVTASQVAATKTLPNGRDALDGPAAEAEPEHSFDGLRRKVSAQRLQEAGILSAEELQRLAQGHTTVDELARREDVRHYLQGRSSIAGLLLKATNEKLSVYAALQRQLLSPGTALILLEAQAASGFLLDPVRNRRLTVNEAVKEGVVGPELHHKLLSAERAVTGYKDPYTGQQISLFQAMQKGLIVREHGIRLLEAQIATGGVIDPVHSHRVPVDVAYRRGYFDEEMNRVLADPSDDTKGFFDPNTHENLTYLQLLERCVEDPETGLCLLPLTDKAAKGGELVYTDSEARDVFEKATVSAPFGKFQGKTVTIWEIINSEYFTAEQRRDLLRQFRTGRITVEKIIKIIITVVEEQEQKGRLCFEGLRSLVPAAELLESRVIDRELYQQLQRGERSVRDVAEVDTVRRALRGANVIAGVWLEEAGQKLSIYNALKKDLLPSDMAVALLEAQAGTGHIIDPATSARLTVDEAVRAGLVGPEFHEKLLSAEKAVTGYRDPYTGQSVSLFQALKKGLIPREQGLRLLDAQLSTGGIVDPSKSHRVPLDVACARGCLDEETSRALSAPRADAKAYSDPSTGEPATYGELQQRCRPDQLTGLSLLPLSEKAARARQEELYSELQARETFEKTPVEVPVGGFKGRTVTVWELISSEYFTAEQRQELLRQFRTGKVTVEKVIKILITIVEEVETLRQERLSFSGLRAPVPASELLASGVLSRAQFEQLKDGKTTVKDLSELGSVRTLLQGSGCLAGIYLEDTKEKVSIYEAMRRGLLRATTAALLLEAQAATGFLVDPVRNQRLYVHEAVKAGVVGPELHEQLLSAEKAVTGYRDPYSGSTISLFQAMQKGLVLRQHGIRLLEAQIATGGIIDPVHSHRVPVDVAYQRGYFSEEMNRVLADPSDDTKGFFDPNTHENLTYRQLLERCVEDPETGLRLLPLKGAEKAEVVETTQVYTEEETRRAFEETQIDIPGGGSHGGSTMSLWEVMQSDLIPEEQRAQLMADFQAGRVTKERMIIIIIEIIEKTEIIRQQGLASYDYVRRRLTAEDLFEARIISLETYNLLREGTRSLREALEAESAWCYLYGTGSVAGVYLPGSRQTLSIYQALKKGLLSAEVARLLLEAQAATGFLLDPVKGERLTVDEAVRKGLVGPELHDRLLSAERAVTGYRDPYTEQTISLFQAMKKELIPTEEALRLLDAQLATGGIVDPRLGFHLPLEVAYQRGYLNKDTHDQLSEPSEVRSYVDPSTDERLSYTQLLRRCRRDDGTGQLLLPLSDARKLTFRGLRKQITMEELVRSQVMDEATALQLREGLTSIEEVTKNLQKFLEGTSCIAGVFVDATKERLSVYQAMKKGIIRPGTAFELLEAQAATGYVIDPIKGLKLTVEEAVRMGIVGPEFKDKLLSAERAVTGYKDPYSGKLISLFQAMKKGLILKDHGIRLLEAQIATGGIIDPEESHRLPVEVAYKRGLFDEEMNEILTDPSDDTKGFFDPNTEENLTYLQLMERCITDPQTGLCLLPLKEKKRERKTSSKSSVRKRRVVIVDPETGKEMSVYEAYRKGLIDHQTYLELSEQECEWEEITISSSDGVVKSMIIDRRSGRQYDIDDAIAKNLIDRSALDQYRAGTLSITEFADMLSGNAGGFRSRSSSVGSSSSYPISPAVSRTQLASWSDPTEETGPVAGILDTETLEKVSITEAMHRNLVDNITGQRLLEAQACTGGIIDPSTGERFPVTDAVNKGLVDKIMVDRINLAQKAFCGFEDPRTKTKMSAAQALKKGWLYYEAGQRFLEVQYLTGGLIEPDTPGRVPLDEALQRGTVDARTAQKLRDVGAYSKYLTCPKTKLKISYKDALDRSMVEEGTGLRLLEAAAQSTKGYYSPYSVSGSGSTAGSRTGSRTGSRAGSRRGSFDATGSGFSMTFSSSSYSSSGYGRRYASGSSASLGGPESAVA

SEQ ID NO: 760 - DNA, 3525 bp, Homo sapiens
cagtttcacttttgttttcctgctcccagcagggttaggcttgctgaggggcaggcacaggagtcctggctgagctcatggcctgaggctgcctagcggccacggggaatggttgcaatggcggaggcagaggcaggggtggcagtggaggtccgtggactgccccctgccgtgcccgacgagctgctcactctctactttgaaaaccgccgacgctctggagggggacctgtgttgagctggcagagactgggctgtgggggcgtcctcaccttcagagagcctgcagacgccgagagggtcttggcccaggcagatcacgaactacatggtgcccagctgagcctgcggccagctccaccacgagcccctgcacgcctgctgctccaaggactgccccctggcaccacgccccagcgcttggagcagcatgtccaggccttgctgcgggcctcggggctcccagtacagccttgctgtgccttggccagcccccggccagaccgggctctggtccagttgcccaagcccctttctgaggcagatgtccgtgtcctggaggagcaggcccagaatctgggcctggaggggaccttggtgtccctggcccgggttccccaggcccgagcggtgcgtgtggtgggggatggtgcctctgtggacctgctgttgctggagttgtacctggagaatgagcgccgcagtggtggggggcccctggaggacctgcaacgcctacccgggcccctgggcactgttgcctccttccagcagtggcaagtggcagaacgagtgttgcagcaggagcaccggttgcagggctcagagctgagccttgtcccccactacgacatcctggagcccgaggagctggctgagaacaccagtggaggggaccacccgtccacccaggggcctagggctaccaagcatgctctcctgaggaccggagggttggtgacggctctgcagggtgcagggactgtgacaatgggctctggcgaggaaccagggcagtcaggggcctctctgaggacaggtcccatggtgcagggtagagggattatgacaacaggctctggccaggaaccagggcagtcagggacctctctgaggacaggtcccatggggtctctgggacaggcagagcaagtcagctcgatgcccatggggtctctggaacatgaggggctggtaagcctgaggcctgtggggttgcaggaacaggaggggcccatgagcctggggcctgtggggtctgcaggcccagtggagacctctaaggggttgctggggcaggagggcctggtggaaattgccatggactcaccagagcaagaggggctggtgggtcccatggagatcaccatggggtctctggagaaggcagggcctgtgagcccaggatgtgtgaagctggcagggcaggagggcctggtggagatggtgctattgatggagccaggggcgatgcgcttcctgcagctctaccatgaggaccttcttgcgggcctgggagacgtcgctctcttgccacttgaaggaccggatatgactggctttcggctctgtggagcccaggcttcctgccaggcggctgaggagtttctgcggagcctgctgggcagcattagctgccatgtgttgtgcctggagcacccgggcagcgccaggtttctcctgggcccagaagggcagcaccttctccaggggctggaggctcagttccagtgtgtctttgggacagagcgcctggccacagccacgttggacacaggccttgaagaggtggaccctaccgaggccctcccagtgctccctggcaacgcccacaccctgtggaccccagacagtacaggtggtgaccaggaggacgtgagcctggaggaggtccgagaactgctggccaccctggagggcctagacctagacggggaggactggctgcctcgggagctggaggaggaagggcctcaggagcagccagaggaggaggtgaccccagggcatgaggaggaggagcctgtggcccccagcactgtggcacccaggtggctggaggaggaggccgctctgcagctggccctccaccggtcactggagcctcaaggtcaggtggctgagcaggaggaggctgctgccctgcggcaagccctaaccctctccctgctggagcagcccccgttggaggcagaagagcccccagatggggggactgatggcaaggcccagctggtggtgcactcggcctttgagcaggatgtggaggagctggaccgggcgctcagggctgccttggaggtccacgtccaggaggagacggtggggccctggcgccgcacactgcctgcagagctgcgtgctcgcctggagcggtgccatggtgtgagtgttgccctgcgtggtgactgcaccatcctccgtggcttcggggcccaccctgcccgtgctgcccgccacttggtggcacttctggctggcccctgggatcagagtttggcctttcccttggcagcttcaggccctaccttggcggggcagacgctgaaggggccctggaacaacctggagcgtctggcagagaacaccggggagttccaggaggtggtgcgggccttctacgacaccctggacgctgcccgcagcagcatccgcgtcgttcgtgtggagcgcgtgtcgcacccgctgctgcagcagcagtatgagctgtaccgggagcgcctgctgcagcgatgcgagcggcgcccggtggagcaggtgctgtaccacggcacgacggcaccggcagtgcctgacatctgcgcccacggcttcaaccgcagcttctgcggccgcaacgccacggtctacgggaagggcgtgtatttcgccaggcgcgcctccctgtcggtgcaggaccgctactcgccccccaacgccgatggccataaggcggtgttcgtggcacgggtgctgactggcgactacgggcagggccgccgcggtctgcgggcgccccctctgcggggtcctggccacgtgctcctgcgctacgacagcgccgtggactgcatctgccagcccagcatcttcgtcatcttccacgacacccaggcgctgcccacccacctcatcacctgcgagcacgtgccccgcgcttcccccgacgacccctctgggctcccgggccgctccccagacacttaaccgaaggggccaccctctggcctcctgcttcccaggctcccagctccgcacaggctgatgctccccgcccccaactgtggccgcctgagctgtccccggggacgcccctgcctccctctgcgggctccagaaggcggtgtgggggatggcggtcagcagcggccgaggggggccgggctaggtcccagcctgggccgaccccaccaccaggggtcagcagagcccaggaggcgacaccgcccgcccgccgctcccagacctcgcccgagtcggctctgttgtttgaataaacgtgaacgtgaacccaggcggaagggacccgggaactctgaaaaaaaa

SEQ ID NO: 761 - protein, 1025 aa, Homo sapiens
MVAMAEAEAGVAVEVRGLPPAVPDELLTLYFENRRRSGGGPVLSWQRLGCGGVLTFREPADAERVLAQADHELHGAQLSLRPAPPRAPARLLLQGLPPGTTPQRLEQHVQALLRASGLPVQPCCALASPRPDRALVQLPKPLSEADVRVLEEQAQNLGLEGTLVSLARVPQARAVRVVGDGASVDLLLLELYLENERRSGGGPLEDLQRLPGPLGTVASFQQWQVAERVLQQEHRLQGSELSLVPHYDILEPEELAENTSGGDHPSTQGPRATKHALLRTGGLVTALQGAGTVTMGSGEEPGQSGASLRTGPMVQGRGIMTTGSGQEPGQSGTSLRTGPMGSLGQAEQVSSMPMGSLEHEGLVSLRPVGLQEQEGPMSLGPVGSAGPVETSKGLLGQEGLVEIAMDSPEQEGLVGPMEITMGSLEKAGPVSPGCVKLAGQEGLVEMVLLMEPGAMRFLQLYHEDLLAGLGDVALLPLEGPDMTGFRLCGAQASCQAAEEFLRSLLGSISCHVLCLEHPGSARFLLGPEGQHLLQGLEAQFQCVFGTERLATATLDTGLEEVDPTEALPVLPGNAHTLWTPDSTGGDQEDVSLEEVRELLATLEGLDLDGEDWLPRELEEEGPQEQPEEEVTPGHEEEEPVAPSTVAPRWLEEEAALQLALHRSLEPQGQVAEQEEAAALRQALTLSLLEQPPLEAEEPPDGGTDGKAQLVVHSAFEQDVEELDRALRAALEVHVQEETVGPWRRTLPAELRARLERCHGVSVALRGDCTILRGFGAHPARAARHLVALLAGPWDQSLAFPLAASGPTLAGQTLKGPWNNLERLAENTGEFQEVVRAFYDTLDAARSSIRVVRVERVSHPLLQQQYELYRERLLQRCERRPVEQVLYHGTTAPAVPDICAHGFNRSFCGRNATVYGKGVYFARRASLSVQDRYSPPNADGHKAVFVARVLTGDYGQGRRGLRAPPLRGPGHVLLRYDSAVDCICQPSIFVIFHDTQALPTHLITCEHVPRASPDDPSGLPGRSPDT

SEQ ID NO: 762 - DNA, 1986 bp, Homo sapiens
aaggccccgctgcgtcttccgagccgcaggcgcaggcccagctgagcggccgccgagcgggtgcgggtgcgggcgcatcggccatcaccgcgcggccgcgcagcggacaccgtgcgtaccggcctgcggcgcccggccaccggtgagtccccggcccgagcccaggagcgcctctgacccgctgcgccgcgcggcctgccgcccccgcccccgcccccacgcggatcttgcgcatccgagcgtggccgcctcgggggcggaccgcggaacccgaggccatgtcccatgaaaagagttttttggtgtctggggacaactatcctccccccaaccctggatatccgggggggccccagccacccatgcccccctatgctcagcctccctaccctggggccccttacccacagccccctttccagccctccccctacggtcagccagggtacccccatggccccagcccctacccccaagggggctacccacagggtccctacccccaagggggctacccacagggcccctacccacaagagggctacccacagggcccctacccccaagggggctacccccaggggccatatccccagagccccttcccccccaacccctatggacagccacaggtcttcccaggacaagaccctgactcaccccagcatggaaactaccaggaggagggtcccccatcctactatgacaaccaggacttccctgccaccaactgggatgacaagagcatccgacaggccttcatccgcaaggtgttcctagtgctgaccttgcagctgtcggtgaccctgtccacggtgtctgtgttcacttttgttgcggaggtgaagggctttgtccgggagaatgtctggacctactatgtctcctatgctgtcttcttcatctctctcatcgtcctcagctgttgtggggacttccggcgaaagcacccctggaaccttgttgcactgtcggtcctgaccgccagcctgtcgtacatggtggggatgatcgccagcttctacaacaccgaggcagtcatcatggccgtgggcatcaccacagccgtctgcttcaccgtcgtcatcttctccatgcagacccgctacgacttcacctcatgcatgggcgtgctcctggtgagcatggtggtgctcttcatcttcgccattctctgcatcttcatccggaaccgcatcctggagatcgtgtacgcctcactgggcgctctgctcttcacctgcttcctcgcagtggacacccagctgctgctggggaacaagcagctgtccctgagcccagaagagtatgtgtttgctgcgctgaacctgtacacagacatcatcaacatcttcctgtacatcctcaccatcattggccgcgccaaggagtagccgagctccagctcgctgtgcccgctcaggtggcacggctggcctggaccctgcccctggcacggcagtgccagctgtacttcccctctctcttgtccccaggcacagcctagggaaaaggatgcctctctccaaccctcctgtatgtacactgcagatacttccatttggacccgctgtggccacagcatggcccctttagtcctcccgcccccgccaaggggcaccaaggccacgtttccgtgccacctcctgtctactcattgttgcatgagccctgtctgccagcccaccccagggactgggggcagcaccaggtcccggggagagggattgagccaagaggtgagggtgcacgtcttccctcctgtcccagctccccagcctggcgtagagcacccctcccctcccccccacccccctggagtgctgccctctggggacatgcggagtgggggtcttatccctgtgctgagccctgagggcagagaggatggcatgtttcaggggagggggaagccttcctctcaatttgttgtcagtgaaattccaataaatgggatttgctctctgcaaaaaaaaaaaaaaaaaa

SEQ ID NO: 763 - protein, 371 aa, Homo sapiens
MSHEKSFLVSGDNYPPPNPGYPGGPQPPMPPYAQPPYPGAPYPQPPFQPSPYGQPGYPHGPSPYPQGGYPQGPYPQGGYPQGPYPQEGYPQGPYPQGGYPQGPYPQSPFPPNPYGQPQVFPGQDPDSPQHGNYQEEGPPSYYDNQDFPATNWDDKSIRQAFIRKVFLVLTLQLSVTLSTVSVFTFVAEVKGFVRENVWTYYVSYAVFFISLIVLSCCGDFRRKHPWNLVALSVLTASLSYMVGMIASFYNTEAVIMAVGITTAVCFTVVIFSMQTRYDFTSCMGVLLVSMVVLFIFAILCIFIRNRILEIVYASLGALLFTCFLAVDTQLLLGNKQLSLSPEEYVFAALNLYTDIINIFLYILTIIGRAKE

SEQ ID NO: 764 - DNA, 1874 bp, Homo sapiens
aaggccccgctgcgtcttccgagccgcaggcgcaggcccagctgagcggccgccgagcgggtgcgggtgcgggcgcatcggccatcaccgcgcggccgcgcagcggacaccgtgcgtaccggcctgcggcgcccggccaccggggcggaccgcggaacccgaggccatgtcccatgaaaagagttttttggtgtctggggacaactatcctccccccaaccctggatatccgggggggccccagccacccatgcccccctatgctcagcctccctaccctggggccccttacccacagccccctttccagccctccccctacggtcagccagggtacccccatggccccagcccctacccccaagggggctacccacagggtccctacccccaagggggctacccacagggcccctacccacaagagggctacccacagggcccctacccccaagggggctacccccaggggccatatccccagagccccttcccccccaacccctatggacagccacaggtcttcccaggacaagaccctgactcaccccagcatggaaactaccaggaggagggtcccccatcctactatgacaaccaggacttccctgccaccaactgggatgacaagagcatccgacaggccttcatccgcaaggtgttcctagtgctgaccttgcagctgtcggtgaccctgtccacggtgtctgtgttcacttttgttgcggaggtgaagggctttgtccgggagaatgtctggacctactatgtctcctatgctgtcttcttcatctctctcatcgtcctcagctgttgtggggacttccggcgaaagcacccctggaaccttgttgcactgtcggtcctgaccgccagcctgtcgtacatggtggggatgatcgccagcttctacaacaccgaggcagtcatcatggccgtgggcatcaccacagccgtctgcttcaccgtcgtcatcttctccatgcagacccgctacgacttcacctcatgcatgggcgtgctcctggtgagcatggtggtgctcttcatcttcgccattctctgcatcttcatccggaaccgcatcctggagatcgtgtacgcctcactgggcgctctgctcttcacctgcttcctcgcagtggacacccagctgctgctggggaacaagcagctgtccctgagcccagaagagtatgtgtttgctgcgctgaacctgtacacagacatcatcaacatcttcctgtacatcctcaccatcattggccgcgccaaggagtagccgagctccagctcgctgtgcccgctcaggtggcacggctggcctggaccctgcccctggcacggcagtgccagctgtacttcccctctctcttgtccccaggcacagcctagggaaaaggatgcctctctccaaccctcctgtatgtacactgcagatacttccatttggacccgctgtggccacagcatggcccctttagtcctcccgcccccgccaaggggcaccaaggccacgtttccgtgccacctcctgtctactcattgttgcatgagccctgtctgccagcccaccccagggactgggggcagcaccaggtcccggggagagggattgagccaagaggtgagggtgcacgtcttccctcctgtcccagctccccagcctggcgtagagcacccctcccctcccccccacccccctggagtgctgccctctggggacatgcggagtgggggtcttatccctgtgctgagccctgagggcagagaggatggcatgtttcaggggagggggaagccttcctctcaatttgttgtcagtgaaattccaataaatgggatttgctctctgcaaaaaaaaaaaaaaaaaa

SEQ ID NO: 765 - protein, 371 aa, Homo sapiens; identical to SEQ ID NO: 763

SEQ ID NO: 766 - DNA, 2040 bp, Homo sapiens
ggcaaggcctggggccctgggcagcctccaggtgcagtgccctcccgtgggccgcacccttgccactgccccagggcatgtctctactcaccaattatgaagggcttcggcatcagatagagaggctggtgcgggaaaatgaggaactgaagaagttggtgcggctcattcgggagaatcacgagctcaagtcagcgatcaagactcaggcaggcgggctcggcatcagcgggttcacgagtgggcttggtgaggcaacagcaggcctttcctcacgccagaacaatggtgtcttcctgcccccgtccccagcagtggcaaacgaacgagtcctcgaagaagtggggatcatggccttggcacccctggccgagatgctaaccagcttgcagcccagcgccacaccgggctcactcatgagccccctgacaggcaccctcagcacgctgctgtctggcccagcacccacgtcacagagcagccccctcaccagcttcctgaccagtcccattgcgggacccctaacaggcacactggccagttccctgggcctgccctccactggcaccctgactcccagcagcctcgtggcaggccctgtggccatgtcccagagcagccccctgatagcccctgtgatgggcacggtggctgtctctctgagcagccccctcctcagctccactgccaccccaccaggggtctctcagaacctgctggccaaccccatgagcaacctggtcctgccagaggccccaaggctgcggctggctgagccactccgcggaggccccactgggccccagtccccagcttgcgtggtacccactgccaccaccaaagtcccactctccactgagcccccccagtcgacccaggacccagagcctctcagcatggcgtttgcaggagcacccctccagacctccacccctatcggagccatgggcacacctgctcccaagacggccttctccttcaacacttcggacacacaggcccagcccagtgccgcccaggaacaagtggtccctgcatctgtccccacctcccccaccacctcccccacggtcaccgtccttgcctctgcccccgcccttgccccccaggttgccaccagctacacaccctcaagcaccacccacatcgcccagggtgccccccatcccccttcccgaatgcataattccccaacccagaacctgcctgtcccccactgtcctccacacaacgcccactccccacctcgtacctcatcctccccggcttcagtcaatgactctcgaggtccacgcaccacagaaccgtcgacgaagagcatgatggaggtggaacggaagctggcccaccgcaagaccagcaagttccccgagaacccccgagagtcgaagcagctggcctgggagaggctggtgggtgagattgccttccagctggaccgcaggatcctgtccagcatcttcccagagcgcgtacggctctacggcttcactgcctccaacatcccagagaagatcatccaggcttccctgaaccccagtgaccacaagctggatgagaagctgtgccagaggctcacacagcgctatgtgagcgtcatgaacaggctgcagagtctgggctacaacgggcgggtgcaccctgcgctgaccgagcagctggtgaacgcttatggcatcctgcgagagcgcccggagctggcggcgtctgagggcggcccctacaccgtggacttcctgcagcgtgtggtggtggagaccgtgcaccccggcatgctcgccgacgcgctgctgctgctctcctgcctcagccagctggcgcacgatgacggcaagcccatgttcatctggtgacgctggagctgggaggtccaggctcgctcagccccacagccctgtgcacggccattaaagcttcccacagacactggtcgctgggcctgtgccagcgctcctgggtggtgctgcctcctctggggtggctcaccgggccccggcaccgtgccccttcaaaaaaaaaaaaaaaaaaaaaaaaaaaaaa

SEQ ID NO: 767 - protein, 500 aa, Homo sapiens
MALAPLAEMLTSLQPSATPGSLMSPLTGTLSTLLSGPAPTSQSSPLTSFLTSPIAGPLTGTLASSLGLPSTGTLTPSSLVAGPVAMSQSSPLIAPVMGTVAVSLSSPLLSSTATPPGVSQNLLANPMSNLVLPEAPRLRLAEPLRGGPTGPQSPACVVPTATTKVPLSTEPPQSTQDPEPLSMAFAGAPLQTSTPIGAMGTPAPKTAFSFNTSDTQAQPSAAQEQVVPASVPTSPTTSPTVTVLASAPALAPQVATSYTPSSTTHIAQGAPHPPSRMHNSPTQNLPVPHCPPHNAHSPPRTSSSPASVNDSRGPRTTEPSTKSMMEVERKLAHRKTSKFPENPRESKQLAWERLVGEIAFQLDRRILSSIFPERVRLYGFTASNIPEKIIQASLNPSDHKLDEKLCQRLTQRYVSVMNRLQSLGYNGRVHPALTEQLVNAYGILRERPELAASEGGPYTVDFLQRVVVETVHPGMLADALLLLSCLSQLAHDDGKPMFIW

SEQ ID NO: 768 - DNA, 3985 bp, Homo sapiens
gctgaagagctcctgtgggactccagccccaccaccatgggcagccccgagggccgcttccactttgccatcgaccgtgggggtaccttcacagacgtctttgcccagtgcccaggggggcacgtgcgggtcttaaaactgctctcagaggaccctgccaactatgcggacgcgccaaccgaaggcatccgccgcatcctggagcaggaggccggcatgctcctgccccgggaccagccgctggactccagtcatatcgccagcatccgcatgggcaccacagtggccaccaacgcactgctggagcggaagggggagcgggtggcgctgctggtgacacgtggcttccgagacctgctgcacattggcacccaagcccgtggggacctctttgacctggccgtgcccatgcctgaggtgctgtatgaagaggtgctggaggtggacgaacgcgtggtgctgcaccgtggagaggcgggcaccgggacgcctgtgaaaggccgcacgggggacctgctggaagtgcagcagcctgtggacctgggggccctgcgtgggaagctggaggggctgctatctcgaggcatccgcagcctggctgtggtgctcatgcactcgtacacgtgggcccagcatgagcagcaggtgggtgtgctggcccgggagctgggcttcacgcacgtgtcactgtcctcggaggccatgcccatggtgcgcatcgtccctcgggggcacacggcctgtgccgacgcctacctcacgcccgccatccagcgctacgtgcagggcttctgccgtggcttccagggccaactcaaggatgtgcaggtgttgttcatgcgctccgatggcggcctggcgcccatggacaccttcagcggctccagtgctgtgctctcgggcccggccggcggcgtggtgggctactcagccaccacctaccagcaggagggtggccagcctgtcatcggctttgacatgggaggcacgtccacggatgtgagccgctatgctggggaattcgagcacgtcttcgaggccagcacagctggcgtcaccctccaggccccgcagctggacatcaacaccgtggcagcgggagggggttcccgcctcttcttcaggtctggcctctttgtggttgggcccgagtcagcaggagcccacccaggacccgcctgctaccgcaaagggggccctgtgacagtgacggatgctaatctggtcctgggtcgcctgctgcctgcctccttcccctgcatttttgggccgggagagaaccaaccactttcccctgaggcctcccgcaaagccctggaggctgtggccactgaggtcaacagcttcctgaccaacgggccctgcccggcctccccgctgagcctggaggaggtggccatggggttcgtgcgcgtggccaacgaggccatgtgccggcccatccgtgcactcacgcaggcaagaggccatgacccctcagcccatgtgctggcctgctttgggggagctggtgggcagcatgcatgtgccatcgcccgggccctgggcatggacacggtgcacatccacaggcacagtgggctgctgtcggccctggggctggccctggctgacgtggtgcatgaggcacaggaaccctgctccctgctctacgcgcctgagaccttcgtgcagctggaccagaggctgagccgcctggaggagcagtgtgtggatgctctgcaggcccagggcttccccaggtcccagatcagcactgagagcttcctgcacctgcgctaccagggcacggactgtgctctgatggtgtctgcccaccagcacccagccacagcccgctcgccccgtgcgggggacttcggggcagcctttgtggagcggtacatgagggagtttggctttgtcatacctgagcggccggtggtcgtggacgatgtgcgagtgcggggcaccggccgcagtggtcttcgcctcgaggatgcccccaaagcccagaccgggcctccccgggtggacaagatgacccagtgctactttgaggggggctaccaggagacccctgtgtacctgctggcagagctgggctatgggcacaagctccatgggccctgcctcatcatcgacagtaacagcaccatcctggtggagccaggttgccaggcagaggtgaccaagacaggggacatctgcatctccgtgggggccgaagtccccggcacagtgggcccccagctggaccctatccagctgtccatcttctcacaccgcttcatgagcattgctgagcagatgggccgcatcctgcagcgcacagccatctccaccaacatcaaggagcgtctggacttctcctgtgccctctttgggcccgatggggggctggtgtccaatgccccccacatccctgtgcacctgggtgccatgcaggagacggtgcagttccagattcagcacctgggggccgatctccaccctggcgacgtgctactgagcaaccatcccagtgccgggggcagccacctgccagacctgactgttatcacaccggtgttttggccgggtcagacgcggcctgtgttctatgtggccagccgagggcaccacgcagacatcgggggcatcacaccaggctccatgcccccccactccaccatgctgcaacaggagggtgccgtctttctgtccttcaaacttgtccaggggggcgtcttccaggaggaggcggtgacggaggccctgcgggcgccaggcaaggtccccaactgcagcggaaccagaaacctgcacgacaacctgtcggacctccgtgcccaggtggcagccaaccagaagggcatccagctggtgggggagctcattgggcagtacggcctggacgtggtgcaggcctacatgggccatattcaggcaaacgctgagctggccgtgcgagacatgttgcgtgcctttggaacctcccggcaggcccggggcctgcccctggaggtgtcctcggaagaccacatggacgacggttcccccatccgcctccgtgtgcagatcagcctgagtcagggcagcgccgtgtttgacttcagcggcactgggccggaggtgtttggtaatctcaacgcaccgcgggccgtaaccctgtccgccctcatctactgcctgcgctgtctggtgggccgcgacatcccactcaaccagggctgcctggcgccagtgcgcgtggtcattccccgaggctccatcctggacccgtcgcccgaggcggcggtggtgggcggcaacgtgctcacgtcgcagcgcgtggtggatgtcatcctgggggcctttggggcctgcgccgcctcccagggctgcatgaacaacgtgaccctgggcaacgcccacatgggctactacgagacggtggcgggcggcgcgggcgcgggtcccagctggcacgggcgcagcggtgtgcacagccacatgaccaacacacgcatcaccgaccctgagatcctggagagccggtacccggtcatcctgcgccgcttcgagctgcggcggggctcggggggcagaggccgcttccgaggcggcgacggcgtcacccgcgagctgctctttcgtgaggaggcgctgctgtcagtgctgaccgagcgccgcgccttccggccatacgggctccacgggggcgagcctggcgcccgcggcctaaacctgctgatccgcaaaaacggccggacggtgaatctgggcggcaagacgtcggtgaccgtgtaccccggggatgtgttctgtctccacacgcccggcggcggtggctatggggacccggaggaccccgccccaccgccggggtcgcccccgcaagcactggcctttcccgagcacggcagcgtctatgagtatcgccgggcccaggaggccgtgtgaggatcccgcaataaagatgccttaagtctcccggttctggggacgcagctacggcgcctaaaaaaaaaaaaaaaaaaaaaaa

SEQ ID NO: 769 - protein, 1288 aa, Homo sapiens
MGSPEGRFHFAIDRGGTFTDVFAQCPGGHVRVLKLLSEDPANYADAPTEGIRRILEQEAGMLLPRDQPLDSSHIASIRMGTTVATNALLERKGERVALLVTRGFRDLLHIGTQARGDLFDLAVPMPEVLYEEVLEVDERVVLHRGEAGTGTPVKGRTGDLLEVQQPVDLGALRGKLEGLLSRGIRSLAVVLMHSYTWAQHEQQVGVLARELGFTHVSLSSEAMPMVRIVPRGHTACADAYLTPAIQRYVQGFCRGFQGQLKDVQVLFMRSDGGLAPMDTFSGSSAVLSGPAGGVVGYSATTYQQEGGQPVIGFDMGGTSTDVSRYAGEFEHVFEASTAGVTLQAPQLDINTVAAGGGSRLFFRSGLFVVGPESAGAHPGPACYRKGGPVTVTDANLVLGRLLPASFPCIFGPGENQPLSPEASRKALEAVATEVNSFLTNGPCPASPLSLEEVAMGFVRVANEAMCRPIRALTQARGHDPSAHVLACFGGAGGQHACAIARALGMDTVHIHRHSGLLSALGLALADVVHEAQEPCSLLYAPETFVQLDQRLSRLEEQCVDALQAQGFPRSQISTESFLHLRYQGTDCALMVSAHQHPATARSPRAGDFGAAFVERYMREFGFVIPERPVVVDDVRVRGTGRSGLRLEDAPKAQTGPPRVDKMTQCYFEGGYQETPVYLLAELGYGHKLHGPCLIIDSNSTILVEPGCQAEVTKTGDICISVGAEVPGTVGPQLDPIQLSIFSHRFMSIAEQMGRILQRTAISTNIKERLDFSCALFGPDGGLVSNAPHIPVHLGAMQETVQFQIQHLGADLHPGDVLLSNHPSAGGSHLPDLTVITPVFWPGQTRPVFYVASRGHHADIGGITPGSMPPHSTMLQQEGAVFLSFKLVQGGVFQEEAVTEALRAPGKVPNCSGTRNLHDNLSDLRAQVAANQKGIQLVGELIGQYGLDVVQAYMGHIQANAELAVRDMLRAFGTSRQARGLPLEVSSEDHMDDGSPIRLRVQISLSQGSAVFDFSGTGPEVFGNLNAPRAVTLSALIYCLRCLVGRDIPLNQGCLAPVRVVIPRGSILDPSPEAAVVGGNVLTSQRVVDVILGAFGACAASQGCMNNVTLGNAHMGYYETVAGGAGAGPSWHGRSGVHSHMTNTRITDPEILESRYPVILRRFELRRGSGGRGRFRGGDGVTRELLFREEALLSVLTERRAFRPYGLHGGEPGARGLNLLIRKNGRTVNLGGKTSVTVYPGDVFCLHTPGGGGYGDPEDPAPPPGSPPQALAFPEHGSVYEYRRAQEAV

SEQ ID NO: 770 - DNA, 948 bp, Homo sapiens
atggcggacctccggaaaccgtagattccgggcggtcggagccgccgggagctgtagttctcccgcggctcagagaagtaggcagagagcggacctggcggccgggcagcatggcggggctggagctcttgtcggaccagggctaccgggtggacgggcggcgcgccggggagctgcgcaagatccaggcgcggatgggcgtgttcgcgcaggctgacggctcggcctacattgagcagggcaacaccaaggcactggctgtggtctacggcccgcacgagatccggggctcccgggctcgagccctgccggacagggccctagtgaactgtcaatatagttcagcgaccttcagcacaggtgagcgcaagcgacggccacatggggaccgtaagtcctgtgagatgggcctgcagctccgccagactttcgaagcagccatcctcacacagctgcacccacgctcccagattgatatctatgtgcaggtgctacaggcagatggtgggacctatgcagcttgtgtgaatgcagccacgctggcagtgctggatgccgggatacccatgagagactttgtgtgtgcgtgctcagctggcttcgtggacggcacagccctggcggacctcagccatgtggaggaagcagctggtggcccccagctggccctggccctgctgccagcctcaggacagattgcgctgcttgagatggatgcccggctgcacgaggaccacctggagcgggtgttggaggctgctgcccaggctgcccgagatgtgcacaccctcttagatcgagtggtccggcagcatgtgcgtgaggcctctatcttgctgggggactgaccacccagccacccatgtccagaataaaaccctcctctgcccacacaaaaaaaaaaaaaaaaaaaaaaaaaaaaaaaaaaaaaaaaaaaaaaaaaaaaaa

SEQ ID NO: 771 - protein, 245 aa, Homo sapiens
MAGLELLSDQGYRVDGRRAGELRKIQARMGVFAQADGSAYIEQGNTKALAVVYGPHEIRGSRARALPDRALVNCQYSSATFSTGERKRRPHGDRKSCEMGLQLRQTFEAAILTQLHPRSQIDIYVQVLQADGGTYAACVNAATLAVLDAGIPMRDFVCACSAGFVDGTALADLSHVEEAAGGPQLALALLPASGQIALLEMDARLHEDHLERVLEAAAQAARDVHTLLDRVVRQHVREASILLGD

SEQ ID NO: 772 - DNA, 2105 bp, Homo sapiens
cggaagtgcgggcgagcgcgggtccccgggtctgacaggagcagcctgtgggcaccgcggcggtagttggaggcgggagagggtccgtagccgcgccgccctgccccgccatgggcctcctgtcggacccggttcgccggcgcgcgctcgcccgcctagtgctgcgcctcaacgcgccgttgtgcgtgctgagctacgtggcgggcatcgcctggttcttggcgctggttttcccgccgctgacccagcgcacttacatgtcggagaacgccatgggctccaccatggtggaggagcagtttgcgggcggagaccgtgcccgggcttttgcccgggacttcgccgcccaccgcaagaagtcgggggctctgccagtggcctggcttgaacggacgatgcggtcagtagggctggaggtctacacgcagagtttctcccggaaactgcccttcccagatgagacccacgagcgctatatggtgtcgggcaccaacgtgtacggcatcctgcgggccccgcgtgctgccagcaccgagtcgcttgtgctcaccgtgccctgtggctctgactctaccaacagccaggctgtggggctgctgctggcactggctgcccacttccgggggcagatttattgggccaaagatatcgtcttcctggtaacagaacatgaccttctgggcactgaggcttggcttgaagcctaccacgatgtcaatgtcactggcatgcagtcgtctcccctgcagggccgagctggggccattcaggcagccgtggccctggagctgagcagtgatgtggtcaccagcctcgatgtggccgtggaggggcttaacgggcagctgcccaaccttgacctgctcaatctcttccagaccttctgccagaaagggggcctgttgtgcacgcttcagggcaagctgcagcccgaggactggacatcattggatggaccgctgcagggcctgcagacactgctgctcatggttctgcggcaggcctccggccgcccccacggctcccatggcctcttcctgcgctaccgtgtggaggccctaaccctgcgtggcatcaatagcttccgccagtacaagtatgacctggtggcagtgggcaaggctttggagggcatgttccgcaagctcaaccacctcctggagcgcctgcaccagtccttcttcctctacttgctccccggcctctcccgcttcgtctccatcggcctctacatgcccgctgtcggcttcttgctcctggtccttggtctcaaggctctggaactgtggatgcagctgcatgaggctggaatgggccttgaggagcccgggggtgcccctggccccagtgtaccccttcccccatcacagggtgtggggctggcctcgctcgtggcacctctgctgatctcacaggccatgggactggccctctatgtcctgccagtgctgggccaacacgttgccacccagcacttcccagtggcagaggctgaggctgtggtgctgacactgctggcgatttatgcagctggcctggccctgccccacaatacccaccgggtggtaagcacacaggccccagacaggggctggatggcactgaagctggtagccctgatctacctagcactgcagctgggctgcatcgccctcaccaacttctcactgggcttcctgctggccaccaccatggtgcccactgctgcgcttgccaagcctcatgggccccggaccctctatgctgccctgctggtgctgaccagcccggcagccacgctccttggcagcctgttcctgtggcgggagctgcaggaggcgccactgtcactggccgagggctggcagctcttcctggcagcgctagcccagggtgtgctggagcaccacacctacggcgccctgctcttcccactgctgtccctgggcctctacccctgctggctgcttttctggaatgtgctcttctggaagtgagatctgcctgtccgggctgggacagagactccccaaggaccccattctgcctccttctggggaaataaatgagtgtctgtttcagcagctaaaaaaaaaaaaaaaaaaaaaaaaaaaaaaaaaaaaaaa

SEQ ID NO: 773 - protein, 621 aa, Homo sapiens
MGLLSDPVRRRALARLVLRLNAPLCVLSYVAGIAWFLALVFPPLTQRTYMSENAMGSTMVEEQFAGGDRARAFARDFAAHRKKSGALPVAWLERTMRSVGLEVYTQSFSRKLPFPDETHERYMVSGTNVYGILRAPRAASTESLVLTVPCGSDSTNSQAVGLLLALAAHFRGQIYWAKDIVFLVTEHDLLGTEAWLEAYHDVNVTGMQSSPLQGRAGAIQAAVALELSSDVVTSLDVAVEGLNGQLPNLDLLNLFQTFCQKGGLLCTLQGKLQPEDWTSLDGPLQGLQTLLLMVLRQASGRPHGSHGLFLRYRVEALTLRGINSFRQYKYDLVAVGKALEGMFRKLNHLLERLHQSFFLYLLPGLSRFVSIGLYMPAVGFLLLVLGLKALELWMQLHEAGMGLEEPGGAPGPSVPLPPSQGVGLASLVAPLLISQAMGLALYVLPVLGQHVATQHFPVAEAEAVVLTLLAIYAAGLALPHNTHRVVSTQAPDRGWMALKLVALIYLALQLGCIALTNFSLGFLLATTMVPTAALAKPHGPRTLYAALLVLTSPAATLLGSLFLWRELQEAPLSLAEGWQLFLAALAQGVLEHHTYGALLFPLLSLGLYPCWLLFWNVLFWK

SEQ ID NO: 774 - DNA, 1235 bp, Homo sapiens
cccaggggccgacgggagtggcggccgcgcggaggaggccaagatggcggcagctgcggcttcgcttcgcggggtagtgttgggcccgcggggcgcggggctcccgggcgcgcgtgcccggggtctgctgtgcagcgcgcgtcccgggcagctcccgctacggacacctcaggcagtggccttgtcgtcgaagtctggcctttcccgaggccggaaagtgatgctgtcagcgctgggcatgctggcggcagggggtgcggggctggccgtggctctgcattcggctgtgagtgccagtgacctggagctgcacccccccagctatccgtggtctcaccgtggcctcctctcttccttggaccacaccagcatccggaggggtttccaggtatataagcaggtgtgcgcctcctgccacagcatggacttcgtggcctaccgccacctggtgggcgtgtgctacacggaggatgaagctaaggagctggctgcggaggtggaggttcaagacggccccaatgaagatggggagatgttcatgcggccagggaagctgttcgactatttcccaaaaccataccccaacagtgaggctgctcgagctgccaacaacggagcattgccccctgacctcagctacatcgtgcgagctaggcatggtggtgaggactacgtcttctccctgctcacgggctactgcgagccacccaccggggtgtcactgcgggaaggtctctacttcaacccctactttcctggccaggccattgccatggcccctcccatctacacagatgtcttagagtttgacgatggcaccccagctaccatgtcccagatagccaaggatgtgtgcaccttcctgcgctgggcatctgagccagagcacgaccatcgaaaacgcatggggctcaagatgttgatgatgatggctctgctggtgcccctggtctacaccataaagcggcacaagtggtcagtcctgaagagtcggaagctggcatatcggccgcccaagtgaccctgtccagtgtctgcttgccatcctgccagaacaggccctcaagcccaagagccatcccaggcctgttcaggcctcagctaagcctctcttcatctggaagaagaggcaagggggcaggagaccaggctctagctctgggccctccttcagcccccatcatgggaataaattaattttctcaatgtaaaaaaaaaaaaaaaaaaaaaaaaaa

SEQ ID NO: 775 - protein, 325 aa, Homo sapiens
MAAAAASLRGVVLGPRGAGLPGARARGLLCSARPGQLPLRTPQAVALSSKSGLSRGRKVMLSALGMLAAGGAGLAVALHSAVSASDLELHPPSYPWSHRGLLSSLDHTSIRRGFQVYKQVCASCHSMDFVAYRHLVGVCYTEDEAKELAAEVEVQDGPNEDGEMFMRPGKLFDYFPKPYPNSEAARAANNGALPPDLSYIVRARHGGEDYVFSLLTGYCEPPTGVSLREGLYFNPYFPGQAIAMAPPIYTDVLEFDDGTPATMSQIAKDVCTFLRWASEPEHDHRKRMGLKMLMMMALLVPLVYTIKRHKWSVLKSRKLAYRPPK

SEQ ID NO: 776 - DNA, 1816 bp, Homo sapiens
gtgtgggcgtggcgggggctggggtctgcgggcgaaggtggcagcccattggaggtcccgggagcgaagtccagctgccgttaggcgctgggatagtcgcacgctggatgcatctacgtccgccgagcccctggggcgaagaggccgcgtccgccttcagttgtggccggtgcttcgccccctgacccttcgcccccaaagaccagctctaacgtgagcgcctcggccgccctgccccagcctcgtacacgccgccagcctcgcccagccggtgtccggagaccctcgggccgtgtccatttgtgggcaaagccagcggggcaggcttggccagagtgcaccactcggcgccgtcccaggcccgacgctctgggcgcgcccggaaccccaggttcgcggcccgtgtttccgaccggcggagggggctcagcggcccgatcccacggaagcgcgctcggaggggtgggacccggccggaccggagatggcgccgccagcgggcggggcggcggcggcggcctcggacttgggctccgccgcagtgctcttggctgtgcacgccgcggtgaggccgctgggcgccgggccagacgccgaggcacagctgcggaggctgcagctgagcgcggaccctgagcggcctgggcgcttccggctggagctgctgggcgcgggacctggggcggttaatttggagtggcccctggagtcagtttcctacaccatccgaggccccacccagcacgagctacagcctccaccaggagggcctggaaccctcagcctgcacttcctcaaccctcaggaagctcagcggtgggcagtcctagtccgaggtgccaccgtggaaggacagaatggcagcaagagcaactcaccaccagccttgggcccagaagcatgccctgtctccctgcccagtcccccggaagcctccacactcaagggccctccacctgaggcagatcttcctaggagccctggaaacttgacggagagagaagagctggcagggagcctggcccgggctattgcaggtggagacgagaagggggcagcccaagtggcagccgtcctggcccagcatcgtgtggccctgagtgttcagcttcaggaggcctgcttcccacctggccccatcaggctgcaggtcacacttgaagacgctgcctctgccgcatccgccgcgtcctctgcacacgttgccctgcaggtccacccccactgcactgttgcagctctccaggagcaggtgttctcagagctcggtttcccgccagccgtgcaacgctgggtcatcggacggtgcctgtgtgtgcctgagcgcagccttgcctcttacggggttcggcaggatggggaccctgctttcctctacttgctgtcagctcctcgagaagccccagccacaggacctagccctcagcacccccagaagatggacggggaacttggacgcttgtttcccccatcattggggctacccccaggcccccagccagctgcctccagcctgcccagtccactccagcccagctggtcctgtccttcctgcaccttcatcaatgccccagaccgccctggctgtgagatgtgtagcacccagaggccctgcacttgggacccccttgctgcagcttccacctagcagccaccagaggttacaaggggagagtggcccttccctcacaagtccgacatctccaggcccccactgaactccggggacctctactgactgcttgctgggacagtcaccagggttggggggaagggccacaaaatgaaaccattaaagacccttaagagccagcaa

SEQ ID NO: 777 - protein, 387 aa, Homo sapiens
MAPPAGGAAAAASDLGSAAVLLAVHAAVRPLGAGPDAEAQLRRLQLSADPERPGRFRLELLGAGPGAVNLEWPLESVSYTIRGPTQHELQPPPGGPGTLSLHFLNPQEAQRWAVLVRGATVEGQNGSKSNSPPALGPEACPVSLPSPPEASTLKGPPPEADLPRSPGNLTEREELAGSLARAIAGGDEKGAAQVAAVLAQHRVALSVQLQEACFPPGPIRLQVTLEDAASAASAASSAHVALQVHPHCTVAALQEQVFSELGFPPAVQRWVIGRCLCVPERSLASYGVRQDGDPAFLYLLSAPREAPATGPSPQHPQKMDGELGRLFPPSLGLPPGPQPAASSLPSPLQPSWSCPSCTFINAPDRPGCEMCSTQRPCTWDPLAAAST

SEQ ID NO: 778 - DNA, 1828 bp, Homo sapiens
tggcgggtacggcacccgatggctattcgagctctcgatctcggagactggagcgggccattcagaggcgcggggccgggcccggcggacgcttgttgttgtccggccgggggaggcggaggtcgctcgctcgctcgctcggctcgctgactcgccggagcgctctgtggcggtcggcggcaggtcggtcgcgagagcgggctctgtggaagggggcgaggctatgtcgcggtggcagcccggatgggccggcagggccgggagtaacgggacgtcgccgcggagcttcttcccccggatacagtgcggcccgagcggaggccgcggcgccgccctccgatcttgaagagcccgcgctgcgcggagcccgcccccgcctgcgcaccggcaccgacgcggagcgacccagcccagccagacccggcccggcgcggcctgatctaacccagccaggcaggcaatactagcccctctggagcacggagctccttccccaaagacatgaagctattggagaactcgagctttgaagccatcaactcacagctgactgtggagactggagatgcccacatcattggcaggattgagagctactcatgtaagatggcaggagacgacaaacacatgttcaagcagttctgccaggagggccagccccacgtgctggaggcactttctccaccccagacttcaggactgagccccagcagactcagcaaaagccaaggcggtgaggaggagggccccctcagtgacaagtgcagccgcaagaccctcttctacctgattgccacgctcaatgagtccttcaggcctgactatgacttcagcacagcccgcagccatgagttcagccgggagcccagccttagctgggtggtgaatgcagtcaactgcagtctgttctcagctgtgcgggaggacttcaaggatctgaaaccacagctgtggaacgcggtggacgaggagatctgcctggctgaatgtgacatctacagctataacccagacttggactcagatcccttcggggaggatggtagcctctggtccttcaactacttcttctacaacaagcggctcaagcgaatcgtcttctttagctgccgttccatcagtggctccacctacacaccctcagaggcaggcaacgagctggacatggagctgggggaggaggaggtggaggaagaaagcagaagcgggggcagtggggccgaggagaccagcaccatggaggaggacagggtcccagtgatctgtatttgatgaggaggagccgaggccccagcttcatccagcttcaaccaatgcctggacctgtccacctgagaggcccctggggcctccccagctgctggccagaccctggcgctgccacagtcctggcactgcccaaggccatacctgcctagccctttggctccatcctgtggatgcccactcacccctcagactcctgctgcccatgctgtggccggacttgtcagcagggggcctggtgggaggagcgactgccctgcccaaatgaactgccacagcagggacagctggaccgcagagtttatttttgtatttctactgggcctgcacactccagcccaaagggtctgtggccggaggccccacgagcaggccccagcagtcaccggctctggtcttgggccggccccggtgcccacctgtacccccacctcgcccatttggccgcgtgcactgagtgtcactttgctgcagctcgtttctttccaataaaagtttctgtgacttagaaaaaaaaaaaaaaaaaaaaaaaaaaaaaaaaaaaaaaaaaaaaaaaaaaaaa

SEQ ID NO: 779 - protein, 256 aa, Homo sapiens
MKLLENSSFEAINSQLTVETGDAHIIGRIESYSCKMAGDDKHMFKQFCQEGQPHVLEALSPPQTSGLSPSRLSKSQGGEEEGPLSDKCSRKTLFYLIATLNESFRPDYDFSTARSHEFSREPSLSWVVNAVNCSLFSAVREDFKDLKPQLWNAVDEEICLAECDIYSYNPDLDSDPFGEDGSLWSFNYFFYNKRLKRIVFFSCRSISGSTYTPSEAGNELDMELGEEEVEEESRSGGSGAEETSTMEEDRVPVICI

SEQ ID NO: 780 - DNA, 2441 bp, Homo sapiens
gggccacacagcggacccctaagcggaccgctggcaccggtcgggtggcagcagagtgtcgctcgacatgggggaggccggggctggcgctggcgcctcgggagggccggaggcaagcccggaggcagaggtggtgaagctgctgcccttcctggcgccgggcgcgcgggcggacctgcaggcggcggcggtgcggcacgtgctggcgctgactggctgcggacccggccgcgcgctgttggcggggcaggcggcgctgctgcaggcgctgatggagctggcgccggcctctgccccggcccgggacgccgcccgcgcgctcgtgaacttggccgccgaccccggcctgcacgagacattgctggcggccgaccccgggctgccagcgcgcctgatgggccgcgcgttggacccgcagtggccctgggccgaggaggcggccgccgcgctagccaacctcagtcgcgagccggcgccgtgtgcagcgctcatggcggcgctggcggccgcggagccggcagactcgggcctggagcggctggtgcgcgcgctgtgcacgcccggctacaacgcccgcgcgcccctgcactacctagcgccgctgctctccaacctcagccaacgccctgcggcgcgggccttcctactggaccccgacaggtgcgtggtccagcggctgctgccccttacccagtaccccgactcctctgtacgcaggggcggggtggtggggacgctgcggaattgctgcttcgagcaccgacatcacgagtggttgcttggacctgaggtggacattctcccctttttgctcctgcccttggctgggcctgaggatttctccgaggaagagatggaacggctgcctgtcgacttgcagtacctgccaccagacaagcagcgagaacctgatgcagacatccgcaagatgcttgttgaagccatcatgctgctgacagccacagcaccaggtcggcagcaggtgcgggaccagggagcctacctgatccttcgagagctgcacagctgggagccggagcccgacgtgcggacggcttgtgagaagctcatccaggtgcttattggggacgagcctgaacgtggcatggaaaacctgctggaggtgcaggtgcctgaggatgtggagcagcagctgcagcagctggattgcagggagcaggagcagttggagcgggagctggccccagagccatgggtggagagggccacacccacctgaggcccctgcagccggacaccagctccagggtcccctttgccaggctttctcagaccaggccttcctgcagctgtctgcaggccccctgggtccccttgttcagagactgtgctcttctgagaagcagagctacgcttaggctccagtaaggattggaggcactttccagccctgtgcagtgttgctaccagcaagaatgaaggttgtgcagagcagtactgtgaggtaggcaccgtgactcggctgcctgtgcagaaggtggaggtggcaggcggatggccagggagccatgagaagactcttcctgggcacggcgtggggactggacagaaaaccactgcaagccccaaggagccagctgaagcctcccaatccccagggcactgcagagtctgggcagaggtgggcgcataggtacaagtgctgctttgtcagcctcactccctgcagctctcagctccctgttccctgagacctggcctcaaagggctgacccagccatacgtagatcctggggtctttctaggactgtgcctccctgcttgacctatgctccaggaccctgccctcaacccttgtcagctccctaagtcttcctgtttcccagtctcagattgagtgggtgctctcattggcctctctagctaggccgtctccctggtcagcttccttgagcctgggccactcctccctggccttcttacctctgccaagagcctccagatgtgcctgcagcctagtccctgcccaagcttctcccccagccaccctctgcccctgtggtagagcccactataggcccaggcgccttacgtgcttctcccctggacctatgtgcatccctcacctgccagttatgtggctgccaagccccacaggctgtcatggtggctcttgccacacttcccttcctgagctgacctgacctcactgccacctcttgcattgggatcctgagggctggcccctgctcactgatgggccctcccaggcccgtcaagccctggtgaaggagcttagcttgtcttcttggcaattcacaatgcctcactccacaccctaaaactggagcgtcccctatggtctcctgctgtggcttgggtgccgggcgtctcccgcctccaggatctcctctcacctgcccccattaaagctctgccactcaaaaaaaaaaaaaaaaaaaaaaaaaaaaaaaaaaaac

SEQ ID NO: 781 - protein, 390 aa, Homo sapiens
MGEAGAGAGASGGPEASPEAEVVKLLPFLAPGARADLQAAAVRHVLALTGCGPGRALLAGQAALLQALMELAPASAPARDAARALVNLAADPGLHETLLAADPGLPARLMGRALDPQWPWAEEAAAALANLSREPAPCAALMAALAAAEPADSGLERLVRALCTPGYNARAPLHYLAPLLSNLSQRPAARAFLLDPDRCVVQRLLPLTQYPDSSVRRGGVVGTLRNCCFEHRHHEWLLGPEVDILPFLLLPLAGPEDFSEEEMERLPVDLQYLPPDKQREPDADIRKMLVEAIMLLTATAPGRQQVRDQGAYLILRELHSWEPEPDVRTACEKLIQVLIGDEPERGMENLLEVQVPEDVEQQLQQLDCREQEQLERELAPEPWVERATPT

SEQ ID NO: 782 - DNA, 2050 bp, Homo sapiens
atgccgcctcctgcggccgccgcgggcctcgcgggccggccggggcgaggcgcggggtctcggctgcgccccgcggtggcagctgccgggcgtcgcgcgcacatgatcagatgccgacatggtggcccccggctgcaggacatccggaacacggtgggcaacgtgcccttggagtggtacgatgacttcccccacgtgggctacgacctggatggcaggcgcatctacaagcccctgcggacccgggatgagctggaccagttcctggacaagatggacgatcctgactactggcgcaccgtgcaggacccgatgacagggcgggacctgagactgacggatgagcaggtggccctggtgcggcggctgcagagtggccagtttggggatgtgggcttcaacccctatgagccggctgtcgacttcttcagcggggacgtcatgatccacccggtgaccaaccgcccggccgacaagcgcagcttcatcccctccctggtggagaaggagaaggtctctcgcatggtgcacgccatcaagatgggctggatccagcctcgccggccccgagaccccacccccagcttctatgacctgtgggcccaggaggaccccaacgccgtgctcgggcgccacaagatgcacgtacctgctcccaagctggccctgccaggccacgccgagtcgtacaacccaccccctgaatacctgctcagcgaggaggagcgcttggcgtgggaacagcaggagccaggcgagaggaagctgagctttttgccacgcaagttcccgagcctgcgggccgtgcctgcctacggacgcttcatccaggaacgcttcgagcgctgccttgacctgtacctgtgcccacggcagcgcaagatgagggtgaatgtagaccctgaggacctcatccccaagctgcctcggccgagggacctgcagcccttccccacgtgccaggccctggtctacaggggccacagtgaccttgtccggtgcctcagtgtctctcctgggggccagtggctggtttcaggctctgacgacggctccctgcggctctgggaggtggccactgcccgctgtgtgaggactgttcccgtggggggcgtggtgaagagtgtggcctggaaccccagccccgctgtctgcctggtggctgcagccgtggaggactcggtgctgctgctgaacccagctctgggggaccggctggtggcgggcagcacagatcagctgttgagcgccttcgtcccgcctgaggagccccccttgcagccggcccgctggctggaggcctcagaggaggagcgccaagtgggcctgcggctgcgcatctgccacgggaagccagtgacgcaggtgacctggcacgggcgtggggactacctggccgtggtgctggccacccaaggccacacccaggtgctgattcaccagctgagccgtcgccgcagccagagtccgttccgccgcagccacggacaggtgcagcgagtggccttccaccctgcccggcccttcctgttggtggcgtcccagcgcagcgtccgcctctaccacctgctgcgccaggagctcaccaagaagctgatgcccaactgcaagtgggtgtccagcctggcggtgcaccctgcaggtgacaacgtcatctgtgggagctacgatagcaagctggtgtggtttgacctggatctttccaccaagccatacaggatgctgagacaccacaagaaggctctgcgggctgtggccttccacccgcggtacccactctttgcgtcaggctcggacgacggcagtgtcatcgtctgccatggcatggtgtacaatgaccttctgcagaaccccttgctggtgcccgtcaaggtgctgaagggacacgtgctgacccgagatctgggagtgctggacgtcatcttccaccccacccagccgtgggtcttctcctcgggggcagacgggactgtccgcctcttcacctagctgttctgcctgcctggggctggggtggtcgtgctgaagtcaacagagcctttaccctgtg

SEQ ID NO: 783 - protein, 662 aa, Homo sapiens
MPPPAAAAGLAGRPGRGAGSRLRPAVAAAGRRAHMIRCRHGGPRLQDIRNTVGNVPLEWYDDFPHVGYDLDGRRIYKPLRTRDELDQFLDKMDDPDYWRTVQDPMTGRDLRLTDEQVALVRRLQSGQFGDVGFNPYEPAVDFFSGDVMIHPVTNRPADKRSFIPSLVEKEKVSRMVHAIKMGWIQPRRPRDPTPSFYDLWAQEDPNAVLGRHKMHVPAPKLALPGHAESYNPPPEYLLSEEERLAWEQQEPGERKLSFLPRKFPSLRAVPAYGRFIQERFERCLDLYLCPRQRKMRVNVDPEDLIPKLPRPRDLQPFPTCQALVYRGHSDLVRCLSVSPGGQWLVSGSDDGSLRLWEVATARCVRTVPVGGVVKSVAWNPSPAVCLVAAAVEDSVLLLNPALGDRLVAGSTDQLLSAFVPPEEPPLQPARWLEASEEERQVGLRLRICHGKPVTQVTWHGRGDYLAVVLATQGHTQVLIHQLSRRRSQSPFRRSHGQVQRVAFHPARPFLLVASQRSVRLYHLLRQELTKKLMPNCKWVSSLAVHPAGDNVICGSYDSKLVWFDLDLSTKPYRMLRHHKKALRAVAFHPRYPLFASGSDDGSVIVCHGMVYNDLLQNPLLVPVKVLKGHVLTRDLGVLDVIFHPTQPWVFSSGADGTVRLFT

SEQ ID NO: 784 - DNA, 2405 bp, Homo sapiens
gggccacacagcggacccctaagcggaccgctggcaccggtcgggtggcagcagagtgtcgctcgacatgggggaggccggggctggcgctggcgcctcgggagggccggaggcaagcccggaggcagaggtggtgaagctgctgcccttcctggcgccgggcgcgcgggcggacctgcaggcggcggcggtgcggcacgtgctggcgctgactggctgcggacccggccgcgcgctgttggcggggcaggcggcgctgctgcaggcgctgatggagctggcgccggcctctgccccggcccgggacgccgcccgcgcgctcgtgaacttggccgccgaccccggcctgcacgagacattgctggcggccgaccccgggctgccagcgcgcctgatgggccgcgcgttggacccgcagtggccctgggccgaggaggcggccgccgcgctagccaacctcagtcgcgagccggcgccgtgtgcagcgctcatggcggcgctggcggccgcggagccggcagactcgggcctggagcggctggtgcgcgcgctgtgcacgcccggctacaacgcccgcgcgcccctgcactacctagcgccgctgctctccaacctcagccaacgccctgcggcgcgggccttcctactggaccccgacaggtgcgtggtccagcggctgctgccccttacccagtaccccgactcctctgtacgcaggggcggggtggtggggacgctgcggaattgctgcttcgagcaccgacatcacgagtggttgcttggacctgaggtggacattctcccctttttgctcctgcccttggctgggcctgaggatttctccgaggaagagatgcaacggctgcctgtcgacttgcagtacctgccaccagacaagcagcgagaacctgatgcagacatccgcaagatgcttgttgaagccatcatgctgctgacagccacagcaccaggtcggcagcaggtgcgggaccagggagcctacctgatccttcgagagctgcacagctgggagccggagcccgacgtgcggacggcttgtgagaagctcatccaggtgcttattggggacgagcctgaacgtggcatggaaaacctgctggaggtgcaggtgcctgaggatgtggagcagcagctgcagcagctggattgcagggagcaggagcagttggagcgggagctggccccagagccatgggtggagagggccacacccacctgaggcccctgcagccggacaccagctccagggtcccctttgccaggctttctcagaccaggccttcctgcagctgtctgcaggccccctgggtccccttgttcagagactgtgctcttctgagaagcagagctacgcttaggctccagtaaggattggaggcactttccagccctgtgcagtgttgctaccagcaagaatgaaggttgtgcagagcagtactgtgaggtaggcaccgtgactcggctgcctgtgcagaaggtggaggtggcaggcggatggccagggagccatgagaagactcttcctgggcacggcgtggggactggacagaaaaccactgcaagccccaaggagccagctgaagcctcccaatccccagggcactgcagagtctgggcagaggtgggcgcataggtacaagtgctgctttgtcagcctcactccctgcagctctcagctccctgttccctgagacctggcctcaaagggctgacccagccatacgtagatcctggggtctttctaggactgtgcctccctgcttgacctatgctccaggaccctgccctcaacccttgtcagctccctaagtcttcctgtttcccagtctcagattgagtgggtgctctcattggcctctctagctaggccgtctccctggtcagcttccttgagcctgggccactcctccctggccttcttacctctgccaagagcctccagatgtgcctgcagcctagtccctgcccaagcttctcccccagccaccctctgcccctgtggtagagcccactataggcccaggcgccttacgtgcttctcccctggacctatgtgcatccctcacctgccagttatgtggctgccaagccccacaggctgtcatggtggctcttgccacacttcccttcctgagctgacctgacctcactgccacctcttgcattgggatcctgagggctggcccctgctcactgatgggccctcccaggcccgtcaagccctggtgaaggagcttagcttgtcttcttggcaattcacaatgcctcactccacaccctaaaactggagcgtcccctatggtctcctgctgtggcttgggtgccgggcgtctcccgcctccaggatctcctctcacctgcccccattaaagctctgccactca

SEQ ID NO: 785 - protein, 390 aa, Homo sapiens
MGEAGAGAGASGGPEASPEAEVVKLLPFLAPGARADLQAAAVRHVLALTGCGPGRALLAGQAALLQALMELAPASAPARDAARALVNLAADPGLHETLLAADPGLPARLMGRALDPQWPWAEEAAAALANLSREPAPCAALMAALAAAEPADSGLERLVRALCTPGYNARAPLHYLAPLLSNLSQRPAARAFLLDPDRCVVQRLLPLTQYPDSSVRRGGVVGTLRNCCFEHRHHEWLLGPEVDILPFLLLPLAGPEDFSEEEMQRLPVDLQYLPPDKQREPDADIRKMLVEAIMLLTATAPGRQQVRDQGAYLILRELHSWEPEPDVRTACEKLIQVLIGDEPERGMENLLEVQVPEDVEQQLQQLDCREQEQLERELAPEPWVERATPT

SEQ ID NO: 786 - DNA, 2422 bp, Homo sapiens
ctcctgcgcacgcggcccggtcgctgtcggaagcggctgtgcgggtggcggccggcgcgcggtggggcatggcgggttcgcggggtgcggggcgcacggcggcgccgagcgtgcggccggagaagcggcggtctgagcccgaactggagcctgagcccgagccggagccccccctcctctgcacctctcctctcagccacagcaccggcagcgattctggcgtctccgacagcgaggagagtgtgttctcaggcctggaagattccggcagtgacagcagtgaggatgatgacgaaggcgacgaggagggagaggacggagcccttgatgacgagggccacagtgggattaaaaagaccactgaggagcaggtgcaggccagcactccttgcccgaggacagagatggcgagcgcccggattggggatgagtatgcggaggacagctctgatgaggaggacatccggaacacggtgggcaacgtgcccttggagtggtacgatgacttcccccacgtgggctacgacctggatggcaggcgcatctacaagcccctgcggacccgggatgagctggaccagttcctggacaagatggacgatcctgactactggcgcaccgtgcaggacccgatgacagggcgggacctgagactgacggatgagcaggtggccctggtgcggcggctgcagagtggccagtttggggatgtgggcttcaacccctatgagccggctgtcgacttcttcagcggggacgtcatgatccacccggtgaccaaccgcccggccgacaagcgcagcttcatcccctccctggtggagaaggagaaggtctctcgcatggtgcacgccatcaagatgggctggatccagcctcgccggccccgagaccccacccccagcttctatgacctgtgggcccaggaggaccccaacgccgtgctcgggcgccacaagatgcacgtacctgctcccaagctggccctgccaggccacgccgagtcgtacaacccaccccctgaatacctgctcagcgaggaggagcgcttggcgtgggaacagcaggagccaggcgagaggaagctgagctttttgccacgcaagttcccgagcctgcgggccgtgcctgcctacggacgcttcatccaggaacgcttcgagcgctgccttgacctgtacctgtgcccacggcagcgcaagatgagggtgaatgtagaccctgaggacctcatccccaagctgcctcggccgagggacctgcagcccttccccacgtgccaggccctggtctacaggggccacagtgaccttgtccggtgcctcagtgtctctcctgggggccagtggctggtttcaggctctgacgacggctccctgcggctctgggaggtggccactgcccgctgtgtgaggactgttcccgtggggggcgtggtgaagagtgtggcctggaaccccagccccgctgtctgcctggtggctgcagccgtggaggactcggtgctgctgctgaacccagctctgggggaccggctggtggcgggcagcacagatcagctgttgagcgccttcgtcccgcctgaggagccccccttgcagccggcccgctggctggaggcctcagaggaggagcgccaagtgggcctgcggctgcgcatctgccacgggaagccagtgacgcaggtgacctggcacgggcgtggggactacctggccgtggtgctggccacccaaggccacacccaggtgctgattcaccagctgagccgtcgccgcagccagagtccgttccgccgcagccacggacaggtgcagcgagtggccttccaccctgcccggcccttcctgttggtggcgtcccagcgcagcgtccgcctctaccacctgctgcgccaggagctcaccaagaagctgatgcccaactgcaagtgggtgtccagcctggcggtgcaccctgcaggtgacaacgtcatctgtgggagctacgatagcaagctggtgtggtttgacctggatctttccaccaagccatacaggatgctgagacaccacaagaaggctctgcgggctgtggccttccacccgcggtacccactctttgcgtcaggctcggacgacggcagtgtcatcgtctgccatggcatggtgtacaatgaccttctgcagaaccccttgctggtgcccgtcaaggtgctgaagggacacgtgctgacccgagatctgggagtgctggacgtcatcttccaccccacccagccgtgggtcttctcctcgggggcagacgggactgtccgcctcttcacctagctgttctgcctgcctggggctggggtggtcgtgctgaagtcaacagagcctttaccctgtgctgaaaaaaaaaaaaaaaaaaaaaaaaaaaaaaaaaaaaaaaaaaaaaaaaa

SEQ ID NO: 787 - protein, 746 aa, Homo sapiens
MAGSRGAGRTAAPSVRPEKRRSEPELEPEPEPEPPLLCTSPLSHSTGSDSGVSDSEESVFSGLEDSGSDSSEDDDEGDEEGEDGALDDEGHSGIKKTTEEQVQASTPCPRTEMASARIGDEYAEDSSDEEDIRNTVGNVPLEWYDDFPHVGYDLDGRRIYKPLRTRDELDQFLDKMDDPDYWRTVQDPMTGRDLRLTDEQVALVRRLQSGQFGDVGFNPYEPAVDFFSGDVMIHPVTNRPADKRSFIPSLVEKEKVSRMVHAIKMGWIQPRRPRDPTPSFYDLWAQEDPNAVLGRHKMHVPAPKLALPGHAESYNPPPEYLLSEEERLAWEQQEPGERKLSFLPRKFPSLRAVPAYGRFIQERFERCLDLYLCPRQRKMRVNVDPEDLIPKLPRPRDLQPFPTCQALVYRGHSDLVRCLSVSPGGQWLVSGSDDGSLRLWEVATARCVRTVPVGGVVKSVAWNPSPAVCLVAAAVEDSVLLLNPALGDRLVAGSTDQLLSAFVPPEEPPLQPARWLEASEEERQVGLRLRICHGKPVTQVTWHGRGDYLAVVLATQGHTQVLIHQLSRRRSQSPFRRSHGQVQRVAFHPARPFLLVASQRSVRLYHLLRQELTKKLMPNCKWVSSLAVHPAGDNVICGSYDSKLVWFDLDLSTKPYRMLRHHKKALRAVAFHPRYPLFASGSDDGSVIVCHGMVYNDLLQNPLLVPVKVLKGHVLTRDLGVLDVIFHPTQPWVFSSGADGTVRLFT

SEQ ID NO: 788 - DNA, 2166 bp, Homo sapiens
gcggcgggagcgcgcccgttgcaagatggcggcggccatgctgggccccggggctgtgtgtgcgcagcgggcggcggcgcggcccggaaggctggcgcggcgacggcgttagcccggccctcggcccctctttgcggccgctccctccgcctattccctccttgctcgagatggatctgcccgtgggccccggcgcggcggggcccagcaacgtcccggccttcctgaccaagctgtggaccctcgtgagcgacccggacaccgacgcgctcatctgctggagcccgagcgggaacagcttccacgtgttcgaccagggccagtttgccaaggaggtgctgcccaagtacttcaagcacaacaacatggccagcttcgtgcggcagctcaacatgtatggcttccggaaagtggtccacatcgagcagggcggcctggtcaagccagagagagacgacacggagttccagcacccatgcttcctgcgtggccaggagcagctccttgagaacatcaagaggaaagtgaccagtgtgtccaccctgaagagtgaagacataaagatccgccaggacagcgtcaccaagctgctgacggacgtgcagctgatgaaggggaagcaggagtgcatggactccaagctcctggccatgaagcatgagaatgaggctctgtggcgggaggtggccagccttcggcagaagcatgcccagcaacagaaagtcgtcaacaagctcattcagttcctgatctcactggtgcagtcaaaccggatcctgggggtgaagagaaagatccccctgatgctgaacgacagtggctcagcacattccatgcccaagtatagccggcagttctccctggagcacgtccacggctcgggcccctactcggccccctccccagcctacagcagctccagcctctacgcccctgatgctgtggccagctctggacccatcatctccgacatcaccgagctggctcctgccagccccatggcctcccccggcgggagcatagacgagaggcccctatccagcagccccctggtgcgtgtcaaggaggagccccccagcccgcctcagagcccccgggtagaggaggcgagtcccgggcgcccatcttccgtggacaccctcttgtccccgaccgccctcattgactccatcctgcgggagagtgaacctgcccccgcctccgtcacagccctcacggacgccaggggccacacggacaccgagggccggcctccctcccccccgcccacctccacccctgaaaagtgcctcagcgtagcctgcctggacaagaatgagctcagtgaccacttggatgctatggactccaacctggataacctgcagaccatgctgagcagccacggcttcagcgtggacaccagtgccctgctggacctgttcagcccctcggtgaccgtgcccgacatgagcctgcctgaccttgacagcagcctggccagtatccaagagctcctgtctccccaggagccccccaggcctcccgaggcagagaacagcagcccggattcagggaagcagctggtgcactacacagcgcagccgctgttcctgctggaccccggctccgtggacaccgggagcaacgacctgccggtgctgtttgagctgggagagggctcctacttctccgaaggggacggcttcgccgaggaccccaccatctccctgctgacaggctcggagcctcccaaagccaaggaccccactgtctcctagaggccccggaggagctgggccagccgcccacccccacccccagtgcagggctggtcttggggaggcagggcagcctcgcggtcttgggcactggtgggtcggccgccatagccccagtaggacaaacgggctcgggtctgggcagcacctctggtcaggagggtcaccctggcctgccagtctgccttcccccaaccccgtgtcctgtggtttggttggggcttcacagccacacctggactgaccctgcaggttgttcatagtcagaattgtattttggatttttacacaactgtcccgttccccgctccacagagatacacagatatatacacacagtggatggacggacaagacaggcagagatctataaacagacaggctctatgctaaaaaaaaaaaaaaa

SEQ ID NO: 789 - protein, 529 aa, Homo sapiens
MDLPVGPGAAGPSNVPAFLTKLWTLVSDPDTDALICWSPSGNSFHVFDQGQFAKEVLPKYFKHNNMASFVRQLNMYGFRKVVHIEQGGLVKPERDDTEFQHPCFLRGQEQLLENIKRKVTSVSTLKSEDIKIRQDSVTKLLTDVQLMKGKQECMDSKLLAMKHENEALWREVASLRQKHAQQQKVVNKLIQFLISLVQSNRILGVKRKIPLMLNDSGSAHSMPKYSRQFSLEHVHGSGPYSAPSPAYSSSSLYAPDAVASSGPIISDITELAPASPMASPGGSIDERPLSSSPLVRVKEEPPSPPQSPRVEEASPGRPSSVDTLLSPTALIDSILRESEPAPASVTALTDARGHTDTEGRPPSPPPTSTPEKCLSVACLDKNELSDHLDAMDSNLDNLQTMLSSHGFSVDTSALLDLFSPSVTVPDMSLPDLDSSLASIQELLSPQEPPRPPEAENSSPDSGKQLVHYTAQPLFLLDPGSVDTGSNDLPVLFELGEGSYFSEGDGFAEDPTISLLTGSEPPKAKDPTVS

SEQ ID NO: 790 - DNA, 2015 bp, Homo sapiens
cgcctcaggtcggccgcggactacaaatggacgagagaggcggccgtccattagttagcggctccggagcaacgcagccgttgtccttgaggccgacgggcctgacgcgggcgggttgaacgcgctggtgaggcggtcacccgggctacggcggccggcagggggcagtggcggccgttgtctagggcccggaggtggggccgcgcgcctcgggcgctacgaacccggcaggcccacgcttggctgcggccgggtgcgggctgaggccatgggcgaccgcggcagctcccggcgccggaggacagggtcgcggccctcgagccacggcggcggcgggcctgcggcggcggaagaggaggtgcgggacgccgctgcgggccccgacgtgggagccgcgggggacgcgccagccccggcccccaacaaggacggagacgccggcgtgggcagcggccactgggagctgaggtgccatcgcctgcaggattctttattcagctctgacagtggcttcagcaactaccgtggcatcctgaactggtgtgtggtgatgctgatcttgagcaatgcccggttatttctggagaacctcatcaagtatggcatcctggtggaccccatccaggtggtttctctgttcctgaaggatccctatagctggcccgccccatgcctggttattgcggccaatgtctttgctgtggctgcattccaggttgagaagcgcctggcggtgggtgccctgacggagcaggcgggactgctgctgcacgtggccaacctggccaccattctgtgtttcccagcggctgtggtcttactggttgagtctatcactccagtgggctccctgctggcgctgatggcgcacaccatcctcttcctcaagctcttctcctaccgcgacgtcaactcatggtgccgcagggccagggccaaggctgcctctgcagggaagaaggccagcagtgctgctgccccgcacaccgtgagctacccggacaatctgacctaccgcgatctctactacttcctcttcgcccccaccttgtgctacgagctcaactttccccgctctccccgcatccggaagcgctttctgctgcgacggatccttgagatgctgttcttcacccagctccaggtggggctgatccagcagtggatggtccccaccatccagaactccatgaagcccttcaaggacatggactactcacgcatcatcgagcgcctcctgaagctggcggtccccaatcacctcatctggctcatcttcttctactggctcttccactcctgcctgaatgccgtggctgagctcatgcagtttggagaccgggagttctaccgggactggtggaactccgagtctgtcacctacttctggcagaactggaacatccctgtgcacaagtggtgcatcagacacttctacaagcccatgcttcgacggggcagcagcaagtggatggccaggacaggggtgttcctggcctcggccttcttccacgagtacctggtgagcgtccctctgcgaatgttccgcctctgggcgttcacgggcatgatggctcagatcccactggcctggttcgtgggccgctttttccagggcaactatggcaacgcagctgtgtggctgtcgctcatcatcggacagccaatagccgtcctcatgtacgtccacgactactacgtgctcaactatgaggccccagcggcagaggcctgagctgcacctgagggcctggcttctcactgccacctcacacccgctgccagagcccacctctcctcctaggcctcgagtgctggggatgggcctggctgcacagcatcctcctctggtcccagggaggcctctctgcccctatggggctctgtcctgcacccctcagggatggcgacagcaggccagacacagtctgatgccagctgggagtcttgctgaccctgccccgggtccgagggtgtcaataaagtgctgtccagtgaaaaaaaaaaaaaaaaaa

SEQ ID NO: 791 - protein, 488 aa, Homo sapiens
MGDRGSSRRRRTGSRPSSHGGGGPAAAEEEVRDAAAGPDVGAAGDAPAPAPNKDGDAGVGSGHWELRCHRLQDSLFSSDSGFSNYRGILNWCVVMLILSNARLFLENLIKYGILVDPIQVVSLFLKDPYSWPAPCLVIAANVFAVAAFQVEKRLAVGALTEQAGLLLHVANLATILCFPAAVVLLVESITPVGSLLALMAHTILFLKLFSYRDVNSWCRRARAKAASAGKKASSAAAPHTVSYPDNLTYRDLYYFLFAPTLCYELNFPRSPRIRKRFLLRRILEMLFFTQLQVGLIQQWMVPTIQNSMKPFKDMDYSRIIERLLKLAVPNHLIWLIFFYWLFHSCLNAVAELMQFGDREFYRDWWNSESVTYFWQNWNIPVHKWCIRHFYKPMLRRGSSKWMARTGVFLASAFFHEYLVSVPLRMFRLWAFTGMMAQIPLAWFVGRFFQGNYGNAAVWLSLIIGQPIAVLMYVHDYYVLNYEAPAAEA

SEQ ID NO: 792 - DNA, 3552 bp, Homo sapiens
gtggggacccgcgctgcctccgccgctcctcggatggtgacggggccctgccgccgcagcccccccaagccccggctccgcaggcccacagcgccggagccccgcaggaatcatgcccaggtccttcctggtcaagaaggtcaaacttgacgcgttctcttcggccgacctggagagcgcctacggacgcgcccgcagcgacctcggcgcgccactgcacgataaagggtacctcagcgactacgtggggccctcgtccgtctacgatggcgacgccgaggctgcgctgctcaaagggccgtcgccggagcccatgtacgcagcagctgtgcgtggagagctgggtccggcggctgcagggtctgcgccgccgcccaccccgcgcccggagctggccaccgctgcgggcggctacatcaacggcgacgcggccgtcagcgagggctacgcggcggacgccttcttcatcaccgacgggcgctcgcggcgtaaggcttccaatgccggctctgccgccgctccctccacagcctcggcggcggcccccgacggcgacgccggaggcgggggcggggcgggcgggcgcagcttgggatccgggccggggggccggggcggcacgcgcgcgggggcaggcaccgaggcgcgcgcggggccaggggccgcaggtgctggcggccggcacgcgtgcggcgagtgcggcaaaacatacgccacgtcgtcgaacctgagccgccacaagcagacgcaccgcagcctggacagccagctggcgcggcgctgcccgacgtgcggcaaggtgtacgtgtccatgccggccatggccatgcacctgctcacgcacgacctgcgccacaagtgcggcgtgtgcggcaaagccttctcgcggccctggctgctgcagggccacatgcgctcgcacaccggcgagaaacccttcggctgcgcgcactgcggcaaggccttcgccgaccgctccaacctgcgcgcgcacatgcagacgcattcggccttcaagcacttccagtgcaagcgctgcaagaagagcttcgcgctcaagtcctatctcaacaagcactacgagtcggcctgcttcaagggcggcgccggaggccccgcggctcctgcgccgccacagctcagccctgtgcaggcctagggcggcggggcctcccccagccaggtcggctctcagcaatacggccccccagggaagtcttcgctggcgtccgggtggaggggccggagggcgggcccctcctcacagcaatagggggaggggggcccggtcccaccccgccccgcccgccaggggccttgccggccccttcaagcaatagggtcccgaggggagacccaccccgagccccctcccctcccctccagggtgcccccggctttctcccagcaatagggtcgacgagacctagaaccgaacctcatctccgagttgggtctctgaagacgggggtgaggtgaggtagggagcgccctccttctcccgcctctgcgcccctggatcgcgtcgcagggactcaggtcttccccaccccttcccaagccttctagcgcagggcctgcggcccagacgtccagggagccggcccctccccggcagcaggccggggcggagcaggagcgggcgggcctgcagggacgcccctgcctagcagccttcgcggaactcccggcagtgttagacgcgttgtgggtcggggagaggggcggacggcggcaccccctccctcgggttgcttctggggcctcagtcggagccgccctcctaccctcgcctcgcatcctctgccaaatccgaattcttccagcccagcttcccgggctctgtcctccatatcgaataataatgacacatatcgaatcgcatggacttatccgacctcctcagaccccgcttccgccctgccccgggcccccacccccccccccgtaccccaggcattcgtgttggaggacggattcccggggccggcaggcaggcctgggcgctgccctctacacacctctgtcttcgctttgcgggtaaagccccctgggggggttgcggacgcgtcgggtttctttttctgtatttgtacgttttatttatgaacggattgcactcgggtcagggagggggcgctgaacccccatcttgcccgccgacgccgggggcctgggatgtccgggattactttccacgccccgaggcccgcccctagctgggagcctctagggagcctcaggccccgcctctccgaggcaggcccctcccctgagacccaggccccgcccctgagacccaggccccgcccccactcggttgccaactttcgcccgtctatgccaaagcctcggcggcgaccccgccccaagggcccgccccattggccgccgcctttgtgacgtcactgcatgcagccccacccctcctcccgatcctacccggggctgcccgctccccctccctcttaggtagtccgaagccgactatagagcaataatgcgcactgcatgcgaagctgccgccgcctctagagttactgagaatcaggtatcccctcgccctacccaccccataggcccctagatcagggacgctgcgcggggccggccgcgcagactttctccccacccctccccgacccccacggcagagcccggcggctgtaatggttccatgggcgggggtggggtggttgcccccaagacccctccttcaggcattaatcattcactgaccgttcattgagcacctactatgtgccaggccaattgctgagtccgccaggagcgcagccacctgctgggaggtgtgtttgcaggacaggggtccaaccggcttgggtgggccagggaagaacggcagatgcagagagaccaggtccctaggttcacatgccccctacactcctccccacctcaaccagtccctgctgggcacaactgggctctacctttgagttaggccttttgactccagctgagggggacagatccagggctcctgggcccccacacaggtggccacttctctgatcctctggccaacacacatctgccatgtccagccaggggcagagccatggctggagaagaaggtgccagctgtagcctatggtgtggccagcctcacccccagcagcaagcgtggctgcccccacaaggatgacccaccgctctgcacagcagtgcccacatccaaacaccctacacaaccaggtgtggtgcctgcacagctcccaagctggggcctgcccacctgtgccgcatgcacacgcacacacaggcgcccccacctcaccccaccccatactcctgtctacctacctaaggagaaagctggagggctgtgggcccgtcagggtctcctgcttccccctacaccccgccgccgtggaaagccatgggccccctcccgcccccataactaagcagcacaataaccgacttagcgaattcaggtagaaggaacgtttaggtagcacctattttgtactgattctacaagtagggcccgaggtgcgggggccctcgggtgggggctgcggccgc

SEQ ID NO: 793 - protein, 348 aa, Homo sapiens
MPRSFLVKKVKLDAFSSADLESAYGRARSDLGAPLHDKGYLSDYVGPSSVYDGDAEAALLKGPSPEPMYAAAVRGELGPAAAGSAPPPTPRPELATAAGGYINGDAAVSEGYAADAFFITDGRSRRKASNAGSAAAPSTASAAAPDGDAGGGGGAGGRSLGSGPGGRGGTRAGAGTEARAGPGAAGAGGRHACGECGKTYATSSNLSRHKQTHRSLDSQLARRCPTCGKVYVSMPAMAMHLLTHDLRHKCGVCGKAFSRPWLLQGHMRSHTGEKPFGCAHCGKAFADRSNLRAHMQTHSAFKHFQCKRCKKSFALKSYLNKHYESACFKGGAGGPAAPAPPQLSPVQA

SEQ ID NO: 794 - DNA, 615 bp, Homo sapiens
atggttcccgcgggagcgcctggccacgggacacatgtgtgccgctgtgatgcctcttccgtcaaggggactgggggcaaaaggggcgaggagcttgacagagagaggcaggccgccttccccggggcccgcccgccgcgcgctcccagccgctgtccgcgggtccgccccgcgcaaggtcattttgcgccgcaacgagcgcgctccagtatcgcacgcgctcccggcacacccgcgcccggacgctccccggggccgcccccgcgaccttggtccccagcggcagcggggcgcgtgggagcgcgctcggagcccgtagacccggaccaccgggcggggcggcgacgccgctgcgccgcacacccgcccggggggagagaggcgggggcgggacccccgccccccgcccgccgccgccgccgccgccgccgccgccgtcgccactgccgctcgctccggctgcagaacaataaagcaagcctcccagagacccccgccgaggacccctgcccggcggccaaacccccgcggaccgcccctctccgcccgcgccggttgagcgcgcccgggcgctggccgcggtgctgcccaggccggcgctggccgcggtgctga

SEQ ID NO: 795 - protein, 204 aa, Homo sapiens
MVPAGAPGHGTHVCRCDASSVKGTGGKRGEELDRERQAAFPGARPPRAPSRCPRVRPAQGHFAPQRARSSIARAPGTPAPGRSPGPPPRPWSPAAAGRVGARSEPVDPDHRAGRRRRCAAHPPGGREAGAGPPPPARRRRRRRRRRRHCRSLRLQNNKASLPETPAEDPCPAAKPPRTAPLRPRRLSAPGRWPRCCPGRRWPRC

SEQ ID NO: 796 - DNA, 7257 bp, Homo sapiens
cattttgtctcctgtaacaatttacgcgccgtgtaactgtgaatctttcaaagcctcagttttatgaccctgtggagccagtggactttgaaggacttctgatgacacacctgaacagcctggatgtgcagcttgcccaggagctcggggacttcactgatgacgacttggacgtggtgttcacgccaaaggaatgtaggactttgcagccctctttgccggaggaaggggttgaactggaccctcatgtcagggactgtgttcagacctacatccgtgagtggctaatcgtgaaccggaaaaaccaaggaagtccagaaatctgtggctttaaaaagactggatctcgaaaagattttcacaagacgcttccgaaacagacgtttgagtcggaaaccttggagtgcagtgaacccgctgctcaggcaggcccccgccacttaaacgtgctgtgcgacgtgtctgggaaaggccccgtcactgcctgtgactttgacctccgcagcctgcagcctgacaagcggctagaaaacctcctgcagcaagtgagtgccgaggactttgagaagcagaacgaggaggcccggaggaccaataggcaggccgagctctttgccctttacccatcagtggacgaggaggatgctgtggaaatacgtccagtaccagaatgtcccaaggaacacctgggcaacagaatattggtcaagttgctgaccttgaagttcgagattgaaattgagcccctgtttgccagcattgccctctacgatgttaaagaaaggaaaaagatctcagaaaattttcactgtgacctgaactctgaccagttcaaaggatttctgcgagctcacacgccttcagtggccgcatcaagtcaggcgagatctgcagtcttctcagtcacctacccgtcctcagacatctacctggtagtcaagattgaaaaagtcctgcagcagggagagattggagactgtgcagagccctacacggttatcaaagaaagtgatggtggaaagagtaaagaaaagattgaaaaactaaaactccaagctgaatccttctgccagcgtttggggaaataccggatgccctttgcctgggcacccataagcttatcaagcttcttcaatgtctccacccttgagagggaggtaactgatgtggactctgtggttgggagaagctcagtgggtgaacggaggacattggcccaatctagaaggctttctgaaagagccctctccttggaggaaaatggggttggatccaacttcaaaacctccactctgagcgttagcagctttttcaagcaggaaggagatcgccttagcgatgaagacttattcaagtttttagctgactacaaaagatcatcatccttacagagacgagtcaagtcaattccaggcttgctaagactggagatttctacagctccagagatcatcaattgctgtctgactcctgaaatgctgcccgtgaaaccctttcctgaaaaccggacacgcccgcacaaagagattttggaatttccaacacgagaagtatatgtccctcacactgtgtacagaaaccttctctatgtctacccacagaggctgaactttgtaaacaaactagcatcagcccggaacattacaataaagatccagtttatgtgtggagaagatgctagcaatgcgatgccggtcatctttggaaaatccagcgggcctgaatttctgcaggaagtgtacacagctgttacataccataataagtctcctgacttttatgaagaagtgaaaattaagctccccgctaagctcacagtaaatcaccacctcctgttcaccttctaccatatcagctgtcagcagaagcaaggagcctccgtggaaactctcctgggatattcatggctgccaattctcttaaatgaacgtcttcaaactggatcctactgtctcccagttgccttggaaaaattgccacccaactactccatgcattctgctgagaaagtcccattacagaatcctcccattaagtgggctgaaggacataagggagtatttaatattgaagtgcaagctgtttcttctgtacacacccaggacaaccacctggagaagttcttcaccctctgccactccctggagagccaggtgaccttccccatccgcgtgctggatcagaaaatcagcgagatggcgctggagcatgagctgaagctcagcatcatctgcctgaactcctcccgcctggagccgctcgtgctcttcctgcacctggtgctggacaagctcttccagctgtccgtgcagcccatggtcatcgctggccagacagccaacttctcccagtttgccttcgagtccgtggtggccatcgccaacagtctgcacaacagcaaggacctgagcaaggaccagcatgggaggaactgcctgctggcttcctacgtgcactacgtcttccgcctgccagaggtgcaaagggatgtgcccaagtcaggcgctcccactgccctcctagaccctcggagctaccacacgtatggccgcacatcagctgctgctgtgagttcaaagctgctgcaggcccgggtgatgagcagcagtaacccagacctcgcggggacacactccgcagcagacgaggaagtgaagaacatcatgtcttcaaagatcgccgatcgcaactgcagccgaatgtcttactattgctctggcagtagtgatgctccaagttcacctgcagccccaaggccagccagcaaaaagcatttccatgaggagcttgcccttcagatggtggtcagcaccggaatggtgagagaaacagtcttcaagtatgcctggttcttctttgagcttctggtgaaaagcatggcccagcacgtacataacatggacaaacgggacagttttcggaggactcgtttttctgaccgtttcatggatgacataactactattgttaatgtggtcacctcggaaattgcagcccttttagtaaaaccacagaaggaaaatgaacaggcggaaaagatgaacatcagcctggctttcttcttgtatgaccttctctccctcatggatcggggctttgtgtttaacctcatcagacattattgcagccagctgtcagccaagctcagtaaccttccaacgctcatttccatgaggctagagttcctgagaatcctctgtagccatgagcattacctcaatctgaaccttttttttatgaatgctgatactgctccaacatctccttgtccttccatatcttcccagaactcaagctcctgctccagcttccaggaccagaagatcgccagcatgttcgatctgacttccgagtaccgccagcagcacttcctcaccgggctcctcttcacagaactggctgctgccctggatgccgaaggggaaggaatcagcaaagtacaaaggaaagctgtcagtgcaattcacagcctgctaagttctcacgacctggacccacgctgtgtcaaaccagaggtgaaggtcaaaatcgccgccctttacctacctttagttggcatcattttggatgctttgccacagctctgtgactttacagttgcagatactcgcagataccgcaccagtggctcggatgaagaacaagaaggagccggtgccattaaccagaatgtggctctggccatagcagggaataatttcaatttgaaaacaagtggaatagtgctgtcttccttgccctataagcagtacaacatgctgaacgcggacactactcgcaacctcatgatctgcttcctctggatcatgaaaaatgctgatcagagcctcattaggaagtggattgctgacctgccatcaacgcagctcaacaggattttagatctacttttcatctgtgtgttatgttttgagtataagggaaaacagagttctgacaaagtcagtacccaagtcctgcagaagtcaagggatgtcaaggcccggctggaagaggctttgctccgtggggaaggggccagaggggagatgatgcgccgccgggctccagggaacgaccgatttccaggcctaaatgaaaatttgagatggaagaaagagcagacacattggcggcaagctaatgagaagctagataaaacaaaggccgagttagatcaagaagccttgatcagtggcaatctggctacagaagcacatttaatcatcctggatatgcaggaaaacattatccaggcgagctcggctctggactgtaaagacagcctgctgggaggtgttctgagggtgctggtgaattctctgaactgtgatcagagtaccacctacctgactcactgctttgcaacactccgtgctctcatcgccaagtttggagacttactcttcgaagaggaggtggaacagtgtttcgacctatgtcaccaagtcctgcaccactgcagcagcagcatggatgtcacccggagccaagcctgtgccaccctttacctcctcatgaggttcagttttggagccaccagtaattttgcaagagtaaagatgcaagtaaccatgtccctggcatctttggtgggaagagcaccagactttaatgaagagcacctgagaagatccttgaggacaattttggcctattcagaagaggacacagccatgcagatgactccttttcccacccaggtggaggaacttctctgtaatctgaatagcatcttatatgacacagtgaaaatgagggaatttcaggaagatcctgagatgcttatggatctcatgtacagaattgccaagagttaccaggcatctcctgatctgcggctgacctggctccagaacatggcagagaaacacaccaagaagaagtgctacacggaggctgccatgtgcctggtgcacgccgctgcgttagtggctgagtatctgagcatgctggaggaccacagctacctgcccgtgggcagtgtcagcttccagaatatttcttccaatgtgctggaggagtctgtggtctctgaggacaccctgtcacctgacgaggatggggtgtgcgcaggccagtacttcaccgagagtggcctggtaggcctcctggagcaggccgcggagctcttcagcacgggaggcttatatgagacagttaatgaggtctacaagctggtcatccccatcctagaagcgcatcgagaattccggaagctgacactcactcacagcaagctgcagagagccttcgacagcatcgttaacaaggatcataagagaatgtttggaacctacttccgagttggtttctttggatccaaatttggggatttggatgaacaggagtttgtctacaaagagcctgcaattaccaagcttcctgagatctcacatagactagaggcattttatggtcaatgttttggtgcagaatttgtggaagtgattaaagactccactcctgtggacaaaaccaagttggatcctaacaaggcctacatacagatcacttttgtggagccctactttgatgagtatgagatgaaagacagggtcacatactttgagaagaatttcaacctccggaggttcatgtacaccaccccgttcaccctggaggggcggcctcggggagagctgcatgagcagtacagaaggaacacagtcctgaccactatgcacgccttcccctacatcaagaccaggatcagcgtcatccagaaggaggagtttgttttgacaccgattgaagttgccattgaagacatgaagaagaagaccctgcagttagcagttgccattaaccaggagccgcctgatgcaaagatgcttcagatggtgctgcaaggctctgtgggagctactgtaaatcagggaccactggaagtagcccaagtgtttttggctgaaattcctgctgatccaaaactctatcgacatcacaacaagttgaggttatgctttaaggaattcatcatgagatgtggtgaagctgtagagaaaaacaagcgtctcatcacggcagaccagagggaatatcagcaggaactcaaaaagaactataacaagctaaaagagaacctcaggccaatgatcgagcggaaaattccagaactgtacaagccaatattcagagttgagagtcaaaagagggactccttccacagatctagtttcaggaaatgtgaaacccagttgtcacagggcagctaagaaaagccatcttcattcgtggagactgtggccctgcaaccctggagaaggacttgctggtacttaaaaaatgggacatttgccacccaggactgactgtacactccctgatcagccagcactctggaagctttgggatcccaggaaccatggaattattcccaaatggactctgaccagatttttgccatactggggggtggcgggatggaggatgggtactcaggcatgactgcgtatttattaaagtgtgtttttccacaatgtaccaaacaaggcataagcagcttctcctgctgactggccaatcactgcccatctgagagatgatttcctctggcccatatttgaatttattggagtaactcaaattgcctgaggaaaaatggaaaaattatccaccagtcgattcaaactgaatttcactctttataggaaggcagggcaaacttgtaggagtacgaaacattttcaataaatctacaaagggaagccttactacaattccaaaaatcatcatggttggaaatttgggaggagattatttgtgaacttgttacccttttggtaatggtggactaattgctgtatagttatttttgttttattattactgttacattaatttaacatgcatttatagaagaatacattcaaagcactgatgtaggagatacacggtacttggagcagtcagccagaaatcacagatactgctttcacttaaatggaaacaattctccgataatgctttgctttttttcttatgtcactcttgtgtactatctatttttctcctctctgggaccaagtttctttttataaagcaataatatctctgttttcatttcagaacattgtgctgtctgtcagcatatgtatatcagctacaaaatatattcaactttgacttcttttgacaaaggactttaggaaaaagaggaacaaagacattatttgagaattaaattatatatttttaatatgactgtgaccttgactgataataaagatgtaataagaattgcaagctaaaaaaaaaaaaaaaaaaaaaaaaaaa

SEQ ID NO: 797 - protein, 2031 aa, Homo sapiens
MTHLNSLDVQLAQELGDFTDDDLDVVFTPKECRTLQPSLPEEGVELDPHVRDCVQTYIREWLIVNRKNQGSPEICGFKKTGSRKDFHKTLPKQTFESETLECSEPAAQAGPRHLNVLCDVSGKGPVTACDFDLRSLQPDKRLENLLQQVSAEDFEKQNEEARRTNRQAELFALYPSVDEEDAVEIRPVPECPKEHLGNRILVKLLTLKFEIEIEPLFASIALYDVKERKKISENFHCDLNSDQFKGFLRAHTPSVAASSQARSAVFSVTYPSSDIYLVVKIEKVLQQGEIGDCAEPYTVIKESDGGKSKEKIEKLKLQAESFCQRLGKYRMPFAWAPISLSSFFNVSTLEREVTDVDSVVGRSSVGERRTLAQSRRLSERALSLEENGVGSNFKTSTLSVSSFFKQEGDRLSDEDLFKFLADYKRSSSLQRRVKSIPGLLRLEISTAPEIINCCLTPEMLPVKPFPENRTRPHKEILEFPTREVYVPHTVYRNLLYVYPQRLNFVNKLASARNITIKIQFMCGEDASNAMPVIFGKSSGPEFLQEVYTAVTYHNKSPDFYEEVKIKLPAKLTVNHHLLFTFYHISCQQKQGASVETLLGYSWLPILLNERLQTGSYCLPVALEKLPPNYSMHSAEKVPLQNPPIKWAEGHKGVFNIEVQAVSSVHTQDNHLEKFFTLCHSLESQVTFPIRVLDQKISEMALEHELKLSIICLNSSRLEPLVLFLHLVLDKLFQLSVQPMVIAGQTANFSQFAFESVVAIANSLHNSKDLSKDQHGRNCLLASYVHYVFRLPEVQRDVPKSGAPTALLDPRSYHTYGRTSAAAVSSKLLQARVMSSSNPDLAGTHSAADEEVKNIMSSKIADRNCSRMSYYCSGSSDAPSSPAAPRPASKKHFHEELALQMVVSTGMVRETVFKYAWFFFELLVKSMAQHVHNMDKRDSFRRTRFSDRFMDDITTIVNVVTSEIAALLVKPQKENEQAEKMNISLAFFLYDLLSLMDRGFVFNLIRHYCSQLSAKLSNLPTLISMRLEFLRILCSHEHYLNLNLFFMNADTAPTSPCPSISSQNSSSCSSFQDQKIASMFDLTSEYRQQHFLTGLLFTELAAALDAEGEGISKVQRKAVSAIHSLLSSHDLDPRCVKPEVKVKIAALYLPLVGIILDALPQLCDFTVADTRRYRTSGSDEEQEGAGAINQNVALAIAGNNFNLKTSGIVLSSLPYKQYNMLNADTTRNLMICFLWIMKNADQSLIRKWIADLPSTQLNRILDLLFICVLCFEYKGKQSSDKVSTQVLQKSRDVKARLEEALLRGEGARGEMMRRRAPGNDRFPGLNENLRWKKEQTHWRQANEKLDKTKAELDQEALISGNLATEAHLIILDMQENIIQASSALDCKDSLLGGVLRVLVNSLNCDQSTTYLTHCFATLRALIAKFGDLLFEEEVEQCFDLCHQVLHHCSSSMDVTRSQACATLYLLMRFSFGATSNFARVKMQVTMSLASLVGRAPDFNEEHLRRSLRTILAYSEEDTAMQMTPFPTQVEELLCNLNSILYDTVKMREFQEDPEMLMDLMYRIAKSYQASPDLRLTWLQNMAEKHTKKKCYTEAAMCLVHAAALVAEYLSMLEDHSYLPVGSVSFQNISSNVLEESVVSEDTLSPDEDGVCAGQYFTESGLVGLLEQAAELFSTGGLYETVNEVYKLVIPILEAHREFRKLTLTHSKLQRAFDSIVNKDHKRMFGTYFRVGFFGSKFGDLDEQEFVYKEPAITKLPEISHRLEAFYGQCFGAEFVEVIKDSTPVDKTKLDPNKAYIQITFVEPYFDEYEMKDRVTYFEKNFNLRRFMYTTPFTLEGRPRGELHEQYRRNTVLTTMHAFPYIKTRISVIQKEEFVLTPIEVAIEDMKKKTLQLAVAINQEPPDAKMLQMVLQGSVGATVNQGPLEVAQVFLAEIPADPKLYRHHNKLRLCFKEFIMRCGEAVEKNKRLITADQREYQQELKKNYNKLKENLRPMIERKIPELYKPIFRVESQKRDSFHRSSFRKCETQLSQGS

SEQ ID NO: 798 - DNA, 6672 bp, Homo sapiens
atcctttatggttgaagggtgttggaggaagcagagttttcatcagctgctgaagtggcaactaatagaggtttgaatggccgtagaaaaatattgtgttacttgtttgttgtctaggggctcttggctttgggcctcagtgcaagtccattggaaaaggcagctgcaacaatctagtggtcaccagcagtcccatgatggttcagcgactgggactcatttcacctccagcaagccaggtctctacagcatgcaaccagatcagtcctagcttacagagggcaatgaatgcagccaacctgaatatacctccttcagataccaggtcccttatttcgcgtgagtctttggcgtccacgaccttgagtctgacggaaagtcagtcggcctcaagcatgaagcaggagtggtcccagggctacagggccctcccttcgctctccaaccacggctctcagaatggccttgatctaggggatctccttagccttcctcccgggacatccatgtccagcaatagtgtctctaactcattaccatcctacctttttggcacggaaagtagccactctccttaccctagtcctcggcactcatccaccaggtcccactcggcccgctccaagaagagagcgctgtccttgtccccgctgtccgatggcatcgggatagatttcaataccatcatccgcacgtcgcccacgtccttggtggcctacatcaacgggtcgagggcttcgccggccaacctgtccccgcagccggaggtctacgggcatttcctgggcgtgcgcggcagctgcattccccagccgcgcccggtgcccggcagccagaagggcgtgctggtggcccctggaggcctggcgctgccggcctacggcgaggacggggccctggagcacgagcgcatgcaacagctggagcacggcggcctgcagccaggcctggtcaaccacatggtggtgcagcatggcctgccgggccccgacagccagtcggccggcctgttcaagaccgaacgcctggaggagttcccgggcagcaccgtagacctaccccccgcgcctccgctccctcctctgccgccgcccccaggccccccacccccttaccatgcccatgcgcaccttcaccacccggagctcgggccccacgcccagcagctggccttgccccaggccaccctggacgacgacggggagatggacggcatcgggggcaagcattgctgccgctggatcgactgcagcgccctgtacgaccagcaggaggagctcgtgcggcacatcgagaaggtccacatcgaccagcgcaaaggggaggacttcacttgcttctgggccggttgccctcgaagatacaagcccttcaacgcccgctataaactgctgatccacatgagagtccactctggggagaagcccaacaagtgtacgtttgaaggttgcgagaaggccttttcaaggcttgaaaatctcaagatccacttgcggagccacacaggcgagaagccgtatttgtgccagcatccgggttgtcagaaggccttcagtaactccagtgaccgcgccaaacaccagcggacgcatctggacaccaaaccttatgcttgtcaaattccaggatgtaccaaacgctacacagacccaagttccctaagaaagcatgtgaaggcacattcttccaaagagcaacaagcaaggaaaaagttgcggtccagcacagagctccatccagacctgctcacagattgcctcaccgtgcagtccctgcagccggccacttcccctagagatgctgctgctgaagggaccgtgggacgctcccctggacccgggcctgacctctattcagctcccattttctccagcaattattcaagccgaagtggaacagctgctggggccgtaccacccccacatcctgtcagtcacccttctccaggacataatgtacaggggagccctcacaacccctcctcccagttacctccactcacagctgtggacgcaggagctgagaggtttgcaccttctgctccatctcctcaccacatcagcccccggagagttccagctccttcttcaatactgcaaagaacacagcctccctatacccagcagccatcaggttcacacctgaagtcctatcagccagaaacaaactcttcttttcaaccaaatggtatccatgtccatggattttatgggcagctgcagaagttctgtcccccacactaccccgattcccagagaattgtgccgcctgtcagctcctgcagtgtggtgccttcgtttgaggactgcctagtccctacatccatgggccaggccagttttgatgttttccacagagccttctcgactcactcgggcattacagtgtatgatttaccttcaagttcctcgagcctctttggggagtctctccgcagcggggctgaagatgctaccttcttgcagatcagcaccgtggaccgctgtcctagccagctctcctctgtctacaccgaaggctaaaagctctcttggccactcctgcacacccaggaccttgatgttgcttgccaccttttgttttcgtactctcacagactgcttgaggaaggatgtcagcccaatcagcgggccctgcagagttactgatgttctttcagaaggcaggactgaatggcagagctagctttgcaggaatcattacagttgctcctttttctctctggttttcctggactatgtgaccaggaggactgtcttttcaaagggaatttagagcctcactctcctggatacctgttacttcctggctgtcaacccttaaaggaccccagtgaaatgatgtgcatatgaaaatgtagtttggggatgactctacctgaaaactccaaacagggaaaaagacctcaattacgagaggcatagtgacctgcctcacctaatcctcacccttgctgctcctgatgcaaagccaggcacaacaagggaaatccatgtccaaagcatagtgtggtctcaactcttagaaactccctgggtttcccttttctcttagccacatgctaaccagttgcttctcagtgtttctcttcaatagaaaaataaggttttatatgccagcagcctatccttgtttttgcattttaaagacttagttatttatacgtattttaaaatgaaaaaaaaatgtaaaggtctgtgctttggatggaaatcattattattgtaatcaccccagctatagacattttgcacagctgtggttctgcctggccccacctctagcatgttagttttgcagttagcaaaggttacctgagggaaatggagtgggcacctcccgcaccaacagtcctgtagctggaaccttcctgagttgactgtttagtaactccacctcaaagactgtgttcaaagaaaaatgttgtttgactggtttacccattgcctccactctggtgctgcacccagagaagtgccagatgtgagaactgggacagactgagtcatgtgccagcttcccttggaaaaccaaacctagtgatacttgacttccagtgctcagattttactaacgtttttcaggatatccactcatctgtctgtctcttccctacacttctctccaccctctttttgcatccctcttaccctcttcctgactgtggttcatatatccccaccagccgccattgtctgatcatcttgggaaggtagaggtgacagttctcgaaaagtctacagaaagaggcaattctttttctgagttccagtttgaaggcctggaattttcacatagcacttggtcgaaaatatcaagcctaaataggaagtcattttctgtgacacctctacatagctattacagatcctaagtcctagggcatcagctataaaaattggccagtcccaaagacacagtaagttctaacattctggtactatcatatttcaagtattttttctcactttttaaaaatgtttttctgaacaaaagtgaaacaatgccatttatcaaactgagatcattacaatcttcaacaagacaactaaaacagcttgatgttagatgggattctgtgacagtttgtatactgacaggtccttccagtctccctccacagtcccacaagcggaagtattctacctgattccagagttcattccaacatgcagtagaatgaggtgaatgaagaaccaagtgtgggttttgttttcacagtgcacttggtcaatctagtttctctgagtagtgggctgtattctaagaaaagctttcacgtagacgtcaaagtctgcaaaagagatgagttagccactttaaaaaacctgctctgctttacaaaagatgcacaccaggcttcctttacaagtgaactccaaggctgcttgtaaagtaccacccttcctgcagactttgtgggtcgtgtcacttggcctaaacaagtggcctaacatatgcatgctcacagctagtagcatccctcatgcgtcctttgtcatactctggaaagaaaaaaactctgctatcttcagagaaaccatctattcatacttaaatatggaagcctttacaaggaactcaaaatacatttcatttcatttgtacaatgagaaaaaagatgaaaaggcaaggttgttattgcagttgacattgtcagccctgccttttggctttatgtaatttaaaatagaaagggggaaggaggacaagacagaagctcaactttagaaaccatggacatcacctccctctttgagaggagctgcttgtgaaccaggctccagtcttcctgtggcctctcacagtaaccctgcccctttcttacctcacaggggcaagagggactctaaagagggcgtaagcaatagaggcacctgcagccctccttcctcagcaggaaatcaatgtggagccccagagggacattttatctcagagagagcatgctggccacaggacccagtgcagccctgcttcccgcaccgtgggtctttcctgatagctgcaggcttgagattgcagcctcaggataggacacgttcagatgccttccagactacacacactatgcttagattcgagagtctttcctgaccttaaaatttgtcccttgcttactttcacactgcagaagatttatatatatattcatcattatttttgcagcagtacaagtggaaacttcaaaaaaatcattccctttcatgtcctggtctttttaagtcttgatatgtaaccattttcataaatgtccaaacagagattgtcattccccttaaaaacagaaacaaaacacaaaactagtgcttgtgaaaacacacagcgcaaagacaattatcctattgcattaaaaaaaaaatcagtctgcctagagacatttcattggctgcattgtcttaattccctaacgaaactgcatcaaaatgtcagttgtaatttagcctctgatcagctgttaaatattatttaaatatttacaggtcctgtggggtatctcccattacccatgtcgccctcaaattacataagcgatcataaaataagaagaaaaaaaaaggtctttagtagatcacagcagagttaccactgataagagtgttggctttgttcagttgtttctaaattaccagccgtcaagcacagtagcccctaaaaccaattttgagcaaggataaattcaactccctcatctgagaaccttgactttccagttgccttgaagtattgggaatagtaactgtacattttcaatttaattatttggtattttatttgactgtcttggccatgtcattttatggaagcatttttaaatagcactttttgttagtggtgtggaatttctgcggttattatttttttttttttttgcaacagatgaagcaaaaaaaaaaaagcactcattggagaaatagtgagtgtaaaaagagatttattttgtacagacagcaaagtatcctgtgtaatgttgctgacataaagcactttgggggaaaaaagtggaaatctgttttccataaatcacacagactcttgtacatagttatatacactcacgtagagaaatgaactgcatatatcatactggatatggggccgattttactctagaggcacatctggtgcttattgtcataaatcttttaaagaattaggtacacttttttctattaatatgtatagttttgtgatttgtcacagttatgtttcatataatcataagttattttgtcttgttcatgaagtcctttttttatgtcaaaagtaaaatgaagggattgtgcacttggtacagaataaaactggaaatagagaagacgccctcctgcctaaaatcctccttcagcctgtcggtttaaaacacaatggcaaccatcattgtttgtttgtttgtttttttgttttgttttaccatcagcctcttacatactgggaatggtaattataattaaaggcagatgatgcgggagggaatgttcaagtccagctttaaaatgctgcattgctttgggccagagctgtagcctggatttaattatagatatgaggaggaaatggcagtaaaaatgaatgtctccctgagtcctttacatgttgggagtgtccataaataaaacatgaagttttatttcatcagatttaattaaagcttttatacatgttaaaaaa

SEQ ID NO: 799 - protein, 775 aa, Homo sapiens
MMVQRLGLISPPASQVSTACNQISPSLQRAMNAANLNIPPSDTRSLISRESLASTTLSLTESQSASSMKQEWSQGYRALPSLSNHGSQNGLDLGDLLSLPPGTSMSSNSVSNSLPSYLFGTESSHSPYPSPRHSSTRSHSARSKKRALSLSPLSDGIGIDFNTIIRTSPTSLVAYINGSRASPANLSPQPEVYGHFLGVRGSCIPQPRPVPGSQKGVLVAPGGLALPAYGEDGALEHERMQQLEHGGLQPGLVNHMVVQHGLPGPDSQSAGLFKTERLEEFPGSTVDLPPAPPLPPLPPPPGPPPPYHAHAHLHHPELGPHAQQLALPQATLDDDGEMDGIGGKHCCRWIDCSALYDQQEELVRHIEKVHIDQRKGEDFTCFWAGCPRRYKPFNARYKLLIHMRVHSGEKPNKCTFEGCEKAFSRLENLKIHLRSHTGEKPYLCQHPGCQKAFSNSSDRAKHQRTHLDTKPYACQIPGCTKRYTDPSSLRKHVKAHSSKEQQARKKLRSSTELHPDLLTDCLTVQSLQPATSPRDAAAEGTVGRSPGPGPDLYSAPIFSSNYSSRSGTAAGAVPPPHPVSHPSPGHNVQGSPHNPSSQLPPLTAVDAGAERFAPSAPSPHHISPRRVPAPSSILQRTQPPYTQQPSGSHLKSYQPETNSSFQPNGIHVHGFYGQLQKFCPPHYPDSQRIVPPVSSCSVVPSFEDCLVPTSMGQASFDVFHRAFSTHSGITVYDLPSSSSSLFGESLRSGAEDATFLQISTVDRCPSQLSSVYTEG

SEQ ID NO: 800 - DNA, 10078 bp, Homo sapiens
gcagtttattctgggcctgtgtggaatagaaagacaattctttatttgactggtaggaaagaaaagagaagactcctcagggtttccaaggaggactggagcggctgctttagtgaagaagtgaagaatcaaggaagtaaaggacctgtctcaaagtcacacaactaggaaatcttgaggagtctgatacttttcatcctccagctataaaatcatcttgtagggggaagctgtacattggtggaaaataaaaggcaagcagttcctggcccgtgatattccagttagaggtgtctgactgacagcatgttggcaccgagggaagcgatgggcttcggctccaggtttctgtcctgagaccacagcagaatgtgccttggacaaaggcttggactccttgatcttctggtaacttcaaaaatctggtctcagggtggtgaactttttcttcgaattcctaacctgtgagcttacgatgatggtgcctgtccattaactgaacaactgtggttttgaacttcttgaggccagggactgtgtctgaaaacaccgacggtggctaactcaagggagacgtctggtgaacacccgtgggatctaaagaacaagctctgaaagtgttccagctgaaatttcagatcggacagactcgctgcggctccggaggcagtgattccaagctgctcgcgcacgctgctgccaagctgcaggatggtgcacgtagccaggctgctgctgctgctcctcactttcttcctccgcacggatgctgagacacctccaaggtttacacgaacacccgttgatcagacaggggtctctggcggagttgcctctttcatctgccaagctacgggagacccaagacctaaaattgtctggaacaaaaaaggaaagaaagtcagcaatcagagatttgaggtaatagagtttgacgatgggtctggatcagttctcagaatacaacccttacggactccgagggatgaggccatttatgaatgtgtggcctcaaataatgtgggagaaataagtgtatccaccagactcacagttttgcgggaagatcaaattcccaggggcttccctaccattgacatgggcccacagttgaaggtggttgagcgtactcgcacggccaccatgctttgtgcagccagtggtaatccggatccagaaatcacttggtttaaagatttcttacctgtggacacaagcaacaacaatggtcgtattaagcagttacgatcagaatctattggtggtacaccaataagaggagcccttcagattgagcagagtgaagagtctgaccaaggaaaatatgagtgtgttgccaccaacagcgcgggcactcgctattccgctcctgccaatttatatgtcagagagctgcgagaagttcgccgtgtcccaccaagattctctatcccacccactaatcatgaaatcatgccaggcggaagcgttaatatcacctgtgtggccgtggggtcaccaatgccttatgtaaagtggatgttgggggcagaagatctgacacctgaagatgatatgccaataggaagaaatgtgctagaactgaatgatgtaagacagtcagcaaattacacctgtgttgctatgtcaacactgggtgtcattgaagcaatagcacagatcactgtcaaagccttacccaaacctccaggaactcctgtagtgaccgagagcacagctacaagcatcacactgacgtgggactctgggaaccctgagcctgtttcttattacataattcagcataaacctaaaaactctgaggaactttacaaagaaattgatggggtggcgaccacacgctacagtgtcgctggactaagtccctactcggattatgaattcagggttgttgctgtcaataacattgggcgggggcctcccagcgaacctgtgctaacacaaacctcagagcaagcaccatccagtgccccgagggatgtccaggcacgaatgttgagttcgaccaccattttggtacagtggaaggaacctgaagagccaaatggacagatccaaggatatagagtttattatacaatggatcccactcaacatgtcaacaactggatgaaacacaatgtagctgacagccaaatcactactattggcaacttagtgccccagaaaacatattctgtcaaagtcctggcttttacctcaattggagatggtcccctttcaagtgacatacaagtcatcactcagacaggagtaccagggcagccactaaacttcaaagcagaacctgagtctgaaacaagtattttgctctcttggacacctccacgttcagataccattgccaactatgaactggtctacaaagatggggagcatggagaggagcaacgaattaccattgagccagggacatcatataggctgcaaggactgaaaccaaacagcttatactatttccgtctggctgcacgctcccctcaaggcctgggtgcttctactgcagaaatatcagctagaaccatgcagtcaaagccgtcagctcctcctcaagacattagttgcaccagcccaagttccactagtattttggtaagttggcaacctccaccagtggaaaaacagaatggcattatcactgaatactccatcaagtacactgcagtggatggggaagatgacaagcctcacgagattttgggaattccttcggacactaccaaataccttttggaacagctggaaaaatggactgaataccggatcactgtgacagcccatacagatgtcggccctggccctgagagcttgtccgtgttgattcgaaccaatgaagatgttcctagtggtcctcctcgcaaagtcgaggtagaggctgtcaactcaacatctgttaaagtctcatggcgctcacccgtgcccaataaacagcatggccagataagaggatatcaggtgcattatgtgaggatggaaaatggtgagcccaagggccagcccatgctgaaagatgtcatgctggctgatgcacagtgggaatttgatgatactactgaacatgacatgatcatttctgggctccagcctgaaacttcctactccctcaccgtcacagcctacacaaccaaaggagatggtgctcgcagcaagcccaaactggtgtccaccactggggcagttccagggaaacctcggcttgtgattaaccacactcagatgaatactgctcttattcagtggcaccctccggtggacacatttggacctcttcagggctaccgtctaaaatttggccgcaaggatatggagccacttactactcttgagttctctgaaaaagaagatcactttacagctacagacatccacaagggagcatcatacgtcttcaggctctcagccagaaacaaagtgggctttggggaggagatggtgaaggagatttccattccagaagaagtaccaactggattccctcaaaaccttcactcagaaggcaccacttcaacctccgtccagttatcttggcaaccacctgtcctggcagagagaaatggcattatcaccaagtatacccttctttatagggatatcaacatcccccttctcccgatggagcagcttattgttccagctgacaccactatgacactcactggcttaaaaccagataccacatacgatgtaaaagtacgtgctcatacgagcaaagggcccgggccatatagtcccagtgtccagttcaggacactgcctgtggatcaagtgtttgcaaaaaattttcatgtcaaagcagtaatgaagacttccgtgttgctgtcttgggagattccagagaattataactccgccatgcctttcaaaattctttatgatgatgggaaaatggtagaagaagtggatggccgagccacacagaagttaattgtcaacctgaagcctgagaaatcatattcatttgtgctgacaaatcgtggaaacagtgctggtgggctgcagcacagggtcacggcaaagactgcaccagatgtattacgtaccaagcctgccttcattgggaagaccaacttggatggcatgattactgtgcaactgcctgaagtacctgcaaatgagaatataaaaggttactacataataattgtgcctttgaagaaatctcgcgggaaatttatcaagccatgggagagtccagatgaaatggaattagatgagctgcttaaggagatatctaggaagcgcagaagcatccgttatgggagagaagttgaattaaagccatatattgccgctcactttgatgtccttcccactgagttcaccctgggggatgacaagcattatggtggatttacaaacaagcaactccaaagtggtcaagaatatgtcttctttgtgttagcagtaatggaacatgcagagtctaagatgtatgcaaccagcccttactccgaccccgtggtgtcaatggatctggatccgcagccaatcacggatgaagaagaaggcttgatctgggttgtaggtcctgtccttgcagtggtctttatcatctgcattgtcattgctattcttctttataaaaggaagagggcagagtccgactctagaaaaagcagcataccgaacaataaggagatcccttcacaccacccaacagaccctgtagaactgaggcgccttaactttcaaacaccgggtatggctagccatcctccaatacccatcttggaacttgcagaccacattgaaagattgaaagcaaatgacaacttgaagttttcccaggaatatgagtcaattgaccctggccagcagttcacttgggaacattcaaacttggaagtaaacaaaccaaagaatagatacgcgaatgtaatcgcatatgatcattcccgggttctcctatcagctatagaagggatcccaggaagtgactatgtgaatgccaactacatagatgggtataggaagcaaaatgcctatattgcaacacagggatctctccccgaaacatttggggacttttggagaatgatatgggaacaacggagtgccacagttgtcatgatgacaaaactagaagaaagatcaagggtgaagtgtgaccagtattggcctagcagaggcacagaaacccacggactcgttcaagtaacgctgcttgatactgtggagctggccacatattgtgttcgaacatttgcactttacaagaatggttcaagtgagaagagagaagtgagacaattccagttcaccgcctggcctgatcatggtgttccagaacaccctacaccttttctagctttcttacgtagagtcaaaacctgtaaccctcccgatgctggtccgatggttgtgcactgcagtgcgggagttggccggactggttgcttcatcgtcatagatgccatgttagaaagaataaagcatgaaaaaactgtagatatttatggccatgtaactttaatgagagcccagaggaactatatggttcaaacagaagaccaatacatctttatccatgatgcactgttagaagcagtgacttgtggaaataccgaagtgccagctagaaacttgtatgcctacattcagaagctgacacaaatagaaacgggagagaatgtcacaggaatggagctcgaatttaagcgtctagccagctcaaaagctcacacctcaaggtttatcagtgccaatcttccatgtaataaattcaaaaatcgccttgttaatattatgccatatgaatccacaagggtatgcctgcagcctatccgtggagtagaaggatctgattacatcaatgccagttttattgatggatacagacaacagaaagcctacatcgctacccaggggcccttggcagagaccactgaagacttctggcggatgctctgggaacacaattccaccatagttgtgatgctcaccaagctgcgtgaaatgggcagagagaaatgtcaccaatactggccagcagaacggtctgcaagataccagtactttgttgtagatcccatggctgagtacaacatgccacagtatatcctaagggaattcaaggtcacagatgccagggacggccagtcccgaacagtaaggcagttccagttcactgactggccagagcaaggagtgccaaagtccggagaaggatttattgacttcatcggccaagtccataaaacaaaagaacagtttggccaagatggacccatttcagtccattgcagcgcgggcgttggaagaactggagtcttcataacgctaagcattgttttggaaagaatgagatatgaaggagttgtagatatcttccagactgtcaaaatgttaagaacacaacgaccagctatggtacagacagaggatcaatatcagttttcctatcgtgccgcactagagtacctgggcagctttgaccactatgcaacgtagaaacccctgacccattctggatttttactacaggcccttcaatatccatggagtctcttctgagccatacagggcacttgagaagtccttcttaacttctagctaacaactacttagtgggactattacacacaaaacaaattaaaaacaaattattccaggtggaccaagaattcacagtttaataatctaacctgaaaaataatgaagagaatcctgactgatgaggcatctgaaggattttatttacagatacctcaaggattcaaaatcaagggaagaagaaatcacagcaaagaaccaccatcttattcaggattgcttgaaaggtgcaaggagaaattgccagaatgctgcagttcagcacaagatatgtgctggtgtggcttctcacaatgaaacggactctgctttgacatcgccccttcccaccatactgctcataataacattttagggggaaaggggagggaatgtttaaaaagaaagtccttgatttagttttttagtattgtaaagatactgctgacctgtgcttcatttctaactgtgtaaacttttttttaacaaaatgtatcattcgataaagtgaattttaaaaaagttacataactcttcatttttttatttccaaatcgtaggtttttttaagctgtagaactgttatctgtaatatcttgctgtagaaatatcaaatcatttgaaaatttgcacatttttgtgcaaaactcaatctacagtatcagtctcgtcagatatattaattttacacttcagttttgattggtgagaaagtacccattctcttcaaataatcaaagataattattattttgttttgtttttggaatcaacagggaggcgcaaagtataaagttgctgctaacatatatacatatatatccatattttataagggtgtctatgtatatatagacagtgtgtccacacaaaaaatagatacagttatcagtcagtcagttcttccatgatttagtttttttaaacgtagaaaagctattgtaaacatctctttccatttattcttaattttttgacatattggtatttctttaaagggaaatgaggaatgcacatcagtgattgattgtcaaacctcaccccctgatttcctacctaatctacccccacctaaccaatcaatcacatccacaaattgttttgtttgtttgttagtcaggcttccaacaaagttcaatatttctaacactctagtgcaataaaaattattattaaatagctaagaggtgtgcatgtgggaaaggtcagtgcatatccctttaggaggggagaatgttgtaatatatcagctatcgagttgtttaaaaaaagtgtattcaatcgtatattgtctatagtatgtgctatgaaatttgcatttatgatatgtaacaggggcaaagccaaattcatgttactctgttcagtcagaaacattttgtggcatacagcattcctgggaagtgctgtactttgtttcgttttggttttagttttgcatttagagtgccttataattgatgcctattttaatagcatttctttttagcttttggttcgtatttccattcactgttcgtatctgttactttctattaaagcattatctgtttaccacatgtacaaaaactctttgaataatatgcattcctagttttcagccaagtcggggatgttagtgattgtaccagcccaaagcacttggataatcagggcccttcttccttttataatcaatcatcaacatcagaaaaagctacttgttttatttatattcccttccaaatccgctctggaacatgcagtaactgcaccaaacttattttagtaacaaatatcattggcaactttggaatatatttgatattccattaggatttttctaaaaggggaaataaactatatatatatatgtatcttacccccaattcttccaacagaatttctataggaagccatggatgatggcataagtttgccacatattacatgattttaaataatcctcaaaatacccaaggaactcttaaagagttttggtatgagtatactactttggtttaattttagcttcatggatgttctgcatggaaggatttttgttttccacattttcccattgctagcagagtgaaatccaagagaccaaacatttgcaagcattgtatttgagcacttttgtaaaaaacaaagaaaaagaaaaaaaagaaaatatatataatactaaaaaaaagtatctagaaggctacctcagaatgagactctctaacctacatcagaaccagagaagaatgtgcactatgtgggtctgttatcattattttcttttagtttgtatctttttggagatttatccaagtgccagattactcagtgctataattttcttttagttaaacaaagggggtcagacagacattgcatcatccagacatgccttgttggacatgtagaatccgatggagcactgcacaccagaatgattggccaatgagcagcttctctccctgaaacaataactgcccatttggcaaagggaaagatgacaataatcagaagaagaaaatgaatgggatgcataccatagacgaacgaggcggagactattgcgggaatcttactgttcaggagctgttcctagaactaactcccttactgtcattgatgtgcattccactctgtgcttttctgtacaaccattcaagttttaatttcccaggtgaaccatctttatctgccattaccacaagctttcaagtttccagttattttcatcatcataaccagtacggtgctattatttacctatgtacgtgtagttatgtataattttgtaattagttacaatggtaaaaaaaatcaaaatatataaaaagtgatttgtacagaactttattttagctcttttttaaaaatgatttgcatggttagaaaacggcgaggacagccaggggagggaagggcctctagggaactttgcactttctatacctttgtactatgcactgccctattgattctacacccaataatgatattacttgaacccatctgtaagaaactgcttcggaaattcatttgtgtgtatgtaaataacacaacatagaaacaggaagggaaaaaagtctgcagtaatgcacgtattttttttctttcctgtttattttcggttttgctttaagtccttttatttttaattccctttttgtttttctttttgggttttggttccttttgggtttatgggtgccctgatactccagcagagatcagaaggctacagatccattctatccatccgttatgtggctttgccatcccagcttggagtgtctttacaaagataataacagttgtgttctttgctctcgttttggatgcatagactgaaaaattaaaacaaataacttgtaaaatggcttgttaaaaaatacaattacctctaattagtagtacgcgtaaatgttttacagaatgaaaggcgtgctttttattttcttacttcgttacattggtggcgaaagaagtctgtatgaaaatcagttctttgctgacacaagttccatttgttacaaatgaattctaataaaaatgtcagtgttatgca

SEQ ID NO: 801 - protein, 1912 aa, Homo sapiens
MVHVARLLLLLLTFFLRTDAETPPRFTRTPVDQTGVSGGVASFICQATGDPRPKIVWNKKGKKVSNQRFEVIEFDDGSGSVLRIQPLRTPRDEAIYECVASNNVGEISVSTRLTVLREDQIPRGFPTIDMGPQLKVVERTRTATMLCAASGNPDPEITWFKDFLPVDTSNNNGRIKQLRSESIGGTPIRGALQIEQSEESDQGKYECVATNSAGTRYSAPANLYVRELREVRRVPPRFSIPPTNHEIMPGGSVNITCVAVGSPMPYVKWMLGAEDLTPEDDMPIGRNVLELNDVRQSANYTCVAMSTLGVIEAIAQITVKALPKPPGTPVVTESTATSITLTWDSGNPEPVSYYIIQHKPKNSEELYKEIDGVATTRYSVAGLSPYSDYEFRVVAVNNIGRGPPSEPVLTQTSEQAPSSAPRDVQARMLSSTTILVQWKEPEEPNGQIQGYRVYYTMDPTQHVNNWMKHNVADSQITTIGNLVPQKTYSVKVLAFTSIGDGPLSSDIQVITQTGVPGQPLNFKAEPESETSILLSWTPPRSDTIANYELVYKDGEHGEEQRITIEPGTSYRLQGLKPNSLYYFRLAARSPQGLGASTAEISARTMQSKPSAPPQDISCTSPSSTSILVSWQPPPVEKQNGIITEYSIKYTAVDGEDDKPHEILGIPSDTTKYLLEQLEKWTEYRITVTAHTDVGPGPESLSVLIRTNEDVPSGPPRKVEVEAVNSTSVKVSWRSPVPNKQHGQIRGYQVHYVRMENGEPKGQPMLKDVMLADAQWEFDDTTEHDMIISGLQPETSYSLTVTAYTTKGDGARSKPKLVSTTGAVPGKPRLVINHTQMNTALIQWHPPVDTFGPLQGYRLKFGRKDMEPLTTLEFSEKEDHFTATDIHKGASYVFRLSARNKVGFGEEMVKEISIPEEVPTGFPQNLHSEGTTSTSVQLSWQPPVLAERNGIITKYTLLYRDINIPLLPMEQLIVPADTTMTLTGLKPDTTYDVKVRAHTSKGPGPYSPSVQFRTLPVDQVFAKNFHVKAVMKTSVLLSWEIPENYNSAMPFKILYDDGKMVEEVDGRATQKLIVNLKPEKSYSFVLTNRGNSAGGLQHRVTAKTAPDVLRTKPAFIGKTNLDGMITVQLPEVPANENIKGYYIIIVPLKKSRGKFIKPWESPDEMELDELLKEISRKRRSIRYGREVELKPYIAAHFDVLPTEFTLGDDKHYGGFTNKQLQSGQEYVFFVLAVMEHAESKMYATSPYSDPVVSMDLDPQPITDEEEGLIWVVGPVLAVVFIICIVIAILLYKRKRAESDSRKSSIPNNKEIPSHHPTDPVELRRLNFQTPGMASHPPIPILELADHIERLKANDNLKFSQEYESIDPGQQFTWEHSNLEVNKPKNRYANVIAYDHSRVLLSAIEGIPGSDYVNANYIDGYRKQNAYIATQGSLPETFGDFWRMIWEQRSATVVMMTKLEERSRVKCDQYWPSRGTETHGLVQVTLLDTVELATYCVRTFALYKNGSSEKREVRQFQFTAWPDHGVPEHPTPFLAFLRRVKTCNPPDAGPMVVHCSAGVGRTGCFIVIDAMLERIKHEKTVDIYGHVTLMRAQRNYMVQTEDQYIFIHDALLEAVTCGNTEVPARNLYAYIQKLTQIETGENVTGMELEFKRLASSKAHTSRFISANLPCNKFKNRLVNIMPYESTRVCLQPIRGVEGSDYINASFIDGYRQQKAYIATQGPLAETTEDFWRMLWEHNSTIVVMLTKLREMGREKCHQYWPAERSARYQYFVVDPMAEYNMPQYILREFKVTDARDGQSRTVRQFQFTDWPEQGVPKSGEGFIDFIGQVHKTKEQFGQDGPISVHCSAGVGRTGVFITLSIVLERMRYEGVVDIFQTVKMLRTQRPAMVQTEDQYQFSYRAALEYLGSFDHYAT

SEQ ID NO: 802 - DNA, 10039 bp, Homo sapiens
gcagtttattctgggcctgtgtggaatagaaagacaattctttatttgactggtaggaaagaaaagagaagactcctcagggtttccaaggaggactggagcggctgctttagtgaagaagtgaagaatcaaggaagtaaaggacctgtctcaaagtcacacaactaggaaatcttgaggagtctgatacttttcatcctccagctataaaatcatcttgtagggggaagctgtacattggtggaaaataaaaggcaagcagttcctggcccgtgatattccagttagaggtgtctgactgacagcatgttggcaccgagggaagcgatgggcttcggctccaggtttctgtcctgagaccacagcagaatgtgccttggacaaaggcttggactccttgatcttctggtaacttcaaaaatctggtctcagggtggtgaactttttcttcgaattcctaacctgtgagcttacgatgatggtgcctgtccattaactgaacaactgtggttttgaacttcttgaggccagggactgtgtctgaaaacaccgacggtggctaactcaagggagacgtctggtgaacacccgtgggatctaaagaacaagctctgaaagtgttccagctgaaatttcagatcggacagactcgctgcggctccggaggcagtgattccaagctgctcgcgcacgctgctgccaagctgcaggatggtgcacgtagccaggctgctgctgctgctcctcactttcttcctccgcacggatgctgagacacctccaaggtttacacgaacacccgttgatcagacaggggtctctggcggagttgcctctttcatctgccaagctacgggagacccaagacctaaaattgtctggaacaaaaaaggaaagaaagtcagcaatcagagatttgaggtaatagagtttgacgatgggtctggatcagttctcagaatacaacccttacggactccgagggatgaggccatttatgaatgtgtggcctcaaataatgtgggagaaataagtgtatccaccagactcacagttttgcgggaagatcaaattcccaggggcttccctaccattgacatgggcccacagttgaaggtggttgagcgtactcgcacggccaccatgctttgtgcagccagtggtaatccggatccagaaatcacttggtttaaagatttcttacctgtggacacaagcaacaacaatggtcgtattaagcagttacgatcaggagcccttcagattgagcagagtgaagagtctgaccaaggaaaatatgagtgtgttgccaccaacagcgcgggcactcgctattccgctcctgccaatttatatgtcagagttcgccgtgtcccaccaagattctctatcccacccactaatcatgaaatcatgccaggcggaagcgttaatatcacctgtgtggccgtggggtcaccaatgccttatgtaaagtggatgttgggggcagaagatctgacacctgaagatgatatgccaataggaagaaatgtgctagaactgaatgatgtaagacagtcagcaaattacacctgtgttgctatgtcaacactgggtgtcattgaagcaatagcacagatcactgtcaaagccttacccaaacctccaggaactcctgtagtgaccgagagcacagctacaagcatcacactgacgtgggactctgggaaccctgagcctgtttcttattacataattcagcataaacctaaaaactctgaggaactttacaaagaaattgatggggtggcgaccacacgctacagtgtcgctggactaagtccctactcggattatgaattcagggttgttgctgtcaataacattgggcgggggcctcccagcgaacctgtgctaacacaaacctcagagcaagcaccatccagtgccccgagggatgtccaggcacgaatgttgagttcgaccaccattttggtacagtggaaggaacctgaagagccaaatggacagatccaaggatatagagtttattatacaatggatcccactcaacatgtcaacaactggatgaaacacaatgtagctgacagccaaatcactactattggcaacttagtgccccagaaaacatattctgtcaaagtcctggcttttacctcaattggagatggtcccctttcaagtgacatacaagtcatcactcagacaggagtaccagggcagccactaaacttcaaagcagaacctgagtctgaaacaagtattttgctctcttggacacctccacgttcagataccattgccaactatgaactggtctacaaagatggggagcatggagaggagcaacgaattaccattgagccagggacatcatataggctgcaaggactgaaaccaaacagcttatactatttccgtctggctgcacgctcccctcaaggcctgggtgcttctactgcagaaatatcagctagaaccatgcagtcaaagccgtcagctcctcctcaagacattagttgcaccagcccaagttccactagtattttggtaagttggcaacctccaccagtggaaaaacagaatggcattatcactgaatactccatcaagtacactgcagtggatggggaagatgacaagcctcacgagattttgggaattccttcggacactaccaaataccttttggaacagctggaaaaatggactgaataccggatcactgtgacagcccatacagatgtcggccctggccctgagagcttgtccgtgttgattcgaaccaatgaagatgttcctagtggtcctcctcgcaaagtcgaggtagaggctgtcaactcaacatctgttaaagtctcatggcgctcacccgtgcccaataaacagcatggccagataagaggatatcaggtgcattatgtgaggatggaaaatggtgagcccaagggccagcccatgctgaaagatgtcatgctggctgatgcacagtgggaatttgatgatactactgaacatgacatgatcatttctgggctccagcctgaaacttcctactccctcaccgtcacagcctacacaaccaaaggagatggtgctcgcagcaagcccaaactggtgtccaccactggggcagttccagggaaacctcggcttgtgattaaccacactcagatgaatactgctcttattcagtggcaccctccggtggacacatttggacctcttcagggctaccgtctaaaatttggccgcaaggatatggagccacttactactcttgagttctctgaaaaagaagatcactttacagctacagacatccacaagggagcatcatacgtcttcaggctctcagccagaaacaaagtgggctttggggaggagatggtgaaggagatttccattccagaagaagtaccaactggattccctcaaaaccttcactcagaaggcaccacttcaacctccgtccagttatcttggcaaccacctgtcctggcagagagaaatggcattatcaccaagtatacccttctttatagggatatcaacatcccccttctcccgatggagcagcttattgttccagctgacaccactatgacactcactggcttaaaaccagataccacatacgatgtaaaagtacgtgctcatacgagcaaagggcccgggccatatagtcccagtgtccagttcaggacactgcctgtggatcaagtgtttgcaaaaaattttcatgtcaaagcagtaatgaagacttccgtgttgctgtcttgggagattccagagaattataactccgccatgcctttcaaaattctttatgatgatgggaaaatggtagaagaagtggatggccgagccacacagaagttaattgtcaacctgaagcctgagaaatcatattcatttgtgctgacaaatcgtggaaacagtgctggtgggctgcagcacagggtcacggcaaagactgcaccagatgtattacgtaccaagcctgccttcattgggaagaccaacttggatggcatgattactgtgcaactgcctgaagtacctgcaaatgagaatataaaaggttactacataataattgtgcctttgaagaaatctcgcgggaaatttatcaagccatgggagagtccagatgaaatggaattagatgagctgcttaaggagatatctaggaagcgcagaagcatccgttatgggagagaagttgaattaaagccatatattgccgctcactttgatgtccttcccactgagttcaccctgggggatgacaagcattatggtggatttacaaacaagcaactccaaagtggtcaagaatatgtcttctttgtgttagcagtaatggaacatgcagagtctaagatgtatgcaaccagcccttactccgaccccgtggtgtcaatggatctggatccgcagccaatcacggatgaagaagaaggcttgatctgggttgtaggtcctgtccttgcagtggtctttatcatctgcattgtcattgctattcttctttataaaaggaagagggcagagtccgactctagaaaaagcagcataccgaacaataaggagatcccttcacaccacccaacagaccctgtagaactgaggcgccttaactttcaaacaccgggtatggctagccatcctccaatacccatcttggaacttgcagaccacattgaaagattgaaagcaaatgacaacttgaagttttcccaggaatatgagtcaattgaccctggccagcagttcacttgggaacattcaaacttggaagtaaacaaaccaaagaatagatacgcgaatgtaatcgcatatgatcattcccgggttctcctatcagctatagaagggatcccaggaagtgactatgtgaatgccaactacatagatgggtataggaagcaaaatgcctatattgcaacacagggatctctccccgaaacatttggggacttttggagaatgatatgggaacaacggagtgccacagttgtcatgatgacaaaactagaagaaagatcaagggtgaagtgtgaccagtattggcctagcagaggcacagaaacccacggactcgttcaagtaacgctgcttgatactgtggagctggccacatattgtgttcgaacatttgcactttacaagaatggttcaagtgagaagagagaagtgagacaattccagttcaccgcctggcctgatcatggtgttccagaacaccctacaccttttctagctttcttacgtagagtcaaaacctgtaaccctcccgatgctggtccgatggttgtgcactgcagtgcgggagttggccggactggttgcttcatcgtcatagatgccatgttagaaagaataaagcatgaaaaaactgtagatatttatggccatgtaactttaatgagagcccagaggaactatatggttcaaacagaagaccaatacatctttatccatgatgcactgttagaagcagtgacttgtggaaataccgaagtgccagctagaaacttgtatgcctacattcagaagctgacacaaatagaaacgggagagaatgtcacaggaatggagctcgaatttaagcgtctagccagctcaaaagctcacacctcaaggtttatcagtgccaatcttccatgtaataaattcaaaaatcgccttgttaatattatgccatatgaatccacaagggtatgcctgcagcctatccgtggagtagaaggatctgattacatcaatgccagttttattgatggatacagacaacagaaagcctacatcgctacccaggggcccttggcagagaccactgaagacttctggcggatgctctgggaacacaattccaccatagttgtgatgctcaccaagctgcgtgaaatgggcagagagaaatgtcaccaatactggccagcagaacggtctgcaagataccagtactttgttgtagatcccatggctgagtacaacatgccacagtatatcctaagggaattcaaggtcacagatgccagggacggccagtcccgaacagtaaggcagttccagttcactgactggccagagcaaggagtgccaaagtccggagaaggatttattgacttcatcggccaagtccataaaacaaaagaacagtttggccaagatggacccatttcagtccattgcagcgcgggcgttggaagaactggagtcttcataacgctaagcattgttttggaaagaatgagatatgaaggagttgtagatatcttccagactgtcaaaatgttaagaacacaacgaccagctatggtacagacagaggatcaatatcagttttcctatcgtgccgcactagagtacctgggcagctttgaccactatgcaacgtagaaacccctgacccattctggatttttactacaggcccttcaatatccatggagtctcttctgagccatacagggcacttgagaagtccttcttaacttctagctaacaactacttagtgggactattacacacaaaacaaattaaaaacaaattattccaggtggaccaagaattcacagtttaataatctaacctgaaaaataatgaagagaatcctgactgatgaggcatctgaaggattttatttacagatacctcaaggattcaaaatcaagggaagaagaaatcacagcaaagaaccaccatcttattcaggattgcttgaaaggtgcaaggagaaattgccagaatgctgcagttcagcacaagatatgtgctggtgtggcttctcacaatgaaacggactctgctttgacatcgccccttcccaccatactgctcataataacattttagggggaaaggggagggaatgtttaaaaagaaagtccttgatttagttttttagtattgtaaagatactgctgacctgtgcttcatttctaactgtgtaaacttttttttaacaaaatgtatcattcgataaagtgaattttaaaaaagttacataactcttcatttttttatttccaaatcgtaggtttttttaagctgtagaactgttatctgtaatatcttgctgtagaaatatcaaatcatttgaaaatttgcacatttttgtgcaaaactcaatctacagtatcagtctcgtcagatatattaattttacacttcagttttgattggtgagaaagtacccattctcttcaaataatcaaagataattattattttgttttgtttttggaatcaacagggaggcgcaaagtataaagttgctgctaacatatatacatatatatccatattttataagggtgtctatgtatatatagacagtgtgtccacacaaaaaatagatacagttatcagtcagtcagttcttccatgatttagtttttttaaacgtagaaaagctattgtaaacatctctttccatttattcttaattttttgacatattggtatttctttaaagggaaatgaggaatgcacatcagtgattgattgtcaaacctcaccccctgatttcctacctaatctacccccacctaaccaatcaatcacatccacaaattgttttgtttgtttgttagtcaggcttccaacaaagttcaatatttctaacactctagtgcaataaaaattattattaaatagctaagaggtgtgcatgtgggaaaggtcagtgcatatccctttaggaggggagaatgttgtaatatatcagctatcgagttgtttaaaaaaagtgtattcaatcgtatattgtctatagtatgtgctatgaaatttgcatttatgatatgtaacaggggcaaagccaaattcatgttactctgttcagtcagaaacattttgtggcatacagcattcctgggaagtgctgtactttgtttcgttttggttttagttttgcatttagagtgccttataattgatgcctattttaatagcatttctttttagcttttggttcgtatttccattcactgttcgtatctgttactttctattaaagcattatctgtttaccacatgtacaaaaactctttgaataatatgcattcctagttttcagccaagtcggggatgttagtgattgtaccagcccaaagcacttggataatcagggcccttcttccttttataatcaatcatcaacatcagaaaaagctacttgttttatttatattcccttccaaatccgctctggaacatgcagtaactgcaccaaacttattttagtaacaaatatcattggcaactttggaatatatttgatattccattaggatttttctaaaaggggaaataaactatatatatatatgtatcttacccccaattcttccaacagaatttctataggaagccatggatgatggcataagtttgccacatattacatgattttaaataatcctcaaaatacccaaggaactcttaaagagttttggtatgagtatactactttggtttaattttagcttcatggatgttctgcatggaaggatttttgttttccacattttcccattgctagcagagtgaaatccaagagaccaaacatttgcaagcattgtatttgagcacttttgtaaaaaacaaagaaaaagaaaaaaaagaaaatatatataatactaaaaaaaagtatctagaaggctacctcagaatgagactctctaacctacatcagaaccagagaagaatgtgcactatgtgggtctgttatcattattttcttttagtttgtatctttttggagatttatccaagtgccagattactcagtgctataattttcttttagttaaacaaagggggtcagacagacattgcatcatccagacatgccttgttggacatgtagaatccgatggagcactgcacaccagaatgattggccaatgagcagcttctctccctgaaacaataactgcccatttggcaaagggaaagatgacaataatcagaagaagaaaatgaatgggatgcataccatagacgaacgaggcggagactattgcgggaatcttactgttcaggagctgttcctagaactaactcccttactgtcattgatgtgcattccactctgtgcttttctgtacaaccattcaagttttaatttcccaggtgaaccatctttatctgccattaccacaagctttcaagtttccagttattttcatcatcataaccagtacggtgctattatttacctatgtacgtgtagttatgtataattttgtaattagttacaatggtaaaaaaaatcaaaatatataaaaagtgatttgtacagaactttattttagctcttttttaaaaatgatttgcatggttagaaaacggcgaggacagccaggggagggaagggcctctagggaactttgcactttctatacctttgtactatgcactgccctattgattctacacccaataatgatattacttgaacccatctgtaagaaactgcttcggaaattcatttgtgtgtatgtaaataacacaacatagaaacaggaagggaaaaaagtctgcagtaatgcacgtattttttttctttcctgtttattttcggttttgctttaagtccttttatttttaattccctttttgtttttctttttgggttttggttccttttgggtttatgggtgccctgatactccagcagagatcagaaggctacagatccattctatccatccgttatgtggctttgccatcccagcttggagtgtctttacaaagataataacagttgtgttctttgctctcgttttggatgcatagactgaaaaattaaaacaaataacttgtaaaatggcttgttaaaaaatacaattacctctaattagtagtacgcgtaaatgttttacagaatgaaaggcgtgctttttattttcttacttcgttacattggtggcgaaagaagtctgtatgaaaatcagttctttgctgacacaagttccatttgttacaaatgaattctaataaaaatgtcagtgttatgca

SEQ ID NO: 803 - protein, 1899 aa, Homo sapiens
MVHVARLLLLLLTFFLRTDAETPPRFTRTPVDQTGVSGGVASFICQATGDPRPKIVWNKKGKKVSNQRFEVIEFDDGSGSVLRIQPLRTPRDEAIYECVASNNVGEISVSTRLTVLREDQIPRGFPTIDMGPQLKVVERTRTATMLCAASGNPDPEITWFKDFLPVDTSNNNGRIKQLRSGALQIEQSEESDQGKYECVATNSAGTRYSAPANLYVRVRRVPPRFSIPPTNHEIMPGGSVNITCVAVGSPMPYVKWMLGAEDLTPEDDMPIGRNVLELNDVRQSANYTCVAMSTLGVIEAIAQITVKALPKPPGTPVVTESTATSITLTWDSGNPEPVSYYIIQHKPKNSEELYKEIDGVATTRYSVAGLSPYSDYEFRVVAVNNIGRGPPSEPVLTQTSEQAPSSAPRDVQARMLSSTTILVQWKEPEEPNGQIQGYRVYYTMDPTQHVNNWMKHNVADSQITTIGNLVPQKTYSVKVLAFTSIGDGPLSSDIQVITQTGVPGQPLNFKAEPESETSILLSWTPPRSDTIANYELVYKDGEHGEEQRITIEPGTSYRLQGLKPNSLYYFRLAARSPQGLGASTAEISARTMQSKPSAPPQDISCTSPSSTSILVSWQPPPVEKQNGIITEYSIKYTAVDGEDDKPHEILGIPSDTTKYLLEQLEKWTEYRITVTAHTDVGPGPESLSVLIRTNEDVPSGPPRKVEVEAVNSTSVKVSWRSPVPNKQHGQIRGYQVHYVRMENGEPKGQPMLKDVMLADAQWEFDDTTEHDMIISGLQPETSYSLTVTAYTTKGDGARSKPKLVSTTGAVPGKPRLVINHTQMNTALIQWHPPVDTFGPLQGYRLKFGRKDMEPLTTLEFSEKEDHFTATDIHKGASYVFRLSARNKVGFGEEMVKEISIPEEVPTGFPQNLHSEGTTSTSVQLSWQPPVLAERNGIITKYTLLYRDINIPLLPMEQLIVPADTTMTLTGLKPDTTYDVKVRAHTSKGPGPYSPSVQFRTLPVDQVFAKNFHVKAVMKTSVLLSWEIPENYNSAMPFKILYDDGKMVEEVDGRATQKLIVNLKPEKSYSFVLTNRGNSAGGLQHRVTAKTAPDVLRTKPAFIGKTNLDGMITVQLPEVPANENIKGYYIIIVPLKKSRGKFIKPWESPDEMELDELLKEISRKRRSIRYGREVELKPYIAAHFDVLPTEFTLGDDKHYGGFTNKQLQSGQEYVFFVLAVMEHAESKMYATSPYSDPVVSMDLDPQPITDEEEGLIWVVGPVLAVVFIICIVIAILLYKRKRAESDSRKSSIPNNKEIPSHHPTDPVELRRLNFQTPGMASHPPIPILELADHIERLKANDNLKFSQEYESIDPGQQFTWEHSNLEVNKPKNRYANVIAYDHSRVLLSAIEGIPGSDYVNANYIDGYRKQNAYIATQGSLPETFGDFWRMIWEQRSATVVMMTKLEERSRVKCDQYWPSRGTETHGLVQVTLLDTVELATYCVRTFALYKNGSSEKREVRQFQFTAWPDHGVPEHPTPFLAFLRRVKTCNPPDAGPMVVHCSAGVGRTGCFIVIDAMLERIKHEKTVDIYGHVTLMRAQRNYMVQTEDQYIFIHDALLEAVTCGNTEVPARNLYAYIQKLTQIETGENVTGMELEFKRLASSKAHTSRFISANLPCNKFKNRLVNIMPYESTRVCLQPIRGVEGSDYINASFIDGYRQQKAYIATQGPLAETTEDFWRMLWEHNSTIVVMLTKLREMGREKCHQYWPAERSARYQYFVVDPMAEYNMPQYILREFKVTDARDGQSRTVRQFQFTDWPEQGVPKSGEGFIDFIGQVHKTKEQFGQDGPISVHCSAGVGRTGVFITLSIVLERMRYEGVVDIFQTVKMLRTQRPAMVQTEDQYQFSYRAALEYLGSFDHYAT

SEQ ID NO: 804 - DNA, 10051 bp, Homo sapiens
gcagtttattctgggcctgtgtggaatagaaagacaattctttatttgactggtaggaaagaaaagagaagactcctcagggtttccaaggaggactggagcggctgctttagtgaagaagtgaagaatcaaggaagtaaaggacctgtctcaaagtcacacaactaggaaatcttgaggagtctgatacttttcatcctccagctataaaatcatcttgtagggggaagctgtacattggtggaaaataaaaggcaagcagttcctggcccgtgatattccagttagaggtgtctgactgacagcatgttggcaccgagggaagcgatgggcttcggctccaggtttctgtcctgagaccacagcagaatgtgccttggacaaaggcttggactccttgatcttctggtaacttcaaaaatctggtctcagggtggtgaactttttcttcgaattcctaacctgtgagcttacgatgatggtgcctgtccattaactgaacaactgtggttttgaacttcttgaggccagggactgtgtctgaaaacaccgacggtggctaactcaagggagacgtctggtgaacacccgtgggatctaaagaacaagctctgaaagtgttccagctgaaatttcagatcggacagactcgctgcggctccggaggcagtgattccaagctgctcgcgcacgctgctgccaagctgcaggatggtgcacgtagccaggctgctgctgctgctcctcactttcttcctccgcacggatgctgagacacctccaaggtttacacgaacacccgttgatcagacaggggtctctggcggagttgcctctttcatctgccaagctacgggagacccaagacctaaaattgtctggaacaaaaaaggaaagaaagtcagcaatcagagatttgaggtaatagagtttgacgatgggtctggatcagttctcagaatacaacccttacggactccgagggatgaggccatttatgaatgtgtggcctcaaataatgtgggagaaataagtgtatccaccagactcacagttttgcgggaagatcaaattcccaggggcttccctaccattgacatgggcccacagttgaaggtggttgagcgtactcgcacggccaccatgctttgtgcagccagtggtaatccggatccagaaatcacttggtttaaagatttcttacctgtggacacaagcaacaacaatggtcgtattaagcagttacgatcagaatctattggtggtacaccaataagaggagcccttcagattgagcagagtgaagagtctgaccaaggaaaatatgagtgtgttgccaccaacagcgcgggcactcgctattccgctcctgccaatttatatgtcagagagctgcgagaagttcgccgtgtcccaccaagattctctatcccacccactaatcatgaaatcatgccaggcggaagcgttaatatcacctgtgtggccgtggggtcaccaatgccttatgtaaagtggatgttgggggcagaagatctgacacctgaagatgatatgccaataggaagaaatgtgctagaactgaatgatgtaagacagtcagcaaattacacctgtgttgctatgtcaacactgggtgtcattgaagcaatagcacagatcactgtcaaagccttacccaaacctccaggaactcctgtagtgaccgagagcacagctacaagcatcacactgacgtgggactctgggaaccctgagcctgtttcttattacataattcagcataaacctaaaaactctgaggaactttacaaagaaattgatggggtggcgaccacacgctacagtgtcgctggactaagtccctactcggattatgaattcagggttgttgctgtcaataacattgggcgggggcctcccagcgaacctgtgctaacacaaacctcagagcaagcaccatccagtgccccgagggatgtccaggcacgaatgttgagttcgaccaccattttggtacagtggaaggaacctgaagagccaaatggacagatccaaggatatagagtttattatacaatggatcccactcaacatgtcaacaactggatgaaacacaatgtagctgacagccaaatcactactattggcaacttagtgccccagaaaacatattctgtcaaagtcctggcttttacctcaattggagatggtcccctttcaagtgacatacaagtcatcactcagacaggagtaccagggcagccactaaacttcaaagcagaacctgagtctgaaacaagtattttgctctcttggacacctccacgttcagataccattgccaactatgaactggtctacaaagatggggagcatggagaggagcaacgaattaccattgagccagggacatcatataggctgcaaggactgaaaccaaacagcttatactatttccgtctggctgcacgctcccctcaaggcctgggtgcttctactgcagaaatatcagctagaaccatgcagtcaaagccgtcagctcctcctcaagacattagttgcaccagcccaagttccactagtattttggtaagttggcaacctccaccagtggaaaaacagaatggcattatcactgaatactccatcaagtacactgcagtggatggggaagatgacaagcctcacgagattttgggaattccttcggacactaccaaataccttttggaacagctggaaaaatggactgaataccggatcactgtgacagcccatacagatgtcggccctggccctgagagcttgtccgtgttgattcgaaccaatgaagatgttcctagtggtcctcctcgcaaagtcgaggtagaggctgtcaactcaacatctgttaaagtctcatggcgctcacccgtgcccaataaacagcatggccagataagaggatatcaggtgcattatgtgaggatggaaaatggtgagcccaagggccagcccatgctgaaagatgtcatgctggctgatgcacaggacatgatcatttctgggctccagcctgaaacttcctactccctcaccgtcacagcctacacaaccaaaggagatggtgctcgcagcaagcccaaactggtgtccaccactggggcagttccagggaaacctcggcttgtgattaaccacactcagatgaatactgctcttattcagtggcaccctccggtggacacatttggacctcttcagggctaccgtctaaaatttggccgcaaggatatggagccacttactactcttgagttctctgaaaaagaagatcactttacagctacagacatccacaagggagcatcatacgtcttcaggctctcagccagaaacaaagtgggctttggggaggagatggtgaaggagatttccattccagaagaagtaccaactggattccctcaaaaccttcactcagaaggcaccacttcaacctccgtccagttatcttggcaaccacctgtcctggcagagagaaatggcattatcaccaagtatacccttctttatagggatatcaacatcccccttctcccgatggagcagcttattgttccagctgacaccactatgacactcactggcttaaaaccagataccacatacgatgtaaaagtacgtgctcatacgagcaaagggcccgggccatatagtcccagtgtccagttcaggacactgcctgtggatcaagtgtttgcaaaaaattttcatgtcaaagcagtaatgaagacttccgtgttgctgtcttgggagattccagagaattataactccgccatgcctttcaaaattctttatgatgatgggaaaatggtagaagaagtggatggccgagccacacagaagttaattgtcaacctgaagcctgagaaatcatattcatttgtgctgacaaatcgtggaaacagtgctggtgggctgcagcacagggtcacggcaaagactgcaccagatgtattacgtaccaagcctgccttcattgggaagaccaacttggatggcatgattactgtgcaactgcctgaagtacctgcaaatgagaatataaaaggttactacataataattgtgcctttgaagaaatctcgcgggaaatttatcaagccatgggagagtccagatgaaatggaattagatgagctgcttaaggagatatctaggaagcgcagaagcatccgttatgggagagaagttgaattaaagccatatattgccgctcactttgatgtccttcccactgagttcaccctgggggatgacaagcattatggtggatttacaaacaagcaactccaaagtggtcaagaatatgtcttctttgtgttagcagtaatggaacatgcagagtctaagatgtatgcaaccagcccttactccgaccccgtggtgtcaatggatctggatccgcagccaatcacggatgaagaagaaggcttgatctgggttgtaggtcctgtccttgcagtggtctttatcatctgcattgtcattgctattcttctttataaaaggaagagggcagagtccgactctagaaaaagcagcataccgaacaataaggagatcccttcacaccacccaacagaccctgtagaactgaggcgccttaactttcaaacaccgggtatggctagccatcctccaatacccatcttggaacttgcagaccacattgaaagattgaaagcaaatgacaacttgaagttttcccaggaatatgagtcaattgaccctggccagcagttcacttgggaacattcaaacttggaagtaaacaaaccaaagaatagatacgcgaatgtaatcgcatatgatcattcccgggttctcctatcagctatagaagggatcccaggaagtgactatgtgaatgccaactacatagatgggtataggaagcaaaatgcctatattgcaacacagggatctctccccgaaacatttggggacttttggagaatgatatgggaacaacggagtgccacagttgtcatgatgacaaaactagaagaaagatcaagggtgaagtgtgaccagtattggcctagcagaggcacagaaacccacggactcgttcaagtaacgctgcttgatactgtggagctggccacatattgtgttcgaacatttgcactttacaagaatggttcaagtgagaagagagaagtgagacaattccagttcaccgcctggcctgatcatggtgttccagaacaccctacaccttttctagctttcttacgtagagtcaaaacctgtaaccctcccgatgctggtccgatggttgtgcactgcagtgcgggagttggccggactggttgcttcatcgtcatagatgccatgttagaaagaataaagcatgaaaaaactgtagatatttatggccatgtaactttaatgagagcccagaggaactatatggttcaaacagaagaccaatacatctttatccatgatgcactgttagaagcagtgacttgtggaaataccgaagtgccagctagaaacttgtatgcctacattcagaagctgacacaaatagaaacgggagagaatgtcacaggaatggagctcgaatttaagcgtctagccagctcaaaagctcacacctcaaggtttatcagtgccaatcttccatgtaataaattcaaaaatcgccttgttaatattatgccatatgaatccacaagggtatgcctgcagcctatccgtggagtagaaggatctgattacatcaatgccagttttattgatggatacagacaacagaaagcctacatcgctacccaggggcccttggcagagaccactgaagacttctggcggatgctctgggaacacaattccaccatagttgtgatgctcaccaagctgcgtgaaatgggcagagagaaatgtcaccaatactggccagcagaacggtctgcaagataccagtactttgttgtagatcccatggctgagtacaacatgccacagtatatcctaagggaattcaaggtcacagatgccagggacggccagtcccgaacagtaaggcagttccagttcactgactggccagagcaaggagtgccaaagtccggagaaggatttattgacttcatcggccaagtccataaaacaaaagaacagtttggccaagatggacccatttcagtccattgcagcgcgggcgttggaagaactggagtcttcataacgctaagcattgttttggaaagaatgagatatgaaggagttgtagatatcttccagactgtcaaaatgttaagaacacaacgaccagctatggtacagacagaggatcaatatcagttttcctatcgtgccgcactagagtacctgggcagctttgaccactatgcaacgtagaaacccctgacccattctggatttttactacaggcccttcaatatccatggagtctcttctgagccatacagggcacttgagaagtccttcttaacttctagctaacaactacttagtgggactattacacacaaaacaaattaaaaacaaattattccaggtggaccaagaattcacagtttaataatctaacctgaaaaataatgaagagaatcctgactgatgaggcatctgaaggattttatttacagatacctcaaggattcaaaatcaagggaagaagaaatcacagcaaagaaccaccatcttattcaggattgcttgaaaggtgcaaggagaaattgccagaatgctgcagttcagcacaagatatgtgctggtgtggcttctcacaatgaaacggactctgctttgacatcgccccttcccaccatactgctcataataacattttagggggaaaggggagggaatgtttaaaaagaaagtccttgatttagttttttagtattgtaaagatactgctgacctgtgcttcatttctaactgtgtaaacttttttttaacaaaatgtatcattcgataaagtgaattttaaaaaagttacataactcttcatttttttatttccaaatcgtaggtttttttaagctgtagaactgttatctgtaatatcttgctgtagaaatatcaaatcatttgaaaatttgcacatttttgtgcaaaactcaatctacagtatcagtctcgtcagatatattaattttacacttcagttttgattggtgagaaagtacccattctcttcaaataatcaaagataattattattttgttttgtttttggaatcaacagggaggcgcaaagtataaagttgctgctaacatatatacatatatatccatattttataagggtgtctatgtatatatagacagtgtgtccacacaaaaaatagatacagttatcagtcagtcagttcttccatgatttagtttttttaaacgtagaaaagctattgtaaacatctctttccatttattcttaattttttgacatattggtatttctttaaagggaaatgaggaatgcacatcagtgattgattgtcaaacctcaccccctgatttcctacctaatctacccccacctaaccaatcaatcacatccacaaattgttttgtttgtttgttagtcaggcttccaacaaagttcaatatttctaacactctagtgcaataaaaattattattaaatagctaagaggtgtgcatgtgggaaaggtcagtgcatatccctttaggaggggagaatgttgtaatatatcagctatcgagttgtttaaaaaaagtgtattcaatcgtatattgtctatagtatgtgctatgaaatttgcatttatgatatgtaacaggggcaaagccaaattcatgttactctgttcagtcagaaacattttgtggcatacagcattcctgggaagtgctgtactttgtttcgttttggttttagttttgcatttagagtgccttataattgatgcctattttaatagcatttctttttagcttttggttcgtatttccattcactgttcgtatctgttactttctattaaagcattatctgtttaccacatgtacaaaaactctttgaataatatgcattcctagttttcagccaagtcggggatgttagtgattgtaccagcccaaagcacttggataatcagggcccttcttccttttataatcaatcatcaacatcagaaaaagctacttgttttatttatattcccttccaaatccgctctggaacatgcagtaactgcaccaaacttattttagtaacaaatatcattggcaactttggaatatatttgatattccattaggatttttctaaaaggggaaataaactatatatatatatgtatcttacccccaattcttccaacagaatttctataggaagccatggatgatggcataagtttgccacatattacatgattttaaataatcctcaaaatacccaaggaactcttaaagagttttggtatgagtatactactttggtttaattttagcttcatggatgttctgcatggaaggatttttgttttccacattttcccattgctagcagagtgaaatccaagagaccaaacatttgcaagcattgtatttgagcacttttgtaaaaaacaaagaaaaagaaaaaaaagaaaatatatataatactaaaaaaaagtatctagaaggctacctcagaatgagactctctaacctacatcagaaccagagaagaatgtgcactatgtgggtctgttatcattattttcttttagtttgtatctttttggagatttatccaagtgccagattactcagtgctataattttcttttagttaaacaaagggggtcagacagacattgcatcatccagacatgccttgttggacatgtagaatccgatggagcactgcacaccagaatgattggccaatgagcagcttctctccctgaaacaataactgcccatttggcaaagggaaagatgacaataatcagaagaagaaaatgaatgggatgcataccatagacgaacgaggcggagactattgcgggaatcttactgttcaggagctgttcctagaactaactcccttactgtcattgatgtgcattccactctgtgcttttctgtacaaccattcaagttttaatttcccaggtgaaccatctttatctgccattaccacaagctttcaagtttccagttattttcatcatcataaccagtacggtgctattatttacctatgtacgtgtagttatgtataattttgtaattagttacaatggtaaaaaaaatcaaaatatataaaaagtgatttgtacagaactttattttagctcttttttaaaaatgatttgcatggttagaaaacggcgaggacagccaggggagggaagggcctctagggaactttgcactttctatacctttgtactatgcactgccctattgattctacacccaataatgatattacttgaacccatctgtaagaaactgcttcggaaattcatttgtgtgtatgtaaataacacaacatagaaacaggaagggaaaaaagtctgcagtaatgcacgtattttttttctttcctgtttattttcggttttgctttaagtccttttatttttaattccctttttgtttttctttttgggttttggttccttttgggtttatgggtgccctgatactccagcagagatcagaaggctacagatccattctatccatccgttatgtggctttgccatcccagcttggagtgtctttacaaagataataacagttgtgttctttgctctcgttttggatgcatagactgaaaaattaaaacaaataacttgtaaaatggcttgttaaaaaatacaattacctctaattagtagtacgcgtaaatgttttacagaatgaaaggcgtgctttttattttcttacttcgttacattggtggcgaaagaagtctgtatgaaaatcagttctttgctgacacaagttccatttgttacaaatgaattctaataaaaatgtcagtgttatgca

SEQ ID NO: 805 - protein, 1903 aa, Homo sapiens
MVHVARLLLLLLTFFLRTDAETPPRFTRTPVDQTGVSGGVASFICQATGDPRPKIVWNKKGKKVSNQRFEVIEFDDGSGSVLRIQPLRTPRDEAIYECVASNNVGEISVSTRLTVLREDQIPRGFPTIDMGPQLKVVERTRTATMLCAASGNPDPEITWFKDFLPVDTSNNNGRIKQLRSESIGGTPIRGALQIEQSEESDQGKYECVATNSAGTRYSAPANLYVRELREVRRVPPRFSIPPTNHEIMPGGSVNITCVAVGSPMPYVKWMLGAEDLTPEDDMPIGRNVLELNDVRQSANYTCVAMSTLGVIEAIAQITVKALPKPPGTPVVTESTATSITLTWDSGNPEPVSYYIIQHKPKNSEELYKEIDGVATTRYSVAGLSPYSDYEFRVVAVNNIGRGPPSEPVLTQTSEQAPSSAPRDVQARMLSSTTILVQWKEPEEPNGQIQGYRVYYTMDPTQHVNNWMKHNVADSQITTIGNLVPQKTYSVKVLAFTSIGDGPLSSDIQVITQTGVPGQPLNFKAEPESETSILLSWTPPRSDTIANYELVYKDGEHGEEQRITIEPGTSYRLQGLKPNSLYYFRLAARSPQGLGASTAEISARTMQSKPSAPPQDISCTSPSSTSILVSWQPPPVEKQNGIITEYSIKYTAVDGEDDKPHEILGIPSDTTKYLLEQLEKWTEYRITVTAHTDVGPGPESLSVLIRTNEDVPSGPPRKVEVEAVNSTSVKVSWRSPVPNKQHGQIRGYQVHYVRMENGEPKGQPMLKDVMLADAQDMIISGLQPETSYSLTVTAYTTKGDGARSKPKLVSTTGAVPGKPRLVINHTQMNTALIQWHPPVDTFGPLQGYRLKFGRKDMEPLTTLEFSEKEDHFTATDIHKGASYVFRLSARNKVGFGEEMVKEISIPEEVPTGFPQNLHSEGTTSTSVQLSWQPPVLAERNGIITKYTLLYRDINIPLLPMEQLIVPADTTMTLTGLKPDTTYDVKVRAHTSKGPGPYSPSVQFRTLPVDQVFAKNFHVKAVMKTSVLLSWEIPENYNSAMPFKILYDDGKMVEEVDGRATQKLIVNLKPEKSYSFVLTNRGNSAGGLQHRVTAKTAPDVLRTKPAFIGKTNLDGMITVQLPEVPANENIKGYYIIIVPLKKSRGKFIKPWESPDEMELDELLKEISRKRRSIRYGREVELKPYIAAHFDVLPTEFTLGDDKHYGGFTNKQLQSGQEYVFFVLAVMEHAESKMYATSPYSDPVVSMDLDPQPITDEEEGLIWVVGPVLAVVFIICIVIAILLYKRKRAESDSRKSSIPNNKEIPSHHPTDPVELRRLNFQTPGMASHPPIPILELADHIERLKANDNLKFSQEYESIDPGQQFTWEHSNLEVNKPKNRYANVIAYDHSRVLLSAIEGIPGSDYVNANYIDGYRKQNAYIATQGSLPETFGDFWRMIWEQRSATVVMMTKLEERSRVKCDQYWPSRGTETHGLVQVTLLDTVELATYCVRTFALYKNGSSEKREVRQFQFTAWPDHGVPEHPTPFLAFLRRVKTCNPPDAGPMVVHCSAGVGRTGCFIVIDAMLERIKHEKTVDIYGHVTLMRAQRNYMVQTEDQYIFIHDALLEAVTCGNTEVPARNLYAYIQKLTQIETGENVTGMELEFKRLASSKAHTSRFISANLPCNKFKNRLVNIMPYESTRVCLQPIRGVEGSDYINASFIDGYRQQKAYIATQGPLAETTEDFWRMLWEHNSTIVVMLTKLREMGREKCHQYWPAERSARYQYFVVDPMAEYNMPQYILREFKVTDARDGQSRTVRQFQFTDWPEQGVPKSGEGFIDFIGQVHKTKEQFGQDGPISVHCSAGVGRTGVFITLSIVLERMRYEGVVDIFQTVKMLRTQRPAMVQTEDQYQFSYRAALEYLGSFDHYAT

SEQ ID NO: 806 - DNA, 8845 bp, Homo sapiens
gcagtttattctgggcctgtgtggaatagaaagacaattctttatttgactggtaggaaagaaaagagaagactcctcagggtttccaaggaggactggagcggctgctttagtgaagaagtgaagaatcaaggaagtaaaggacctgtctcaaagtcacacaactaggaaatcttgaggagtctgatacttttcatcctccagctataaaatcatcttgtagggggaagctgtacattggtggaaaataaaaggcaagcagttcctggcccgtgatattccagttagaggtgtctgactgacagcatgttggcaccgagggaagcgatgggcttcggctccaggtttctgtcctgagaccacagcagaatgtgccttggacaaaggcttggactccttgatcttctggtaacttcaaaaatctggtctcagggtggtgaactttttcttcgaattcctaacctgtgagcttacgatgatggtgcctgtccattaactgaacaactgtggttttgaacttcttgaggccagggactgtgtctgaaaacaccgacggtggctaactcaagggagacgtctggtgaacacccgtgggatctaaagaacaagctctgaaagtgttccagctgaaatttcagatcggacagactcgctgcggctccggaggcagtgattccaagctgctcgcgcacgctgctgccaagctgcaggatggtgcacgtagccaggctgctgctgctgctcctcactttcttcctccgcacggatgctgagacacctccaaggtttacacgaacacccgttgatcagacaggggtctctggcggagttgcctctttcatctgccaagctacgggagacccaagacctaaaattgtctggaacaaaaaaggaaagaaagtcagcaatcagagatttgaggtaatagagtttgacgatgggtctggatcagttctcagaatacaacccttacggactccgagggatgaggccatttatgaatgtgtggcctcaaataatgtgggagaaataagtgtatccaccagactcacagttttgcgggaagatcaaattcccaggggcttccctaccattgacatgggcccacagttgaaggtggttgagcgtactcgcacggccaccatgctttgtgcagccagtggtaatccggatccagaaatcacttggtttaaagatttcttacctgtggacacaagcaacaacaatggtcgtattaagcagttacgatcagaatctattggtggtacaccaataagaggagcccttcagattgagcagagtgaagagtctgaccaaggaaaatatgagtgtgttgccaccaacagcgcgggcactcgctattccgctcctgccaatttatatgtcagagagctgcgagaagttcgccgtgtcccaccaagattctctatcccacccactaatcatgaaatcatgccaggcggaagcgttaatatcacctgtgtggccgtggggtcaccaatgccttatgtaaagtggatgttgggggcagaagatctgacacctgaagatgatatgccaataggaagaaatgtgctagaactgaatgatgtaagacagtcagcaaattacacctgtgttgctatgtcaacactgggtgtcattgaagcaatagcacagatcactgtcaaagccttacccaaacctccaggaactcctgtagtgaccgagagcacagctacaagcatcacactgacgtgggactctgggaaccctgagcctgtttcttattacataattcagcataaacctaaaaactctgaggaactttacaaagaaattgatggggtggcgaccacacgctacagtgtcgctggactaagtccctactcggattatgaattcagggttgttgctgtcaataacattgggcgggggcctcccagcgaacctgtgctaacacaaacctcagagcaagcaccatccagtgccccgagggatgtccaggcacgaatgttgagttcgaccaccattttggtacagtggaaggaacctgaagagccaaatggacagatccaaggatatagagtttattatacaatggatcccactcaacatgtcaacaactggatgaaacacaatgtagctgacagccaaatcactactattggcaacttagtgccccagaaaacatattctgtcaaagtcctggcttttacctcaattggagatggtcccctttcaagtgacatacaagtcatcactcagacaggagtaccagggcagccactaaacttcaaagcagaacctgagtctgaaacaagtattttgctctcttggacacctccacgttcagataccattgccaactatgaactggtctacaaagatggggagcatggagaggagcaacgaattaccattgagccagggacatcatataggctgcaaggactgaaaccaaacagcttatactatttccgtctggctgcacgctcccctcaaggcctgggtgcttctactgcagaaatatcagctagaaccatgcagtcaatgtttgcaaaaaattttcatgtcaaagcagtaatgaagacttccgtgttgctgtcttgggagattccagagaattataactccgccatgcctttcaaaattctttatgatgatgggaaaatggtagaagaagtggatggccgagccacacagaagttaattgtcaacctgaagcctgagaaatcatattcatttgtgctgacaaatcgtggaaacagtgctggtgggctgcagcacagggtcacggcaaagactgcaccagatgtattacgtaccaagcctgccttcattgggaagaccaacttggatggcatgattactgtgcaactgcctgaagtacctgcaaatgagaatataaaaggttactacataataattgtgcctttgaagaaatctcgcgggaaatttatcaagccatgggagagtccagatgaaatggaattagatgagctgcttaaggagatatctaggaagcgcagaagcatccgttatgggagagaagttgaattaaagccatatattgccgctcactttgatgtccttcccactgagttcaccctgggggatgacaagcattatggtggatttacaaacaagcaactccaaagtggtcaagaatatgtcttctttgtgttagcagtaatggaacatgcagagtctaagatgtatgcaaccagcccttactccgaccccgtggtgtcaatggatctggatccgcagccaatcacggatgaagaagaaggcttgatctgggttgtaggtcctgtccttgcagtggtctttatcatctgcattgtcattgctattcttctttataaaaggaagagggcagagtccgactctagaaaaagcagcataccgaacaataaggagatcccttcacaccacccaacagaccctgtagaactgaggcgccttaactttcaaacaccgggtatggctagccatcctccaatacccatcttggaacttgcagaccacattgaaagattgaaagcaaatgacaacttgaagttttcccaggaatatgagtcaattgaccctggccagcagttcacttgggaacattcaaacttggaagtaaacaaaccaaagaatagatacgcgaatgtaatcgcatatgatcattcccgggttctcctatcagctatagaagggatcccaggaagtgactatgtgaatgccaactacatagatgggtataggaagcaaaatgcctatattgcaacacagggatctctccccgaaacatttggggacttttggagaatgatatgggaacaacggagtgccacagttgtcatgatgacaaaactagaagaaagatcaagggtgaagtgtgaccagtattggcctagcagaggcacagaaacccacggactcgttcaagtaacgctgcttgatactgtggagctggccacatattgtgttcgaacatttgcactttacaagaatggttcaagtgagaagagagaagtgagacaattccagttcaccgcctggcctgatcatggtgttccagaacaccctacaccttttctagctttcttacgtagagtcaaaacctgtaaccctcccgatgctggtccgatggttgtgcactgcagtgcgggagttggccggactggttgcttcatcgtcatagatgccatgttagaaagaataaagcatgaaaaaactgtagatatttatggccatgtaactttaatgagagcccagaggaactatatggttcaaacagaagaccaatacatctttatccatgatgcactgttagaagcagtgacttgtggaaataccgaagtgccagctagaaacttgtatgcctacattcagaagctgacacaaatagaaacgggagagaatgtcacaggaatggagctcgaatttaagcgtctagccagctcaaaagctcacacctcaaggtttatcagtgccaatcttccatgtaataaattcaaaaatcgccttgttaatattatgccatatgaatccacaagggtatgcctgcagcctatccgtggagtagaaggatctgattacatcaatgccagttttattgatggatacagacaacagaaagcctacatcgctacccaggggcccttggcagagaccactgaagacttctggcggatgctctgggaacacaattccaccatagttgtgatgctcaccaagctgcgtgaaatgggcagagagaaatgtcaccaatactggccagcagaacggtctgcaagataccagtactttgttgtagatcccatggctgagtacaacatgccacagtatatcctaagggaattcaaggtcacagatgccagggacggccagtcccgaacagtaaggcagttccagttcactgactggccagagcaaggagtgccaaagtccggagaaggatttattgacttcatcggccaagtccataaaacaaaagaacagtttggccaagatggacccatttcagtccattgcagcgcgggcgttggaagaactggagtcttcataacgctaagcattgttttggaaagaatgagatatgaaggagttgtagatatcttccagactgtcaaaatgttaagaacacaacgaccagctatggtacagacagaggatcaatatcagttttcctatcgtgccgcactagagtacctgggcagctttgaccactatgcaacgtagaaacccctgacccattctggatttttactacaggcccttcaatatccatggagtctcttctgagccatacagggcacttgagaagtccttcttaacttctagctaacaactacttagtgggactattacacacaaaacaaattaaaaacaaattattccaggtggaccaagaattcacagtttaataatctaacctgaaaaataatgaagagaatcctgactgatgaggcatctgaaggattttatttacagatacctcaaggattcaaaatcaagggaagaagaaatcacagcaaagaaccaccatcttattcaggattgcttgaaaggtgcaaggagaaattgccagaatgctgcagttcagcacaagatatgtgctggtgtggcttctcacaatgaaacggactctgctttgacatcgccccttcccaccatactgctcataataacattttagggggaaaggggagggaatgtttaaaaagaaagtccttgatttagttttttagtattgtaaagatactgctgacctgtgcttcatttctaactgtgtaaacttttttttaacaaaatgtatcattcgataaagtgaattttaaaaaagttacataactcttcatttttttatttccaaatcgtaggtttttttaagctgtagaactgttatctgtaatatcttgctgtagaaatatcaaatcatttgaaaatttgcacatttttgtgcaaaactcaatctacagtatcagtctcgtcagatatattaattttacacttcagttttgattggtgagaaagtacccattctcttcaaataatcaaagataattattattttgttttgtttttggaatcaacagggaggcgcaaagtataaagttgctgctaacatatatacatatatatccatattttataagggtgtctatgtatatatagacagtgtgtccacacaaaaaatagatacagttatcagtcagtcagttcttccatgatttagtttttttaaacgtagaaaagctattgtaaacatctctttccatttattcttaattttttgacatattggtatttctttaaagggaaatgaggaatgcacatcagtgattgattgtcaaacctcaccccctgatttcctacctaatctacccccacctaaccaatcaatcacatccacaaattgttttgtttgtttgttagtcaggcttccaacaaagttcaatatttctaacactctagtgcaataaaaattattattaaatagctaagaggtgtgcatgtgggaaaggtcagtgcatatccctttaggaggggagaatgttgtaatatatcagctatcgagttgtttaaaaaaagtgtattcaatcgtatattgtctatagtatgtgctatgaaatttgcatttatgatatgtaacaggggcaaagccaaattcatgttactctgttcagtcagaaacattttgtggcatacagcattcctgggaagtgctgtactttgtttcgttttggttttagttttgcatttagagtgccttataattgatgcctattttaatagcatttctttttagcttttggttcgtatttccattcactgttcgtatctgttactttctattaaagcattatctgtttaccacatgtacaaaaactctttgaataatatgcattcctagttttcagccaagtcggggatgttagtgattgtaccagcccaaagcacttggataatcagggcccttcttccttttataatcaatcatcaacatcagaaaaagctacttgttttatttatattcccttccaaatccgctctggaacatgcagtaactgcaccaaacttattttagtaacaaatatcattggcaactttggaatatatttgatattccattaggatttttctaaaaggggaaataaactatatatatatatgtatcttacccccaattcttccaacagaatttctataggaagccatggatgatggcataagtttgccacatattacatgattttaaataatcctcaaaatacccaaggaactcttaaagagttttggtatgagtatactactttggtttaattttagcttcatggatgttctgcatggaaggatttttgttttccacattttcccattgctagcagagtgaaatccaagagaccaaacatttgcaagcattgtatttgagcacttttgtaaaaaacaaagaaaaagaaaaaaaagaaaatatatataatactaaaaaaaagtatctagaaggctacctcagaatgagactctctaacctacatcagaaccagagaagaatgtgcactatgtgggtctgttatcattattttcttttagtttgtatctttttggagatttatccaagtgccagattactcagtgctataattttcttttagttaaacaaagggggtcagacagacattgcatcatccagacatgccttgttggacatgtagaatccgatggagcactgcacaccagaatgattggccaatgagcagcttctctccctgaaacaataactgcccatttggcaaagggaaagatgacaataatcagaagaagaaaatgaatgggatgcataccatagacgaacgaggcggagactattgcgggaatcttactgttcaggagctgttcctagaactaactcccttactgtcattgatgtgcattccactctgtgcttttctgtacaaccattcaagttttaatttcccaggtgaaccatctttatctgccattaccacaagctttcaagtttccagttattttcatcatcataaccagtacggtgctattatttacctatgtacgtgtagttatgtataattttgtaattagttacaatggtaaaaaaaatcaaaatatataaaaagtgatttgtacagaactttattttagctcttttttaaaaatgatttgcatggttagaaaacggcgaggacagccaggggagggaagggcctctagggaactttgcactttctatacctttgtactatgcactgccctattgattctacacccaataatgatattacttgaacccatctgtaagaaactgcttcggaaattcatttgtgtgtatgtaaataacacaacatagaaacaggaagggaaaaaagtctgcagtaatgcacgtattttttttctttcctgtttattttcggttttgctttaagtccttttatttttaattccctttttgtttttctttttgggttttggttccttttgggtttatgggtgccctgatactccagcagagatcagaaggctacagatccattctatccatccgttatgtggctttgccatcccagcttggagtgtctttacaaagataataacagttgtgttctttgctctcgttttggatgcatagactgaaaaattaaaacaaataacttgtaaaatggcttgttaaaaaatacaattacctctaattagtagtacgcgtaaatgttttacagaatgaaaggcgtgctttttattttcttacttcgttacattggtggcgaaagaagtctgtatgaaaatcagttctttgctgacacaagttccatttgttacaaatgaattctaataaaaatgtcagtgttatgca

SEQ ID NO: 807 - protein, 1501 aa, Homo sapiens
MVHVARLLLLLLTFFLRTDAETPPRFTRTPVDQTGVSGGVASFICQATGDPRPKIVWNKKGKKVSNQRFEVIEFDDGSGSVLRIQPLRTPRDEAIYECVASNNVGEISVSTRLTVLREDQIPRGFPTIDMGPQLKVVERTRTATMLCAASGNPDPEITWFKDFLPVDTSNNNGRIKQLRSESIGGTPIRGALQIEQSEESDQGKYECVATNSAGTRYSAPANLYVRELREVRRVPPRFSIPPTNHEIMPGGSVNITCVAVGSPMPYVKWMLGAEDLTPEDDMPIGRNVLELNDVRQSANYTCVAMSTLGVIEAIAQITVKALPKPPGTPVVTESTATSITLTWDSGNPEPVSYYIIQHKPKNSEELYKEIDGVATTRYSVAGLSPYSDYEFRVVAVNNIGRGPPSEPVLTQTSEQAPSSAPRDVQARMLSSTTILVQWKEPEEPNGQIQGYRVYYTMDPTQHVNNWMKHNVADSQITTIGNLVPQKTYSVKVLAFTSIGDGPLSSDIQVITQTGVPGQPLNFKAEPESETSILLSWTPPRSDTIANYELVYKDGEHGEEQRITIEPGTSYRLQGLKPNSLYYFRLAARSPQGLGASTAEISARTMQSMFAKNFHVKAVMKTSVLLSWEIPENYNSAMPFKILYDDGKMVEEVDGRATQKLIVNLKPEKSYSFVLTNRGNSAGGLQHRVTAKTAPDVLRTKPAFIGKTNLDGMITVQLPEVPANENIKGYYIIIVPLKKSRGKFIKPWESPDEMELDELLKEISRKRRSIRYGREVELKPYIAAHFDVLPTEFTLGDDKHYGGFTNKQLQSGQEYVFFVLAVMEHAESKMYATSPYSDPVVSMDLDPQPITDEEEGLIWVVGPVLAVVFIICIVIAILLYKRKRAESDSRKSSIPNNKEIPSHHPTDPVELRRLNFQTPGMASHPPIPILELADHIERLKANDNLKFSQEYESIDPGQQFTWEHSNLEVNKPKNRYANVIAYDHSRVLLSAIEGIPGSDYVNANYIDGYRKQNAYIATQGSLPETFGDFWRMIWEQRSATVVMMTKLEERSRVKCDQYWPSRGTETHGLVQVTLLDTVELATYCVRTFALYKNGSSEKREVRQFQFTAWPDHGVPEHPTPFLAFLRRVKTCNPPDAGPMVVHCSAGVGRTGCFIVIDAMLERIKHEKTVDIYGHVTLMRAQRNYMVQTEDQYIFIHDALLEAVTCGNTEVPARNLYAYIQKLTQIETGENVTGMELEFKRLASSKAHTSRFISANLPCNKFKNRLVNIMPYESTRVCLQPIRGVEGSDYINASFIDGYRQQKAYIATQGPLAETTEDFWRMLWEHNSTIVVMLTKLREMGREKCHQYWPAERSARYQYFVVDPMAEYNMPQYILREFKVTDARDGQSRTVRQFQFTDWPEQGVPKSGEGFIDFIGQVHKTKEQFGQDGPISVHCSAGVGRTGVFITLSIVLERMRYEGVVDIFQTVKMLRTQRPAMVQTEDQYQFSYRAALEYLGSFDHYAT

SEQ ID NO: 808 - DNA, 5399 bp, Homo sapiens
gatgtaacaaggccaggctcgcgccgcgtcccctctttcccagactcagtgctccctcctcctcccgcgccccgcgctctgcgcgctgagctggcgccgggctccgcttgcacagcaccgggaccgacgggcactgctgggagagccgctctcccaggttccacctccccgatgcagagtccgtgggggaaaccaggctttcctcccagaaccaagggagcgagccgagggggcagctgctgtgggggcttctgaggagacagcctggcttctttccctacttcctggagagggcaggaaacctcagaatagaggaacgctgctccctggtcagcaagcagcccccaacctggatggagtgaaacatgcggcctgatgacattaacccgaggactgggctggtggtggccctggtcagtgtcttcctcgtctttggtttcatgttcaccgtctctgggatgaaaggggagactttgggaaacatccccctcctggccatcgggccagccatctgcctaccaggcatcgcagccattgccctggccaggaaaaccgagggatgcaccaagtggccagagaacgagctgctgtgggtccgcaaattgccctgcttccggaaacccaaagacaaggaggtggtagagctgctgaggaccccttcagacctagaatccggcaaggggagctcagatgagctggctaagaaggcgggcctcagggggaagcctcccccacaaagccagggtgaggtgtccgtggccagctccatcaacagccccacacccacggaggaaggagaatgccagagcctcgtccagaatgggcatcaggaggagacgtccagatacctggacggctactgcccctcgggcagttccctcacctacagtgccttggacgtcaagtgctcagcaagggacagatctgagtgccctgagcctgaggatagcatcttctttgtgccccaggacagtatcatcgtttgctcctacaagcagaacagcccgtatgacagatactgttgttatatcaatcagatacaaggcaggtgggaccacgagaccatcgtctaatctctgcctacaaaggtggctggattgatagaatatgactaagcccagctccccgtggaagcaaattgctctgcttggagagccttcacactgttagaaattgacctggtatgtgatgggtgtgataacctctggtacccgagagtcatgtaaataggcatgttggggacacattttagggaagggcgatgagggttaaggacactggaagaggcagtgggtaggaaaggaagctactccagttgcttcttaacaatttacacaatgttaaatgttttgtaaaataacccaaaaagtgctatccagaaccagctgagagcaagataaatctagagtgggctgcagatgtgaggcatcaaatgatgcatgagctgaccacagggaaactgagctgctttatgtttgaataagttgaaaataaaattaatgatccgttatataaagtaatttttgcctggttaaaagcttatcacacttggtatttgctgaaagaaaaaaaaatcaagatacaagagttaaaccctccttagatgggatggtttttgggaaaagggtagttaaagagagttggattatgtaactgagtcttgtggcattattgtctgacaagatcatggtctctaataaagtaaaataagtgtgagcagctatgtgaaaagttaacatttttagatggctatgttacttcttaaactcttcgtttaaatccatttattgcatctttatctgaaatgggttttttctaaacatttactatcattcatgtattatttccttaccaggtgcaacattatttgaaatgatactttcatagattggaatttgttttcatcaagacaaaatgaattttacatatatatccaagtctttaacattggcagacatgtactgataattaccattcctacataccttttaaaatctgaaaactataaagtctacacattagccttgaacattgcacataatttgtatgaaatgcaatggttaaacctttggaagtgtcattatttgtacatttgttcaactcctctcacagactgtaaatgccagtgaaacaagaactcatctactaaatttaactgaagcctagattttattaagctcacctgatcagtgaacattacatgataaaagtctctttatttcatacatttttgctgctgaggaaaacaacaaatcacaatgatatcctaaaatgtgctttctatttcacttgctcaactgcaatagataagaaggctatcaagcagaatgccatttgatccccggtgaagaaaaatatgaattatatataggaatggtgatagagttcatcttgaagatcagaagtattttgtatccttcaaagaatgatcattttaagtgatcatatagtcttagtcactttctcccaaaaggggaattgaggacaaaaatttgggcatatatgttttgtgtatttcaattccaactctgcaattctttcttaagtatagcaattgttctgtcttaagaatcatggtatttttaaaaaatcataattttcaagtcaagttcaagatcaaaaatatgtaattattttagtagggcttaaatatcagaaatgagatgcatgatcttgggcaaattttatcttcttacacctgagtttcctactctgtgaagggagggggaactgatttacacttgattatttctatcattcattttcagtgtaaatattctatggtgttatgtcaaaggcattttatatattgccaggaaatgagttacagcaaaatgcatgccaaagttatgaaatttatgataattatgtgacatacattgcacagctactactcaaaaaagaattttgtagatgtatgaaagcagattattcaacacaatgcattcctgagaataaaatgaacataatcagagtaaaatatttttgaggagaaaacttaaaatgttggtataactcaaagtaatctaatacacaaccttgcactaaatgtgattgacatttggatttgggatggggagagatagtttcctaaaatcacagtaacttttaataattgtaatgcattttgaaaacagagaatcatatttttataatggtgagaactatgcaataactctttaggaatgaaaacttcctttaagaagtttgccaccgttagagatgaggagatagtgagacagagagatgttcacagagactcagcaaatcttagacaataatgctgcaattttctgaaagaagatgcttgcagtgtcaggtatggtttgggggttggaaaagttacttttctgatttcttggaaccatttaaaactcctttatatcattctgtctctttccaaattgagggtcaactactagtttagagatataaggtattttatcttgttttcaagttctacttcagaagaaaacctatttcatgtttcttctcccattacctacttaagatacttaaggtatttaagtatgcatttgaggaaatattttcctgtgctaaaataaaggtttgcaaatgttggtgtgagaggttttaactttgaccagtgagaataaaatgtatgattgtgtgtgtgaatttctcctaacatattaaccaactcctttctatatgcaacaaggtaacctggtgccccaaatcaatacttgtaagtactattcagagttaaacttccaaagtcaaaaaatatatatacacaaaaaaaggggaaaagccacatttttttgaacagaggtagaagagaaagagaaaaaaagtgtctcagccctttagaggaaaagagagcaactcattctgatgagttacacagttttagcaaattgttcttatcaatataatagacatgaggattgttcctggtagccttcaagagctcctagacagatataaatttaagtagacattactttattttgctgttaatccaagtagacattgcgacttgattctgaataggcattttattttcaaaatttttctactgaatttctcttgctctgtatgcctacttattgtgcacatgggttgtttttccaaactgcttcttgattcttaagtgagaattcagacatgatactcaaacgagagcatattagacatctgttttaagatttattttctgttgcagtcatcttggcaaacaaaatccagatacagttaagttcaggctctcttccaaaccctgctaagcagctgctttgaaaatgttttcaatactatggatcttaatatccactgagatgacaaatgtaggaaaggaagattcattctgttaaatgttttttctcttttgcaatgtccaagctctacttatttattaatagcctccctctgtacccataacatcatttatttggtgaattcactgttattaatactagtattttatcacagtaaagaaaaggtttctgaaaacccacaacctcactatcctaaagcaactactgtgtttctattttggtatatcatcttccaggcttcctccacatgcaaatgcagcatacatattataatagtgtgtttttcttttctctttgaattatattccatgcatgtttccatgtttctatgtagtatttctaattatcaatgaacgattgtgtaatatgccattttagtgatgttccataatttatcatgccattccttattgctggcaagatactaagttttatggatgattttgtatgtttttttcctattgctggttacactgctatattatttgttatatgccaatagagaggaactttactattgaacaggtatctccttgtggatgagagagaggaggcagaaatgtgtaaatgaatggaactctccatattgttgtgtgggtcttcccttcactcttgtggatataagacccagggtgggaaacaaaacgatgcttcttccaaaagatcctcccatcaggaccagaactagtatgtttaggagtaagatggaacatttccccagctaagataccagtggtgtgtttctcacaattagattacagtggtgtcagtcttcaagagcatcgtgttcaacaagcaaaatgataaatagatgtaaacaataataatgactttgtaatatgccaaaagcattttcttaaagtacctcatcatatattttataatagatgtatttcatatgtatatgtattgtcgcctatcagtgacttacaaatgaactggaatttcaggaatctgatagactctgcccttgagttttctgtgtttcagtttcctactgggaaaaactaaactgaggatggaaatggggacaaatgcttggtttgcccaaatatcttaataaaagactagattccattcaaaaaaaaaaaaaaaaaa

SEQ ID NO: 809 - protein, 235 aa, Homo sapiens
MRPDDINPRTGLVVALVSVFLVFGFMFTVSGMKGETLGNIPLLAIGPAICLPGIAAIALARKTEGCTKWPENELLWVRKLPCFRKPKDKEVVELLRTPSDLESGKGSSDELAKKAGLRGKPPPQSQGEVSVASSINSPTPTEEGECQSLVQNGHQEETSRYLDGYCPSGSSLTYSALDVKCSARDRSECPEPEDSIFFVPQDSIIVCSYKQNSPYDRYCCYINQIQGRWDHETIV

SEQ ID NO: 810 - DNA, 6398 bp, Homo sapiens
gtggaatgacgggagggagtcccggcagctcctacctcccagcgatggcgtcgctgtgccgcgcccagtccccagcctgccggccggtactcaccgctacccggagttcgctcagacggtgagatttggggcgggtccgaggcagcggcgggacgctacctgcgaccgggaccatgaggagctgccagacccgtggggccggtaacgagagcagtcgcggcacctgctgagaggaaagagggagcggtccggcgcggctggggcgcggcagaggcttgcccgatcctcggccatgtcactgctctgcgtgcgcgttaaaagggccaaattccagggttcaccagataaatttaacacatatgtgaccctgaaagtacagaatgtgaagagcacaactgtagcagttcgtggtgatcagccttcctgggaacaggatttcatgtttgagattagtcgcctggacctgggtctaagtgtggaggtatggaacaaaggactgatctgggacaccatggtggggactgtgtggattgcgctgaagactattcgtcagtcggatgaggaagggcctggggaatggtccacattagaggcagagacgttaatgaaagacgatgagatctgtggaactagaaacccaactcctcataaaattttgcttgatacaagatttgagttgccttttgatatcccagaggaggaagccagatattggacctacaaatgggagcaaatcaatgccttgggagctgacaatgagtattctagtcaagaagaaagccagaggaagccattgcccactgctgccgcccagtgttcttttgaagaccctgatagtgccgtcgatgaccgagatagtgactatcgcagtgagaccagcaacagcttcccacctccttaccatacagcttcccagcccaacgcttctgtgcaccagttccctgtgccggtgcgatcgccacagcagctgctacttcaaggcagttcccgggactcttgtaatgactctatgcaaagttatgaccttgattatccagagcggcgggctatcagccccaccagcagcagtaggtatggctcctcctgtaatgtgagtcaaggaagctctcagctaagtgaactagaccagtatcacgaacaagatgacgaccatcgggagacggactcgattcattcttgccacagctctcacagcctgtccagagatggccaagcaggttttggagaacaagagaaacccttggaggtgacaggtcaagcagagaaggaggcagcatgtgaacccaaggagatgaaagaagatgccacaacccaccctcccccagatctggtgctgcaaaaagaccacttcctaggtccccaggagagttttcctgaggagaatgcatcttcaccatttacccaagccagagcacattggatccgagcagttaccaaggttcgactccagctgcaggagattccagatgatggtgacccctctctgcctcagtggctcccggaagggccagccggagggctctatggcattgacagcatgccagatttacgcagaaagaagccactgccacttgtcagtgatctgtcactggtccagtctcggaaggcaggaatcacttctgcaatggctacacgcacttctcttaaggacgaagagctgaaatcccacgtgtataagaaaaccctgcaggccttaatctaccccatttcgtgcaccactcctcataactttgaggtctggacggccactaccccaacctactgctatgagtgtgaaggcctgctctggggcattgcccggcagggcatgcgctgcagcgaatgtggagtcaagtgccatgagaagtgccaggatctgctcaatgctgactgcctgcagcgggctgcagaaaagagctgtaaacatggagctgaggaccggacccagaacattatcatggccatgaaggaccgcatgaagatccgagagcgaaataagccagagatctttgaagttatccgggacgtcttcacagtgaacaaagctgcccatgtgcagcagatgaaaacagtgaagcagagtgtactggatggcacctccaaatggtcagccaagatcaccattactgtggtgtgtgcccagggcctacaagccaaggacaaaacaggatccagtgacccttacgtgactgtgcaagtcagcaaaactaagaagcgtaccaagaccatttttggaaacttgaatcctgtttgggaggagaagttccattttgagtgccacaactcctctgaccgcattaaggtgcgtgtatgggatgaggatgatgacatcaagtcaagagtaaagcaacgcctaaagcgagagtctgatgatttccttggccaaaccatcattgaggttcggaccctaagtggcgagatggacgtctggtacaacttggagaagaggacagacaaatcagccgtctcaggggctatccgactacaaatcagtgtggagatcaagggggaggagaaagtagccccataccacgtgcagtatacatgtctccatgagaatcttttccattacctcacagacattcagggcagtggaggagtccgcatccctgaagctcgaggagacgatgcctggaaggtgtactttgatgagacagcccaagaaattgtggatgaatttgccatgcgttatggcattgagtccatatatcaggccatgacgcactttgcatgtttatcatccaagtacatgtgtcctggtgtgccagcagtgatgagcaccttactggccaacatcaacgcctactatgcccacacaactgcctctaccaatgtctctgcatctgatcgctttgcagcctccaactttgggaaagagagatttgtaaaactgctggaccagctacacaactcactgaggatcgacctctctacatacaggaataatttccctgctgggagtcctgaacggcttcaggacttaaaatccacagtggatttgctgaccagcattactttcttcagaatgaaggtacaagaactgcaaagccctccaagagccagccaggtggtaaaggattgtgtgaaggcctgtttgaactccacatatgaatatatcttcaacaactgccacgacttatacagccgccagtaccagctgaagcaggagctacctccagaggaacaagggcccagcattcggaacctggatttctggcccaagctcatcacactcatcgtgtcaatcatagaggaagataagaattcctacacacctgttctgaaccagtttcctcaggagttgaatgtgggaaaagtcagcgcagaagtgatgtggcatttgtttgcccaagacatgaaatatgcattggaggagcatgagaaagaccacctgtgtaaaagtgctgactacatgaacctgcacttcaaggtgaagtggctccacaatgaatacgtgcgggatctgcctgtcctccaggggcaggtgcctgagtacccagcgtggtttgagcagttcgtgctacaatggctggatgagaatgaggatgtatccctggaattcctgcgtggggccctggaacgagataagaaggatggattccagcagacatcagagcatgcactcttttcctgctctgtggtggatgtcttcacacaactcaatcagagctttgagatcatccggaagctggaatgcccagaccccagcatccttgcccactacatgaggaggtttgctaagaccatcgggaaggtgctgatgcagtatgcagacatcttgtcaaaggacttcccagcctattgcacaaaggagaaactgccctgcatcctgatgaacaacgtgcagcaactgagggtccagctggagaaaatgtttgaggccatgggaggcaaggagctggaccttgaagctgcagacagtctgaaggagctgcaggtgaaactgaatacggttctggatgagctcagcatggtgtttggaaacagtttccaggtacggattgatgagtgtgttcgacaaatggccgacatcctgggccaggttcggggcacagggaatgcatctccagacgccagggcctcagcggctcaggatgcagatagcgtactccggcctctcatggacttcctggatggcaacctcaccctctttgccactgtgtgtgagaagacggttctgaagcgtgtactgaaggagctctggcgcgtggtgatgaacacaatggagaggatgattgttctgcccccactcactgaccagacgggcacccagctgatcttcactgctgccaaggagctgagccatctttccaaactcaaggatcacatggtacgagaggaaacacggaatctcactccaaagcagtgtgcagtccttgacctcgccctggacaccatcaagcaatacttccatgcaggaggcaatgggctgaagaaaaccttcctggagaagagcccagatctgcagtctctacgctatgccctgtctctgtacacacagactactgacactctcatcaagacctttgtgcgctcgcagaccacccaagggtctggtgtggacgatcctgtgggagaagtctctattcaggtggacttgtttacacaccctggtactggggagcacaaggtcacagtgaaagtggtggctgccaatgacctcaagtggcagacagcgggtatgttccggcctttcgtggaggtgactatggttggcccacaccaaagtgataagaagaggaagttcacaaccaaatccaaaagcaacaactgggcccccaagtacaatgagacattccacttcctcctgggaaatgaggaggggcccgagtcctatgagttgcagatatgcgtgaaggattactgctttgcccgggaagatcgcgtgctagggctggctgtgatgcctctgagggatgtcacagccaagggcagctgtgcctgctggtgccccttgggccggaagatccatatggatgagacaggcctgaccattctccggattttatctcagaggagcaatgacgaggtggcccgagaatttgtgaaactcaaatcagagtctcgttccacggaggaggggagctgaacaccttcgactcctgtgccaatcaggcagcagcaatttcacaaatcagggccagtgggagttagctgtgtaaccggcttagggtctttgcagtcaagaggctgaccccttcagttaaagatatttaaggaaaaatttggggtggtgataatatggcttttcacagaaagggtcatgaagccctggcccaacaggactgtggtactaggggctgggatgtggggttaccacatggagagattttccattaagagagaaggacaaacatttctgagagtgtcagccattcttggtagacacctctccactcctcatcccacctctacccatctccatgccacaccttatccagttagacacatacataccaatcattagaagaacaagtttagaaggtgtggaacttgtgcctggctggctgggtagtcagctgagcctgttgctgagcccggtggtctggattggagtatggccagggcaggagtacacagaatagaatttagactgtcccttgagtagaatccactgattttctgtggctccagtgagaacaaggctttgaaactgaacaagataacttctagaaatgaactgtactaatccctttccccagattgtatcatgagtagaatcaggttcacgtggtgcttcaaagccctgagaagaatatttctttggaccccaggcactaggggccacctgcctgggagtctccctgcctcactcctctaggcaggggagtgatgcttcaggacgtgacaggctgttctaacatgtgtctacctgagggctagttgaaggatccaggagtattttcttcttgggtgggccctgaacaaagccaaaaattgtagaaaccagtctagaaaaagtcctgctcatctgtggccactgccttctagccgtcctccaccttgcagaaagaatctagcctttggtctctctctctctcatcggggtcatttgctattcccctctgatattcaaccctatagaaggagcctggactctgatccctctgtacaggctggatggaaggggccctccacacttcctgggaggtcagagacaaactgtttcagagagtcagatggacttcccaagacttgttgagagatgtgacatggttcttggatttcctctgtagcagcctcctggacttcctgaggactcgacattgtccacagatgtactggccattacatgaaacaagaaaccaagcatctttgctgttgttaattattatatgtgccattgttacaggagattataggctagtctgtaataaattatcttatagcaaaaaaaaaaaaaaaaaaaaaaaaaaaaa

SEQ ID NO: 811 - protein, 1591 aa, Homo sapiens
MSLLCVRVKRAKFQGSPDKFNTYVTLKVQNVKSTTVAVRGDQPSWEQDFMFEISRLDLGLSVEVWNKGLIWDTMVGTVWIALKTIRQSDEEGPGEWSTLEAETLMKDDEICGTRNPTPHKILLDTRFELPFDIPEEEARYWTYKWEQINALGADNEYSSQEESQRKPLPTAAAQCSFEDPDSAVDDRDSDYRSETSNSFPPPYHTASQPNASVHQFPVPVRSPQQLLLQGSSRDSCNDSMQSYDLDYPERRAISPTSSSRYGSSCNVSQGSSQLSELDQYHEQDDDHRETDSIHSCHSSHSLSRDGQAGFGEQEKPLEVTGQAEKEAACEPKEMKEDATTHPPPDLVLQKDHFLGPQESFPEENASSPFTQARAHWIRAVTKVRLQLQEIPDDGDPSLPQWLPEGPAGGLYGIDSMPDLRRKKPLPLVSDLSLVQSRKAGITSAMATRTSLKDEELKSHVYKKTLQALIYPISCTTPHNFEVWTATTPTYCYECEGLLWGIARQGMRCSECGVKCHEKCQDLLNADCLQRAAEKSCKHGAEDRTQNIIMAMKDRMKIRERNKPEIFEVIRDVFTVNKAAHVQQMKTVKQSVLDGTSKWSAKITITVVCAQGLQAKDKTGSSDPYVTVQVSKTKKRTKTIFGNLNPVWEEKFHFECHNSSDRIKVRVWDEDDDIKSRVKQRLKRESDDFLGQTIIEVRTLSGEMDVWYNLEKRTDKSAVSGAIRLQISVEIKGEEKVAPYHVQYTCLHENLFHYLTDIQGSGGVRIPEARGDDAWKVYFDETAQEIVDEFAMRYGIESIYQAMTHFACLSSKYMCPGVPAVMSTLLANINAYYAHTTASTNVSASDRFAASNFGKERFVKLLDQLHNSLRIDLSTYRNNFPAGSPERLQDLKSTVDLLTSITFFRMKVQELQSPPRASQVVKDCVKACLNSTYEYIFNNCHDLYSRQYQLKQELPPEEQGPSIRNLDFWPKLITLIVSIIEEDKNSYTPVLNQFPQELNVGKVSAEVMWHLFAQDMKYALEEHEKDHLCKSADYMNLHFKVKWLHNEYVRDLPVLQGQVPEYPAWFEQFVLQWLDENEDVSLEFLRGALERDKKDGFQQTSEHALFSCSVVDVFTQLNQSFEIIRKLECPDPSILAHYMRRFAKTIGKVLMQYADILSKDFPAYCTKEKLPCILMNNVQQLRVQLEKMFEAMGGKELDLEAADSLKELQVKLNTVLDELSMVFGNSFQVRIDECVRQMADILGQVRGTGNASPDARASAAQDADSVLRPLMDFLDGNLTLFATVCEKTVLKRVLKELWRVVMNTMERMIVLPPLTDQTGTQLIFTAAKELSHLSKLKDHMVREETRNLTPKQCAVLDLALDTIKQYFHAGGNGLKKTFLEKSPDLQSLRYALSLYTQTTDTLIKTFVRSQTTQGSGVDDPVGEVSIQVDLFTHPGTGEHKVTVKVVAANDLKWQTAGMFRPFVEVTMVGPHQSDKKRKFTTKSKSNNWAPKYNETFHFLLGNEEGPESYELQICVKDYCFAREDRVLGLAVMPLRDVTAKGSCACWCPLGRKIHMDETGLTILRILSQRSNDEVAREFVKLKSESRSTEEGS

SEQ ID NO: 812 - DNA, 1531 bp, Homo sapiens
agtcacagagggaacacagagcctagttgtaaacggacagagacgagaggggcaagggaggacagtggatgacagggaagacgagtgggggcagagctgctcaggaccatggctgaggccatcacctatgcagatctgaggtttgtgaaggctcccctgaagaagagcatctccagccggttaggacaggacccaggggctgatgatgatggggaaatcacctacgagaatgttcaagtgcccgcagtcctaggggtgccctcaagcttggcttcttctgtactaggggacaaagcagcggtcaagtcggagcagccaactgcgtcctggagagccgtgacgtcaccagctgtcgggcggattctcccctgccgcacaacctgcctgcgatacctcctgctcggcctgctcctcacctgcctgctgttaggagtgaccgccatctgcctgggagtgcgctatctgcaggtgtctcagcagctccagcagacgaacagggttctggaagtcactaacagcagcctgaggcagcagctccgcctcaagataacgcagctgggacagagtgcagaggatctgcaggggtccaggagagagctggcgcagagtcaggaagcactacaggtggaacagagggctcatcaggcggccgaagggcagctacaggcctgccaggcagacagacagaagacgaaggagaccttgcaaagtgaggagcaacagaggagggccttggagcagaagctgagcaacatggagaacagactgaagcccttcttcacatgcggctcagcagacacctgctgtccgtcgggatggataatgcatcagaaaagctgcttttacatctcacttacttcaaaaaattggcaggagagccaaaaacaatgtgaaactctgtcttccaagctggccacattcagtgaaatttatccacaatcacactcttactacttcttaaattcactgttgccaaatggtggttcagggaattcatattggactggcctcagctctaacaaggattggaagttgactgatgatacacaacgcactaggacttatgctcaaagctcaaaatgtaacaaggtacataaaacttggtcatggtggacactggagtcagagtcatgtagaagttctcttccctacatctgtgagatgacagctttcaggtttccagattaggacagtcctttgcactgagttgacactcatgccaacaagaacctgtgcccctccttcctaacctgaggcctggggttcctcagaccatctccttcattctgggcagtgccagccaccggctgacccacacctgacacttccagccagtctgctgcctgctccctcttcctgaaactggactgttcctgggaaaagggtgaagccacctctagaagggactttggcctccccccaagaacttcccatggtagaatggggtgggggaggagggcgcacgggctgagcggataggggcggcccggagccagccaggcagttttattgaaatctttttaaataattg

SEQ ID NO: 813 - protein, 359 aa, Homo sapiens
MAEAITYADLRFVKAPLKKSISSRLGQDPGADDDGEITYENVQVPAVLGVPSSLASSVLGDKAAVKSEQPTASWRAVTSPAVGRILPCRTTCLRYLLLGLLLTCLLLGVTAICLGVRYLQVSQQLQQTNRVLEVTNSSLRQQLRLKITQLGQSAEDLQGSRRELAQSQEALQVEQRAHQAAEGQLQACQADRQKTKETLQSEEQQRRALEQKLSNMENRLKPFFTCGSADTCCPSGWIMHQKSCFYISLTSKNWQESQKQCETLSSKLATFSEIYPQSHSYYFLNSLLPNGGSGNSYWTGLSSNKDWKLTDDTQRTRTYAQSSKCNKVHKTWSWWTLESESCRSSLPYICEMTAFRFPD

SEQ ID NO: 814 - DNA, 1238 bp, Homo sapiens
cagagactttgccaccaccagtattggggatgctgagctgcggggtacgggcctgaggagggatgggagtaagaagtgctgtggaaaccgtcaggccatgaaccaggctgaccctcggctcagagcagtgtgcttgtggactctcacatctgcagccatgagcagaggcgacaactgcacggatctactcgcactgggaatcccctccataacccaggcctggggactgtgggtcctcttaggggctgtgacgctgctatttctcatctcgctggctgcacacttgtcccagtggaccaggggccggagcaggagccatccggggcagggacgctctggagagtctgtggaagaggtcccgctgtatgggaacctgcattatctacagacaggacggctgtctcaagacccagagccagaccagcaggatccaactcttggaggccctgccagggctgcagaggaggtgatgtgctataccagcctgcagctgcggcctcctcagggtcggatccccggtcctggaacccccgtcaagtactcggaggtggtgctggactctgagccaaagtcccaggcctcgggccccgagccggagctctatgcctcagtatgtgcccagacccgcagggcccgggcctccttcccggatcaggcctatgccaacagccagcctgcagccagctgagatggagggcctggcacagcggggcgtgcactgccccagccccccgtagcaggggcatgactgtttcccaaccagcacccaaagacgggcgccattgccaagtcacaggatgtgatctaccccggacttcctatctgagcttcaagggagacatctcagggcaaagctttcgtgatggaggaggcaaagacagtagccccctccttatttcttttttctatctgttcctcttagcccccaaactcccaggttctcacttccttcttctggagtttaaccagatcctccccacccccgctccctcatagtctacccccacgcctcagtgtctcctcaggcacaggaagtgggcggtgggggaggggtaagggcctgacagtgggtgggtgggtatattcctcaggagtccacagactggagtggacctggaacttagagacgggagggacccgagcctggcttttgacctaagaaccctagcaggagaatacagtctccatcctgctgtctctgtcctgtccccaagttttcaaataaaactttccaaaaa

SEQ ID NO: 815 - protein, 196 aa, Homo sapiens
MNQADPRLRAVCLWTLTSAAMSRGDNCTDLLALGIPSITQAWGLWVLLGAVTLLFLISLAAHLSQWTRGRSRSHPGQGRSGESVEEVPLYGNLHYLQTGRLSQDPEPDQQDPTLGGPARAAEEVMCYTSLQLRPPQGRIPGPGTPVKYSEVVLDSEPKSQASGPEPELYASVCAQTRRARASFPDQAYANSQPAAS

SEQ ID NO: 816 - DNA, 936 bp, Homo sapiens
gggcggccggccaatgccggaccgcttcggcaccgcccgcccgatccctccacccgtgggccggcaatggcgggcgcagtttcgctcttgggtgtggtggggctgctgcttgtgtctgcgctgtccggggtcctaggagaccgcgccaatcccgacctccgggcacacccagggaacgcagcccaccccggctctggagccacggaaccccggcggcgaccaccgctcaaggatcaacgcgagcggacccgggccgggtcgctgcctctgggggcgctgtacaccgcggccgtcgcggcttttgtgctgtacaagtgtttgcaggggaaagatgaaactgcggttctccacgaggaggcaagcaagcagcagccactgcagtcagagcaacagctggcccagttgacacaacagctggcccagacagagcagcacctgaacaacctgatggcccagctggaccccctttttgagcgtgtgactactctggctggagcccagcaggagcttctgaacatgaagctatggaccatccacgagctgctgcaagatagcaagccggacaaggatatggaggcttcagaaccaggtgaaggctcgggaggcgagtctgctggaggtggagacaaagtctctgaaactggaacattcctgatctctccccacacagaggccagcagacctcttcctgaggacttctgtttaaaggaggacgaggaggaggttggtgacagtcaggcctgggaggagcccacaaactggagcacagagacatggaacctagctacttcctgggaggtggggcggggactacggagaaggtgcagccaggctgtggcaaagggccccagtcacagccttggctgggaaggagggacgacagctgaaggtcgactaaaacaaagtctgttttcatgaaaaaaaaaaaaaaaaaaa

SEQ ID NO: 817 - protein, 283 aa, Homo sapiens
MAGAVSLLGVVGLLLVSALSGVLGDRANPDLRAHPGNAAHPGSGATEPRRRPPLKDQRERTRAGSLPLGALYTAAVAAFVLYKCLQGKDETAVLHEEASKQQPLQSEQQLAQLTQQLAQTEQHLNNLMAQLDPLFERVTTLAGAQQELLNMKLWTIHELLQDSKPDKDMEASEPGEGSGGESAGGGDKVSETGTFLISPHTEASRPLPEDFCLKEDEEEVGDSQAWEEPTNWSTETWNLATSWEVGRGLRRRCSQAVAKGPSHSLGWEGGTTAEGRLKQSLFS

SEQ ID NO: 818 - DNA, 3763 bp, Homo sapiens
cttcctgcgcgctgccctccccggccccgcctccgcggctcccgcccgcgagcggttgggatttgaatctgccgcggactgcagccggaagtgtcgatccctcagccagggcatggagctctcctgccccggttcgcggtgcccggtgcaagagcagcgtgcccgctgggagcggaaacgcgcctgcaccgcccgggagctgctagagaccgagcggcgctaccaagaacagctggggctggtggccacgtactttttggggatcctgaaagccaaggggaccctgcgaccacctgagcgccaggccctgtttggctcctgggagctcatctacggcgccagccaggagctgcttccctacctggaaggaggatgctggggccaagggctggagggcttctgccgccacttggagctctataaccaatttgctgccaactcagagaggtcccagaccaccctgcaggagcagctaaagaaaaataaaggtttccggaggtttgtacggcttcaggaaggccgccctgagtttgggggccttcagctccaggacctgctccctctgcctctgcaacggctccagcagtatgagaatctcgtcgtagctttggctgaaaacacaggtcccaacagccctgaccatcaacagctcacacgggctgcccgactgataagtgagactgcccagagagtccatactattggtcagaaacagaagaatgaccagcaccttcggcgtgtccaggctctgctcagtggacgccaggcaaaggggctgacctcagggcgctggttcctacgccagggctggctgttagtggtgcctccccatggggagcctcggccccgcatgttcttcctcttcactgatgtgctcctcatggccaagcctcggcctccactgcacctgctgcggagtggcacctttgcctgcaaggccctctaccccatggcccagtgtcatctcagcagggtctttggccactcaggaggcccttgtggtgggttgctcagtctgtccttccctcatgagaagctactgcttatgtccacagaccaggaggagctgtcacgctggtaccacagtctgacttgggctatcagcagccagaaaaactagaggaatcttatagattccagaactcaggatacctcagggataggtcacagccaagagtacaaaggaatcttcagtactgaacaaaacagaacccttcatgatttgacaaaggtcactttctgtttgcctggaccaagctactccagatcatctgaccaactcttaaaaatcacggccaggcacagtggctcatgcctgtaatcccagcactttgggaagcagaggtggcaggatcattccagcccaggagttcaagaccagcctgggcaacacagtgagtgagaccctgtctctatttaagaaaaaataattaagaaattttattaaaaaagaagaatcaggaaaccaagtccaacccaactaaacctcaaatgaaccagcccctaacacagatgaggggatttgggactgataagctctgtgctgtgtccatggcccgtcatttatcaaggctgcagctttgtaaatgtggctatttttatgttgtgtatagtttctatcatttatttttccactggatttgagtaaagttttttttcttttttttgggaaagacccttctgtctcagttttgctatgagaaaagggatttttgggccctgaacgcgggcatgctggtggcctcaggaatacgaggaaaagagctggagctccctctatcttctctgctgtcacactggaaggcagcctctttttgtcctaataaggacagctcttcaagaaggcccagttgtccttaggcacctagtatgggtgtgtacaaccaactaggatcgaaaaaacacacaggagcactccatcatgaaaacagactttgttttagtcgaccttcagctgtcgtccctccttcccagccaaggctgtgactggggccctttgccacagcctggctgcaccttctccgtagtccccgccccacctcccaggaagtagctaggttccatgtctctgtgctccagtttgtgggctcctcccaggcctgactgtcaccaatctcctcctcgtcctcctttaaacagaagtcctcaggaagaggtctgctggcctctgtgtggggagagatcaggaatgttccagtttcagagactttgtctccacctccagcagactcgcctcccgagccttcacctggttctgaagcctccatatccttgtccggcttgctatcttgcagcagctcgtggatggtccatagcttcatgttcagaagctcctgctgggctccagccagagtagtcacactgaagaaatgtccactcagtggctcccaacctatgtccccattcctccctcctgccacaaattccccaaaaattcacagaatcattgctctcctcaccgctcaaaaagggggtccagctgggccatcaggttgttcaggtgctgctctgtctgggccagctgttgtgtcaactgggccagctgttgctctggggataagggaaaaaagggggcagaagtggttatgtatcttctgctgtcccctaaactcccccgacccagcacagacttctgctaaacccacctgactgcagtggctgctgcttgcttgcctcctcgtggagaaccgcagtttcatctttcccctgttgtggaagaaggaaagggcagtactgaagcaacaaggttctgctccatcacctcagtctccagagccagccaagagagagtgcaatttgagatggagacagtgattgggtttttacctcagagaatcacaatcctagtctatctagctcctcacccagcatatgaagcgacgtcctatgtcccacacatggtcagtttgctgaaacacctccaggaatgagcaactccctccggtttgaaaaaagctctggtggctgagtgctgtggctcacacctgtaatcccagcacttcgggaagccaaggtgggtggatcacctgaggtcaggagtttgagaccagcctggccaacacggtgaaaccctgtctctattaaaaatacaaaaattagccgggcgtggtggcaggtgcctgtaatcccagttacttgagaggctgaggcaggagaatcgcttgaacctgggagccagaggttgcagtgagccgagattgcgccgctgcactccagcctgggtgacagagcgagactccatctcgaaaaaaacaaaaactttggttgttagacagttcatgcacaaagccaaaatttgtcctttatgtatcttctttccatagtgcttactggagccttccaaaataatgtctcctcaaggtgacagcccctcaggaatttgaaggcaatggtcacaccctcacccactttcctgagttttttctggtttattaacgtcagtctttacagtcagtgctcattgacggtggttttctctggttgtttcctgaacacgtagtgctcttaaagcaatgccctgaggagaatacaattctccaggggcattctgattggcaggtgaagcacagtgccatgttcccagcactgatttgggaagtggcttgtcacatcccacagtgaactcagtcaactggaatgcctaactctctttcataagacctcctgctacattatgtttctcccagactgtactcaggtccaagaacagaatttactagtctatccttctcaaagttcatcattaaattcagtcattcatcct

SEQ ID NO: 819 - protein, 335 aa, Homo sapiens
MELSCPGSRCPVQEQRARWERKRACTARELLETERRYQEQLGLVATYFLGILKAKGTLRPPERQALFGSWELIYGASQELLPYLEGGCWGQGLEGFCRHLELYNQFAANSERSQTTLQEQLKKNKGFRRFVRLQEGRPEFGGLQLQDLLPLPLQRLQQYENLVVALAENTGPNSPDHQQLTRAARLISETAQRVHTIGQKQKNDQHLRRVQALLSGRQAKGLTSGRWFLRQGWLLVVPPHGEPRPRMFFLFTDVLLMAKPRPPLHLLRSGTFACKALYPMAQCHLSRVFGHSGGPCGGLLSLSFPHEKLLLMSTDQEELSRWYHSLTWAISSQKN

SEQ ID NO: 820 - DNA, 1378 bp, Homo sapiens
agctgcagcaaaatgaaagcaacaggagctgctccggggactgcttttgccagtacccagaatcagtgctcaggctcagaaatcctggatagaaagagcattttataaaagagaatgtgtccacatcatacccagcaccaaagacccccataggtgttgctgtgggcgtctgataggccagcatgttggcctcacccccagtatctccgtgcttcagaatgagaaaaatgaaagtcgcctctcccgaaatgacatccagtctgaaaagtggtccatcagcaaacacactcaactcagccctacggatgcttttgggaccattgagttccaaggaggtggccattccaacaaagccatgtatgtgcgagtatcttttgatacaaaacctgatctcctcttacacctgatgaccaaggaatggcagttggagcttcccaagcttctcatctctgtccatgggggcctgcagaactttgaactccagccaaaactcaagcaagtctttgggaaagggctcatcaaagcagcaatgacaactggagcgtggatattcactggaggggttaacacaggtgttattcgtcatgttggcgatgccttgaaggatcatgcctctaagtctcgaggaaagatatgcaccataggtattgccccctggggaattgtggaaaaccaggaggacctcattggaagagatgttgtccggccataccagaccatgtccaatcccatgagcaagctcactgttctcaacagcatgcattcccacttcattctggctgacaacgggaccactggaaaatatggagcagaggtgaaacttcgaagacaactggaaaagcatatttcactccagaagataaacacaagatgcctgccgtttttctctcttgactcccgcttgttttattcattttggggtagttgccagttagactcagttggaatcggtcaaggtgttcctgtggtggcactcatagtggaaggaggacccaatgtgatctcgattgttttggagtaccttcgagacacccctcccgtgccagtggttgtctgtgatgggagtggacgggcatcggacatcctggcctttgggcataaatactcagaagaaggcgggtaggtaactttccaggccccatggaagaaccctaaagcctgtttggaaacgagggtatgagtggattatgttttcagtagctcaaccaagacctcaaatcaaaacaagctatgaacaaattgtctaaaaaatgtctgtcatgggagggctgtggtgaagaacagagaaacatattctaaatgtcctgtgaagtgggaaattctatgaaagctacacggataataaaaagggtgaggaaaagaaaaaaaaaaaaaaaaa

SEQ ID NO: 821 - protein, 255 aa, Homo sapiens
MYVRVSFDTKPDLLLHLMTKEWQLELPKLLISVHGGLQNFELQPKLKQVFGKGLIKAAMTTGAWIFTGGVNTGVIRHVGDALKDHASKSRGKICTIGIAPWGIVENQEDLIGRDVVRPYQTMSNPMSKLTVLNSMHSHFILADNGTTGKYGAEVKLRRQLEKHISLQKINTRCLPFFSLDSRLFYSFWGSCQLDSVGIGQGVPVVALIVEGGPNVISIVLEYLRDTPPVPVVVCDGSGRASDILAFGHKYSEEGG

SEQ ID NO: 822 - DNA, 6288 bp, Homo sapiens
tccgaccacaggctgttttgtgcaggctgtccctcttcttcaaaatcgtgcatcccctccccgaagcagcaggcagtgtgcctccattcagccacatttggtatgcatgagcacggctgcagagagaggggaggtggctgttttaagaaggttcaggggctcaggcaaggctacttgactagtcttccaagttccaggaagcctctgccctaatggaatttgcaggtgtggagatgaccatgggatgccagagccgtgggggaccgtttattttctaggcattgctcaggttttcagtttcttgttttcctggtggaatttggaaggggtcatgaatcaggctgatgctcctcgacccctaaactggaccatccggaagctgtgccacgcagcctttcttccatctgtcagacttctgaaggctcagaaatcctggatagaaagagcattttataaaagagaatgtgtccacatcatacccagcaccaaagacccccataggtgttgctgtgggcgtctgataggccagcatgttggcctcacccccagtatctccgtgcttcagaatgagaaaaatgaaagtcgcctctcccgaaatgacatccagtctgaaaagtggtccatcagcaaacacactcaactcagccctacggatgcttttgggaccattgagttccaaggaggtggccattccaacaaagccatgtatgtgcgagtatcttttgatacaaaacctgatctcctcttacacctgatgaccaaggaatggcagttggagcttcccaagcttctcatctctgtccatgggggcctgcagaactttgaactccagccaaaactcaagcaagtctttgggaaagggctcatcaaagcagcaatgacaactggagcgtggatattcactggaggggttaacacaggtgttattcgtcatgttggcgatgccttgaaggatcatgcctctaagtctcgaggaaagatatgcaccataggtattgccccctggggaattgtggaaaaccaggaggacctcattggaagagatgttgtccggccataccagaccatgtccaatcccatgagcaagctcactgttctcaacagcatgcattcccacttcattctggctgacaacgggaccactggaaaatatggagcagaggtgaaacttcgaagacaactggaaaagcatatttcactccagaagataaacacaagaatcggtcaaggtgttcctgtggtggcactcatagtggaaggaggacccaatgtgatctcgattgttttggagtaccttcgagacacccctcccgtgccagtggttgtctgtgatgggagtggacgggcatcggacatcctggcctttgggcataaatactcagaagaaggcggactgataaatgaatctttgagggaccagctgttggtgactatacagaagactttcacatacactcgaacccaagctcagcatctgttcatcatcctcatggagtgcatgaagaagaaggaattgattacggtatttcggatgggatcagaaggacaccaggacattgatttggctatcctgacagctttactcaaaggagccaatgcctcggccccagaccaactgagcttagctttagcctggaacagagtcgacatcgctcgcagccagatctttatttacgggcaacagtggccggtgggatctctggagcaagccatgttggatgccttagttctggacagagtggattttgtgaaattactcatagagaatggagtaagcatgcaccgttttctcaccatctccagactagaggaattgtacaatacgagacatgggccctcaaatacattgtaccacttggtcagggatgtcaaaaaggggaacctgcccccagactacagaatcagcctgattgacatcggcctggtgatcgagtacctgatgggcggggcttatcgctgcaactacacgcgcaagcgcttccggaccctctaccacaacctcttcggccccaagaggcccaaagccttgaaactgctgggaatggaggatgatattcccttgaggcgaggaagaaagacaaccaagaaacgtgaagaagaggtggacattgacttggatgatcctgagatcaaccacttccccttccctttccatgagctcatggtgtgggctgttctcatgaagcggcagaagatggccctgttcttctggcagcacggtgaggaggccatggccaaggccctggtggcctgcaagctctgcaaagccatggctcatgaggcctctgagaacgacatggttgacgacatttcccaggagctgaatcacaattccagagactttggccagctggctgtggagctcctggaccagtcctacaagcaggacgaacagctggccatgaaactgctgacgtatgagctgaagaactggagcaacgccacgtgcctgcagcttgccgtggctgccaaacaccgcgacttcatcgcgcacacgtgcagccagatgctgctcaccgacatgtggatgggccggctccgcatgcgcaagaactcaggcctcaaggtaattctgggaattctacttcctccttcaattctcagcttggagttcaagaacaaagacgacatgccctatatgtctcaggcccaggaaatccacctccaagagaaggaggcagaagaaccagagaagcccacaaaggaaaaagaggaagaggacatggagctcacagcaatgttgggacgaaacaacggggagtcctccaggaagaaggatgaagaggaagttcagagcaagcaccggttaatccccctcggcagaaaaatctatgaattctacaatgcacccatcgtgaagttctggttctacacactggcgtatatcggatacctgatgctcttcaactatatcgtgttagtgaagatggaacgctggccgtccacccaggaatggatcgtaatctcctatattttcaccctgggaatagaaaagatgagagagattctgatgtcagagccagggaagttgctacagaaagtgaaggtatggctgcaggagtactggaatgtcacggacctcatcgccatccttctgttttctgtcggaatgatccttcgtctccaagaccagcccttcaggagtgacgggagggtcatctactgcgtgaacatcatttactggtatatccgtctcctagacatcttcggcgtgaacaagtatttgggcccgtatgtaatgatgattggaaaaatgatgatagacatgatgtactttgtcatcattatgctggtggttctgatgagctttggggtcgccaggcaagccatcctttttcccaatgaggagccatcatggaaactggccaagaacatcttctacatgccctattggatgatttatggggaagtgtttgcggaccagatagaccctccctgtggacagaatgagacccgagaggatggtaaaataatccagctgcctccctgcaagacaggagcttggatcgtgccggccatcatggcctgctacctcttagtggcaaacatcttgctggtcaacctcctcattgctgtctttaacaatacattttttgaagtaaaatcgatatccaaccaagtctggaagtttcagaggtatcagctcatcatgactttccatgaaaggccagttctgcccccaccactgatcatcttcagccacatgaccatgatattccagcacctgtgctgccgatggaggaaacacgagagcgacccggatgaaagggactacggcctgaaactcttcataaccgatgatgagctcaagaaagtacatgactttgaagagcaatgcatagaagaatacttcagagaaaaggatgatcggttcaactcatctaatgatgagaggatacgggtgacttcagaaagggtggagaacatgtctatgcggctggaggaagtcaacgagagagagcactccatgaaggcttcactccagaccgtggacatccggctggcgcagctggaagaccttatcgggcgcatggccacggccctggagcgcctgacaggtctggagcgggccgagtccaacaaaatccgctcgaggacctcgtcagactgcacggacgccgcctacattgtccgtcagagcagcttcaacagccaggaagggaacaccttcaagctccaagagagtatagaccctgcaggtgaggagaccatgtccccaacttctccaaccttaatgccccgtatgcgaagccattctttctattcggtcaatatgaaagacaaaggtggtatagaaaagttggaaagtatttttaaagaaaggtccctgagcctacaccgggctactagttcccactctgtagcaaaagaacccaaagctcctgcagcccctgccaacaccttggccattgttcctgattccagaagaccatcatcgtgtatagacatctatgtctctgctatggatgagctccactgtgatatagaccctctggacaattccgtgaacatccttgggctgggcgagccaagcttttcaactccagtaccttccacagccccttcaagtagtgcctatgcaacacttgcacccacagacagacctccaagccggagcattgattttgaggacatcacctccatggacactagatctttttcttcagactacacccacctcccagaatgccaaaacccctgggactcagagcctccgatgtaccacaccattgagcgttccaaaagtagccgctacctagccaccacaccctttcttctagaagaggctcccattgtgaaatctcatagctttatgttttccccctcaaggagctattatgccaactttggggtgcctgtaaaaacagcagaatacacaagtattacagactgtattgacacaaggtgtgtcaatgcccctcaagcaattgcggacagagctgccttccctggaggtcttggagacaaagtggaggacttaacttgctgccatccagagcgagaagcagaactgagtcaccccagctctgacagtgaggagaatgaggccaaaggccgcagagccaccattgcaatatcctcccaggagggtgataactcagagagaaccctgtccaacaacatcactgttcccaagatagagcgcgccaacagctactcggcagaggagccaagtgcgccatatgcacacaccaggaagagcttctccatcagtgacaaactcgacaggcagcggaacacagcaagcctgcgaaatcccttccagagaagcaagtcctccaagccggagggccgaggggacagcctgtccatgaggagactgtccagaacatcggctttccaaagctttgaaagcaagcacaactaaaccttcttaatatccgccacagaaggctcaagaatccagccctaaaattctctccaactccagtttttcccctttccttgaatcatacctgctttattcttagctgagcaaaacaagcaatgctttgggaggtgttaactcaaaggtgacttctgggccacagatcaagaaagcatttgatctgacccagtgccagacacaggggatttaaggcatgttcacacttgctgggcagggagggggaagagagggagaaggaagggttagagatgaatgtgtatccgcagtcacagcagaaagccatgagagcaggggaaacaaggggcttcgagcacgctccatgccaggaggcatctgttgatttctgaccattatcaagagttgtaggatgcagggctaaattgcaaaataaaataaaatagccagcgtacacaatgagatattctaaacttccattctgttttcttttcacattggctccatcactggtgactgatgaagagcatcctctttattcagtataagccggcagcaagcagttctacctaacgtcccacatccttctcatgccaacacttctgtaattgatcattataaagaaaaaacaaggtaacagtcatagttcacctgtctcttatctattcacttctggtgccacaactgtttatccttttttgaagaaaataagggaacagaaatgcctttttgtattgcaatcgaaatgaaagaagagttgatgttaaaaaaacaaaagtcaagtgatttattatatacagtgggcgttcaagtctagtcgagcaagctcaggagaatgtaattaaataattttatattttttaatttattttgtatctcacctgtcatggatgaattcattcactgaatatgtaatattgaacttaaaaaaaaaaaaaaaaaaa

SEQ ID NO: 823 - protein, 1707 aa, Homo sapiens
MPEPWGTVYFLGIAQVFSFLFSWWNLEGVMNQADAPRPLNWTIRKLCHAAFLPSVRLLKAQKSWIERAFYKRECVHIIPSTKDPHRCCCGRLIGQHVGLTPSISVLQNEKNESRLSRNDIQSEKWSISKHTQLSPTDAFGTIEFQGGGHSNKAMYVRVSFDTKPDLLLHLMTKEWQLELPKLLISVHGGLQNFELQPKLKQVFGKGLIKAAMTTGAWIFTGGVNTGVIRHVGDALKDHASKSRGKICTIGIAPWGIVENQEDLIGRDVVRPYQTMSNPMSKLTVLNSMHSHFILADNGTTGKYGAEVKLRRQLEKHISLQKINTRIGQGVPVVALIVEGGPNVISIVLEYLRDTPPVPVVVCDGSGRASDILAFGHKYSEEGGLINESLRDQLLVTIQKTFTYTRTQAQHLFIILMECMKKKELITVFRMGSEGHQDIDLAILTALLKGANASAPDQLSLALAWNRVDIARSQIFIYGQQWPVGSLEQAMLDALVLDRVDFVKLLIENGVSMHRFLTISRLEELYNTRHGPSNTLYHLVRDVKKGNLPPDYRISLIDIGLVIEYLMGGAYRCNYTRKRFRTLYHNLFGPKRPKALKLLGMEDDIPLRRGRKTTKKREEEVDIDLDDPEINHFPFPFHELMVWAVLMKRQKMALFFWQHGEEAMAKALVACKLCKAMAHEASENDMVDDISQELNHNSRDFGQLAVELLDQSYKQDEQLAMKLLTYELKNWSNATCLQLAVAAKHRDFIAHTCSQMLLTDMWMGRLRMRKNSGLKVILGILLPPSILSLEFKNKDDMPYMSQAQEIHLQEKEAEEPEKPTKEKEEEDMELTAMLGRNNGESSRKKDEEEVQSKHRLIPLGRKIYEFYNAPIVKFWFYTLAYIGYLMLFNYIVLVKMERWPSTQEWIVISYIFTLGIEKMREILMSEPGKLLQKVKVWLQEYWNVTDLIAILLFSVGMILRLQDQPFRSDGRVIYCVNIIYWYIRLLDIFGVNKYLGPYVMMIGKMMIDMMYFVIIMLVVLMSFGVARQAILFPNEEPSWKLAKNIFYMPYWMIYGEVFADQIDPPCGQNETREDGKIIQLPPCKTGAWIVPAIMACYLLVANILLVNLLIAVFNNTFFEVKSISNQVWKFQRYQLIMTFHERPVLPPPLIIFSHMTMIFQHLCCRWRKHESDPDERDYGLKLFITDDELKKVHDFEEQCIEEYFREKDDRFNSSNDERIRVTSERVENMSMRLEEVNEREHSMKASLQTVDIRLAQLEDLIGRMATALERLTGLERAESNKIRSRTSSDCTDAAYIVRQSSFNSQEGNTFKLQESIDPAGEETMSPTSPTLMPRMRSHSFYSVNMKDKGGIEKLESIFKERSLSLHRATSSHSVAKEPKAPAAPANTLAIVPDSRRPSSCIDIYVSAMDELHCDIDPLDNSVNILGLGEPSFSTPVPSTAPSSSAYATLAPTDRPPSRSIDFEDITSMDTRSFSSDYTHLPECQNPWDSEPPMYHTIERSKSSRYLATTPFLLEEAPIVKSHSFMFSPSRSYYANFGVPVKTAEYTSITDCIDTRCVNAPQAIADRAAFPGGLGDKVEDLTCCHPEREAELSHPSSDSEENEAKGRRATIAISSQEGDNSERTLSNNITVPKIERANSYSAEEPSAPYAHTRKSFSISDKLDRQRNTASLRNPFQRSKSSKPEGRGDSLSMRRLSRTSAFQSFESKHN

SEQ ID NO: 824 - DNA, 5940 bp, Homo sapiens
agctgcagcaaaatgaaagcaacaggagctgctccggggactgcttttgccagtacccagaatcagtgctcaggctcagaaatcctggatagaaagagcattttataaaagagaatgtgtccacatcatacccagcaccaaagacccccataggtgttgctgtgggcgtctgataggccagcatgttggcctcacccccagtatctccgtgcttcagaatgagaaaaatgaaagtcgcctctcccgaaatgacatccagtctgaaaagtggtccatcagcaaacacactcaactcagccctacggatgcttttgggaccattgagttccaaggaggtggccattccaacaaagccatgtatgtgcgagtatcttttgatacaaaacctgatctcctcttacacctgatgaccaaggaatggcagttggagcttcccaagcttctcatctctgtccatgggggcctgcagaactttgaactccagccaaaactcaagcaagtctttgggaaagggctcatcaaagcagcaatgacaactggagcgtggatattcactggaggggttaacacaggtgttattcgtcatgttggcgatgccttgaaggatcatgcctctaagtctcgaggaaagatatgcaccataggtattgccccctggggaattgtggaaaaccaggaggacctcattggaagagatgttgtccggccataccagaccatgtccaatcccatgagcaagctcactgttctcaacagcatgcattcccacttcattctggctgacaacgggaccactggaaaatatggagcagaggtgaaacttcgaagacaactggaaaagcatatttcactccagaagataaacacaagaatcggtcaaggtgttcctgtggtggcactcatagtggaaggaggacccaatgtgatctcgattgttttggagtaccttcgagacacccctcccgtgccagtggttgtctgtgatgggagtggacgggcatcggacatcctggcctttgggcataaatactcagaagaaggcggactgataaatgaatctttgagggaccagctgttggtgactatacagaagactttcacatacactcgaacccaagctcagcatctgttcatcatcctcatggagtgcatgaagaagaaggaattgattacggtatttcggatgggatcagaaggacaccaggacattgatttggctatcctgacagctttactcaaaggagccaatgcctcggccccagaccaactgagcttagctttagcctggaacagagtcgacatcgctcgcagccagatctttatttacgggcaacagtggccggtgggatctctggagcaagccatgttggatgccttagttctggacagagtggattttgtgaaattactcatagagaatggagtaagcatgcaccgttttctcaccatctccagactagaggaattgtacaatacgagacatgggccctcaaatacattgtaccacttggtcagggatgtcaaaaaggggaacctgcccccagactacagaatcagcctgattgacatcggcctggtgatcgagtacctgatgggcggggcttatcgctgcaactacacgcgcaagcgcttccggaccctctaccacaacctcttcggccccaagaggcccaaagccttgaaactgctgggaatggaggatgatattcccttgaggcgaggaagaaagacaaccaagaaacgtgaagaagaggtggacattgacttggatgatcctgagatcaaccacttccccttccctttccatgagctcatggtgtgggctgttctcatgaagcggcagaagatggccctgttcttctggcagcacggtgaggaggccatggccaaggccctggtggcctgcaagctctgcaaagccatggctcatgaggcctctgagaacgacatggttgacgacatttcccaggagctgaatcacaattccagagactttggccagctggctgtggagctcctggaccagtcctacaagcaggacgaacagctggccatgaaactgctgacgtatgagctgaagaactggagcaacgccacgtgcctgcagcttgccgtggctgccaaacaccgcgacttcatcgcgcacacgtgcagccagatgctgctcaccgacatgtggatgggccggctccgcatgcgcaagaactcaggcctcaaggtaattctgggaattctacttcctccttcaattctcagcttggagttcaagaacaaagacgacatgccctatatgtctcaggcccaggaaatccacctccaagagaaggaggcagaagaaccagagaagcccacaaaggaaaaagaggaagaggacatggagctcacagcaatgttgggacgaaacaacggggagtcctccaggaagaaggatgaagaggaagttcagagcaagcaccggttaatccccctcggcagaaaaatctatgaattctacaatgcacccatcgtgaagttctggttctacacactggcgtatatcggatacctgatgctcttcaactatatcgtgttagtgaagatggaacgctggccgtccacccaggaatggatcgtaatctcctatattttcaccctgggaatagaaaagatgagagagattctgatgtcagagccagggaagttgctacagaaagtgaaggtatggctgcaggagtactggaatgtcacggacctcatcgccatccttctgttttctgtcggaatgatccttcgtctccaagaccagcccttcaggagtgacgggagggtcatctactgcgtgaacatcatttactggtatatccgtctcctagacatcttcggcgtgaacaagtatttgggcccgtatgtaatgatgattggaaaaatgatgatagacatgatgtactttgtcatcattatgctggtggttctgatgagctttggggtcgccaggcaagccatcctttttcccaatgaggagccatcatggaaactggccaagaacatcttctacatgccctattggatgatttatggggaagtgtttgcggaccagatagaccctccctgtggacagaatgagacccgagaggatggtaaaataatccagctgcctccctgcaagacaggagcttggatcgtgccggccatcatggcctgctacctcttagtggcaaacatcttgctggtcaacctcctcattgctgtctttaacaatacattttttgaagtaaaatcgatatccaaccaagtctggaagtttcagaggtatcagctcatcatgactttccatgaaaggccagttctgcccccaccactgatcatcttcagccacatgaccatgatattccagcacctgtgctgccgatggaggaaacacgagagcgacccggatgaaagggactacggcctgaaactcttcataaccgatgatgagctcaagaaagtacatgactttgaagagcaatgcatagaagaatacttcagagaaaaggatgatcggttcaactcatctaatgatgagaggatacgggtgacttcagaaagggtggagaacatgtctatgcggctggaggaagtcaacgagagagagcactccatgaaggcttcactccagaccgtggacatccggctggcgcagctggaagaccttatcgggcgcatggccacggccctggagcgcctgacaggtctggagcgggccgagtccaacaaaatccgctcgaggacctcgtcagactgcacggacgccgcctacattgtccgtcagagcagcttcaacagccaggaagggaacaccttcaagctccaagagagtatagaccctgcaggtgaggagaccatgtccccaacttctccaaccttaatgccccgtatgcgaagccattctttctattcggtcaatatgaaagacaaaggtggtatagaaaagttggaaagtatttttaaagaaaggtccctgagcctacaccgggctactagttcccactctgtagcaaaagaacccaaagctcctgcagcccctgccaacaccttggccattgttcctgattccagaagaccatcatcgtgtatagacatctatgtctctgctatggatgagctccactgtgatatagaccctctggacaattccgtgaacatccttgggctgggcgagccaagcttttcaactccagtaccttccacagccccttcaagtagtgcctatgcaacacttgcacccacagacagacctccaagccggagcattgattttgaggacatcacctccatggacactagatctttttcttcagactacacccacctcccagaatgccaaaacccctgggactcagagcctccgatgtaccacaccattgagcgttccaaaagtagccgctacctagccaccacaccctttcttctagaagaggctcccattgtgaaatctcatagctttatgttttccccctcaaggagctattatgccaactttggggtgcctgtaaaaacagcagaatacacaagtattacagactgtattgacacaaggtgtgtcaatgcccctcaagcaattgcggacagagctgccttccctggaggtcttggagacaaagtggaggacttaacttgctgccatccagagcgagaagcagaactgagtcaccccagctctgacagtgaggagaatgaggccaaaggccgcagagccaccattgcaatatcctcccaggagggtgataactcagagagaaccctgtccaacaacatcactgttcccaagatagagcgcgccaacagctactcggcagaggagccaagtgcgccatatgcacacaccaggaagagcttctccatcagtgacaaactcgacaggcagcggaacacagcaagcctgcgaaatcccttccagagaagcaagtcctccaagccggagggccgaggggacagcctgtccatgaggagactgtccagaacatcggctttccaaagctttgaaagcaagcacaactaaaccttcttaatatccgccacagaaggctcaagaatccagccctaaaattctctccaactccagtttttcccctttccttgaatcatacctgctttattcttagctgagcaaaacaagcaatgctttgggaggtgttaactcaaaggtgacttctgggccacagatcaagaaagcatttgatctgacccagtgccagacacaggggatttaaggcatgttcacacttgctgggcagggagggggaagagagggagaaggaagggttagagatgaatgtgtatccgcagtcacagcagaaagccatgagagcaggggaaacaaggggcttcgagcacgctccatgccaggaggcatctgttgatttctgaccattatcaagagttgtaggatgcagggctaaattgcaaaataaaataaaatagccagcgtacacaatgagatattctaaacttccattctgttttcttttcacattggctccatcactggtgactgatgaagagcatcctctttattcagtataagccggcagcaagcagttctacctaacgtcccacatccttctcatgccaacacttctgtaattgatcattataaagaaaaaacaaggtaacagtcatagttcacctgtctcttatctattcacttctggtgccacaactgtttatccttttttgaagaaaataagggaacagaaatgcctttttgtattgcaatcgaaatgaaagaagagttgatgttaaaaaaacaaaagtcaagtgatttattatatacagtgggcgttcaagtctagtcgagcaagctcaggagaatgtaattaaataattttatattttttaatttattttgtatctcacctgtcatggatgaattcattcactgaatatgtaatattgaacttaaaaaaaaaaaaaaaaaaa

SEQ ID NO: 825 - protein, 1554 aa, Homo sapiens
MYVRVSFDTKPDLLLHLMTKEWQLELPKLLISVHGGLQNFELQPKLKQVFGKGLIKAAMTTGAWIFTGGVNTGVIRHVGDALKDHASKSRGKICTIGIAPWGIVENQEDLIGRDVVRPYQTMSNPMSKLTVLNSMHSHFILADNGTTGKYGAEVKLRRQLEKHISLQKINTRIGQGVPVVALIVEGGPNVISIVLEYLRDTPPVPVVVCDGSGRASDILAFGHKYSEEGGLINESLRDQLLVTIQKTFTYTRTQAQHLFIILMECMKKKELITVFRMGSEGHQDIDLAILTALLKGANASAPDQLSLALAWNRVDIARSQIFIYGQQWPVGSLEQAMLDALVLDRVDFVKLLIENGVSMHRFLTISRLEELYNTRHGPSNTLYHLVRDVKKGNLPPDYRISLIDIGLVIEYLMGGAYRCNYTRKRFRTLYHNLFGPKRPKALKLLGMEDDIPLRRGRKTTKKREEEVDIDLDDPEINHFPFPFHELMVWAVLMKRQKMALFFWQHGEEAMAKALVACKLCKAMAHEASENDMVDDISQELNHNSRDFGQLAVELLDQSYKQDEQLAMKLLTYELKNWSNATCLQLAVAAKHRDFIAHTCSQMLLTDMWMGRLRMRKNSGLKVILGILLPPSILSLEFKNKDDMPYMSQAQEIHLQEKEAEEPEKPTKEKEEEDMELTAMLGRNNGESSRKKDEEEVQSKHRLIPLGRKIYEFYNAPIVKFWFYTLAYIGYLMLFNYIVLVKMERWPSTQEWIVISYIFTLGIEKMREILMSEPGKLLQKVKVWLQEYWNVTDLIAILLFSVGMILRLQDQPFRSDGRVIYCVNIIYWYIRLLDIFGVNKYLGPYVMMIGKMMIDMMYFVIIMLVVLMSFGVARQAILFPNEEPSWKLAKNIFYMPYWMIYGEVFADQIDPPCGQNETREDGKIIQLPPCKTGAWIVPAIMACYLLVANILLVNLLIAVFNNTFFEVKSISNQVWKFQRYQLIMTFHERPVLPPPLIIFSHMTMIFQHLCCRWRKHESDPDERDYGLKLFITDDELKKVHDFEEQCIEEYFREKDDRFNSSNDERIRVTSERVENMSMRLEEVNEREHSMKASLQTVDIRLAQLEDLIGRMATALERLTGLERAESNKIRSRTSSDCTDAAYIVRQSSFNSQEGNTFKLQESIDPAGEETMSPTSPTLMPRMRSHSFYSVNMKDKGGIEKLESIFKERSLSLHRATSSHSVAKEPKAPAAPANTLAIVPDSRRPSSCIDIYVSAMDELHCDIDPLDNSVNILGLGEPSFSTPVPSTAPSSSAYATLAPTDRPPSRSIDFEDITSMDTRSFSSDYTHLPECQNPWDSEPPMYHTIERSKSSRYLATTPFLLEEAPIVKSHSFMFSPSRSYYANFGVPVKTAEYTSITDCIDTRCVNAPQAIADRAAFPGGLGDKVEDLTCCHPEREAELSHPSSDSEENEAKGRRATIAISSQEGDNSERTLSNNITVPKIERANSYSAEEPSAPYAHTRKSFSISDKLDRQRNTASLRNPFQRSKSSKPEGRGDSLSMRRLSRTSAFQSFESKHN

SEQ ID NO: 826 - DNA, 5976 bp, Homo sapiens
agctgcagcaaaatgaaagcaacaggagctgctccggggactgcttttgccagtacccagaatcagtgctcaggctcagaaatcctggatagaaagagcattttataaaagagaatgtgtccacatcatacccagcaccaaagacccccataggtgttgctgtgggcgtctgataggccagcatgttggcctcacccccagtatctccgtgcttcagaatgagaaaaatgaaagtcgcctctcccgaaatgacatccagtctgaaaagtggtccatcagcaaacacactcaactcagccctacggatgcttttgggaccattgagttccaaggaggtggccattccaacaaagccatgtatgtgcgagtatcttttgatacaaaacctgatctcctcttacacctgatgaccaaggaatggcagttggagcttcccaagcttctcatctctgtccatgggggcctgcagaactttgaactccagccaaaactcaagcaagtctttgggaaagggctcatcaaagcagcaatgacaactggagcgtggatattcactggaggggttaacacaggtgttattcgtcatgttggcgatgccttgaaggatcatgcctctaagtctcgaggaaagatatgcaccataggtattgccccctggggaattgtggaaaaccaggaggacctcattggaagagatgttgtccggccataccagaccatgtccaatcccatgagcaagctcactgttctcaacagcatgcattcccacttcattctggctgacaacgggaccactggaaaatatggagcagaggtgaaacttcgaagacaactggaaaagcatatttcactccagaagataaacacaagaatcggtcaaggtgttcctgtggtggcactcatagtggaaggaggacccaatgtgatctcgattgttttggagtaccttcgagacacccctcccgtgccagtggttgtctgtgatgggagtggacgggcatcggacatcctggcctttgggcataaatactcagaagaaggcggactgataaatgaatctttgagggaccagctgttggtgactatacagaagactttcacatacactcgaacccaagctcagcatctgttcatcatcctcatggagtgcatgaagaagaaggaattgattacggtatttcggatgggatcagaaggacaccaggacattgatttggctatcctgacagctttactcaaaggagccaatgcctcggccccagaccaactgagcttagctttagcctggaacagagtcgacatcgctcgcagccagatctttatttacgggcaacagtggccggtgggatctctggagcaagccatgttggatgccttagttctggacagagtggattttgtgaaattactcatagagaatggagtaagcatgcaccgttttctcaccatctccagactagaggaattgtacaatacgagacatgggccctcaaatacattgtaccacttggtcagggatgtcaaaaagcgagagtatccaggtttcggttggatctattttaaggggaacctgcccccagactacagaatcagcctgattgacatcggcctggtgatcgagtacctgatgggcggggcttatcgctgcaactacacgcgcaagcgcttccggaccctctaccacaacctcttcggccccaagaggcccaaagccttgaaactgctgggaatggaggatgatattcccttgaggcgaggaagaaagacaaccaagaaacgtgaagaagaggtggacattgacttggatgatcctgagatcaaccacttccccttccctttccatgagctcatggtgtgggctgttctcatgaagcggcagaagatggccctgttcttctggcagcacggtgaggaggccatggccaaggccctggtggcctgcaagctctgcaaagccatggctcatgaggcctctgagaacgacatggttgacgacatttcccaggagctgaatcacaattccagagactttggccagctggctgtggagctcctggaccagtcctacaagcaggacgaacagctggccatgaaactgctgacgtatgagctgaagaactggagcaacgccacgtgcctgcagcttgccgtggctgccaaacaccgcgacttcatcgcgcacacgtgcagccagatgctgctcaccgacatgtggatgggccggctccgcatgcgcaagaactcaggcctcaaggtaattctgggaattctacttcctccttcaattctcagcttggagttcaagaacaaagacgacatgccctatatgtctcaggcccaggaaatccacctccaagagaaggaggcagaagaaccagagaagcccacaaaggaaaaagaggaagaggacatggagctcacagcaatgttgggacgaaacaacggggagtcctccaggaagaaggatgaagaggaagttcagagcaagcaccggttaatccccctcggcagaaaaatctatgaattctacaatgcacccatcgtgaagttctggttctacacactggcgtatatcggatacctgatgctcttcaactatatcgtgttagtgaagatggaacgctggccgtccacccaggaatggatcgtaatctcctatattttcaccctgggaatagaaaagatgagagagattctgatgtcagagccagggaagttgctacagaaagtgaaggtatggctgcaggagtactggaatgtcacggacctcatcgccatccttctgttttctgtcggaatgatccttcgtctccaagaccagcccttcaggagtgacgggagggtcatctactgcgtgaacatcatttactggtatatccgtctcctagacatcttcggcgtgaacaagtatttgggcccgtatgtaatgatgattggaaaaatgatgatagacatgatgtactttgtcatcattatgctggtggttctgatgagctttggggtcgccaggcaagccatcctttttcccaatgaggagccatcatggaaactggccaagaacatcttctacatgccctattggatgatttatggggaagtgtttgcggaccagatagaccctccctgtggacagaatgagacccgagaggatggtaaaataatccagctgcctccctgcaagacaggagcttggatcgtgccggccatcatggcctgctacctcttagtggcaaacatcttgctggtcaacctcctcattgctgtctttaacaatacattttttgaagtaaaatcgatatccaaccaagtctggaagtttcagaggtatcagctcatcatgactttccatgaaaggccagttctgcccccaccactgatcatcttcagccacatgaccatgatattccagcacctgtgctgccgatggaggaaacacgagagcgacccggatgaaagggactacggcctgaaactcttcataaccgatgatgagctcaagaaagtacatgactttgaagagcaatgcatagaagaatacttcagagaaaaggatgatcggttcaactcatctaatgatgagaggatacgggtgacttcagaaagggtggagaacatgtctatgcggctggaggaagtcaacgagagagagcactccatgaaggcttcactccagaccgtggacatccggctggcgcagctggaagaccttatcgggcgcatggccacggccctggagcgcctgacaggtctggagcgggccgagtccaacaaaatccgctcgaggacctcgtcagactgcacggacgccgcctacattgtccgtcagagcagcttcaacagccaggaagggaacaccttcaagctccaagagagtatagaccctgcaggtgaggagaccatgtccccaacttctccaaccttaatgccccgtatgcgaagccattctttctattcggtcaatatgaaagacaaaggtggtatagaaaagttggaaagtatttttaaagaaaggtccctgagcctacaccgggctactagttcccactctgtagcaaaagaacccaaagctcctgcagcccctgccaacaccttggccattgttcctgattccagaagaccatcatcgtgtatagacatctatgtctctgctatggatgagctccactgtgatatagaccctctggacaattccgtgaacatccttgggctgggcgagccaagcttttcaactccagtaccttccacagccccttcaagtagtgcctatgcaacacttgcacccacagacagacctccaagccggagcattgattttgaggacatcacctccatggacactagatctttttcttcagactacacccacctcccagaatgccaaaacccctgggactcagagcctccgatgtaccacaccattgagcgttccaaaagtagccgctacctagccaccacaccctttcttctagaagaggctcccattgtgaaatctcatagctttatgttttccccctcaaggagctattatgccaactttggggtgcctgtaaaaacagcagaatacacaagtattacagactgtattgacacaaggtgtgtcaatgcccctcaagcaattgcggacagagctgccttccctggaggtcttggagacaaagtggaggacttaacttgctgccatccagagcgagaagcagaactgagtcaccccagctctgacagtgaggagaatgaggccaaaggccgcagagccaccattgcaatatcctcccaggagggtgataactcagagagaaccctgtccaacaacatcactgttcccaagatagagcgcgccaacagctactcggcagaggagccaagtgcgccatatgcacacaccaggaagagcttctccatcagtgacaaactcgacaggcagcggaacacagcaagcctgcgaaatcccttccagagaagcaagtcctccaagccggagggccgaggggacagcctgtccatgaggagactgtccagaacatcggctttccaaagctttgaaagcaagcacaactaaaccttcttaatatccgccacagaaggctcaagaatccagccctaaaattctctccaactccagtttttcccctttccttgaatcatacctgctttattcttagctgagcaaaacaagcaatgctttgggaggtgttaactcaaaggtgacttctgggccacagatcaagaaagcatttgatctgacccagtgccagacacaggggatttaaggcatgttcacacttgctgggcagggagggggaagagagggagaaggaagggttagagatgaatgtgtatccgcagtcacagcagaaagccatgagagcaggggaaacaaggggcttcgagcacgctccatgccaggaggcatctgttgatttctgaccattatcaagagttgtaggatgcagggctaaattgcaaaataaaataaaatagccagcgtacacaatgagatattctaaacttccattctgttttcttttcacattggctccatcactggtgactgatgaagagcatcctctttattcagtataagccggcagcaagcagttctacctaacgtcccacatccttctcatgccaacacttctgtaattgatcattataaagaaaaaacaaggtaacagtcatagttcacctgtctcttatctattcacttctggtgccacaactgtttatccttttttgaagaaaataagggaacagaaatgcctttttgtattgcaatcgaaatgaaagaagagttgatgttaaaaaaacaaaagtcaagtgatttattatatacagtgggcgttcaagtctagtcgagcaagctcaggagaatgtaattaaataattttatattttttaatttattttgtatctcacctgtcatggatgaattcattcactgaatatgtaatattgaacttaaaaaaaaaaaaaaaaaaa

SEQ ID NO: 827 - protein, 1566 aa, Homo sapiens
MYVRVSFDTKPDLLLHLMTKEWQLELPKLLISVHGGLQNFELQPKLKQVFGKGLIKAAMTTGAWIFTGGVNTGVIRHVGDALKDHASKSRGKICTIGIAPWGIVENQEDLIGRDVVRPYQTMSNPMSKLTVLNSMHSHFILADNGTTGKYGAEVKLRRQLEKHISLQKINTRIGQGVPVVALIVEGGPNVISIVLEYLRDTPPVPVVVCDGSGRASDILAFGHKYSEEGGLINESLRDQLLVTIQKTFTYTRTQAQHLFIILMECMKKKELITVFRMGSEGHQDIDLAILTALLKGANASAPDQLSLALAWNRVDIARSQIFIYGQQWPVGSLEQAMLDALVLDRVDFVKLLIENGVSMHRFLTISRLEELYNTRHGPSNTLYHLVRDVKKREYPGFGWIYFKGNLPPDYRISLIDIGLVIEYLMGGAYRCNYTRKRFRTLYHNLFGPKRPKALKLLGMEDDIPLRRGRKTTKKREEEVDIDLDDPEINHFPFPFHELMVWAVLMKRQKMALFFWQHGEEAMAKALVACKLCKAMAHEASENDMVDDISQELNHNSRDFGQLAVELLDQSYKQDEQLAMKLLTYELKNWSNATCLQLAVAAKHRDFIAHTCSQMLLTDMWMGRLRMRKNSGLKVILGILLPPSILSLEFKNKDDMPYMSQAQEIHLQEKEAEEPEKPTKEKEEEDMELTAMLGRNNGESSRKKDEEEVQSKHRLIPLGRKIYEFYNAPIVKFWFYTLAYIGYLMLFNYIVLVKMERWPSTQEWIVISYIFTLGIEKMREILMSEPGKLLQKVKVWLQEYWNVTDLIAILLFSVGMILRLQDQPFRSDGRVIYCVNIIYWYIRLLDIFGVNKYLGPYVMMIGKMMIDMMYFVIIMLVVLMSFGVARQAILFPNEEPSWKLAKNIFYMPYWMIYGEVFADQIDPPCGQNETREDGKIIQLPPCKTGAWIVPAIMACYLLVANILLVNLLIAVFNNTFFEVKSISNQVWKFQRYQLIMTFHERPVLPPPLIIFSHMTMIFQHLCCRWRKHESDPDERDYGLKLFITDDELKKVHDFEEQCIEEYFREKDDRFNSSNDERIRVTSERVENMSMRLEEVNEREHSMKASLQTVDIRLAQLEDLIGRMATALERLTGLERAESNKIRSRTSSDCTDAAYIVRQSSFNSQEGNTFKLQESIDPAGEETMSPTSPTLMPRMRSHSFYSVNMKDKGGIEKLESIFKERSLSLHRATSSHSVAKEPKAPAAPANTLAIVPDSRRPSSCIDIYVSAMDELHCDIDPLDNSVNILGLGEPSFSTPVPSTAPSSSAYATLAPTDRPPSRSIDFEDITSMDTRSFSSDYTHLPECQNPWDSEPPMYHTIERSKSSRYLATTPFLLEEAPIVKSHSFMFSPSRSYYANFGVPVKTAEYTSITDCIDTRCVNAPQAIADRAAFPGGLGDKVEDLTCCHPEREAELSHPSSDSEENEAKGRRATIAISSQEGDNSERTLSNNITVPKIERANSYSAEEPSAPYAHTRKSFSISDKLDRQRNTASLRNPFQRSKSSKPEGRGDSLSMRRLSRTSAFQSFESKHN

SEQ ID NO: 828 - DNA, 5910 bp, Homo sapiens
agctgcagcaaaatgaaagcaacaggagctgctccggggactgcttttgccagtacccagaatcagtgctcaggctcagaaatcctggatagaaagagcattttataaaagagaatgtgtccacatcatacccagcaccaaagacccccataggtgttgctgtgggcgtctgataggccagcatgttggcctcacccccagtatctccgtgcttcagaatgagaaaaatgaaagtcgcctctcccgaaatgacatccagtctgaaaagtggtccatcagcaaacacactcaactcagccctacggatgcttttgggaccattgagttccaaggaggtggccattccaacaaagccatgtatgtgcgagtatcttttgatacaaaacctgatctcctcttacacctgatgaccaaggaatggcagttggagcttcccaagcttctcatctctgtccatgggggcctgcagaactttgaactccagccaaaactcaagcaagtctttgggaaagggctcatcaaagcagcaatgacaactggagcgtggatattcactggaggggttaacacaggtgttattcgtcatgttggcgatgccttgaaggatcatgcctctaagtctcgaggaaagatatgcaccataggtattgccccctggggaattgtggaaaaccaggaggacctcattggaagagatgttgtccggccataccagaccatgtccaatcccatgagcaagctcactgttctcaacagcatgcattcccacttcattctggctgacaacgggaccactggaaaatatggagcagaggtgaaacttcgaagacaactggaaaagcatatttcactccagaagataaacacaagaatcggtcaaggtgttcctgtggtggcactcatagtggaaggaggacccaatgtgatctcgattgttttggagtaccttcgagacacccctcccgtgccagtggttgtctgtgatgggagtggacgggcatcggacatcctggcctttgggcataaatactcagaagaaggcggactgataaatgaatctttgagggaccagctgttggtgactatacagaagactttcacatacactcgaacccaagctcagcatctgttcatcatcctcatggagtgcatgaagaagaaggaattgattacggtatttcggatgggatcagaaggacaccaggacattgatttggctatcctgacagctttactcaaaggagccaatgcctcggccccagaccaactgagcttagctttagcctggaacagagtcgacatcgctcgcagccagatctttatttacgggcaacagtggccggtgggatctctggagcaagccatgttggatgccttagttctggacagagtggattttgtgaaattactcatagagaatggagtaagcatgcaccgttttctcaccatctccagactagaggaattgtacaatacgagacatgggccctcaaatacattgtaccacttggtcagggatgtcaaaaaggggaacctgcccccagactacagaatcagcctgattgacatcggcctggtgatcgagtacctgatgggcggggcttatcgctgcaactacacgcgcaagcgcttccggaccctctaccacaacctcttcggccccaagagggatgatattcccttgaggcgaggaagaaagacaaccaagaaacgtgaagaagaggtggacattgacttggatgatcctgagatcaaccacttccccttccctttccatgagctcatggtgtgggctgttctcatgaagcggcagaagatggccctgttcttctggcagcacggtgaggaggccatggccaaggccctggtggcctgcaagctctgcaaagccatggctcatgaggcctctgagaacgacatggttgacgacatttcccaggagctgaatcacaattccagagactttggccagctggctgtggagctcctggaccagtcctacaagcaggacgaacagctggccatgaaactgctgacgtatgagctgaagaactggagcaacgccacgtgcctgcagcttgccgtggctgccaaacaccgcgacttcatcgcgcacacgtgcagccagatgctgctcaccgacatgtggatgggccggctccgcatgcgcaagaactcaggcctcaaggtaattctgggaattctacttcctccttcaattctcagcttggagttcaagaacaaagacgacatgccctatatgtctcaggcccaggaaatccacctccaagagaaggaggcagaagaaccagagaagcccacaaaggaaaaagaggaagaggacatggagctcacagcaatgttgggacgaaacaacggggagtcctccaggaagaaggatgaagaggaagttcagagcaagcaccggttaatccccctcggcagaaaaatctatgaattctacaatgcacccatcgtgaagttctggttctacacactggcgtatatcggatacctgatgctcttcaactatatcgtgttagtgaagatggaacgctggccgtccacccaggaatggatcgtaatctcctatattttcaccctgggaatagaaaagatgagagagattctgatgtcagagccagggaagttgctacagaaagtgaaggtatggctgcaggagtactggaatgtcacggacctcatcgccatccttctgttttctgtcggaatgatccttcgtctccaagaccagcccttcaggagtgacgggagggtcatctactgcgtgaacatcatttactggtatatccgtctcctagacatcttcggcgtgaacaagtatttgggcccgtatgtaatgatgattggaaaaatgatgatagacatgatgtactttgtcatcattatgctggtggttctgatgagctttggggtcgccaggcaagccatcctttttcccaatgaggagccatcatggaaactggccaagaacatcttctacatgccctattggatgatttatggggaagtgtttgcggaccagatagaccctccctgtggacagaatgagacccgagaggatggtaaaataatccagctgcctccctgcaagacaggagcttggatcgtgccggccatcatggcctgctacctcttagtggcaaacatcttgctggtcaacctcctcattgctgtctttaacaatacattttttgaagtaaaatcgatatccaaccaagtctggaagtttcagaggtatcagctcatcatgactttccatgaaaggccagttctgcccccaccactgatcatcttcagccacatgaccatgatattccagcacctgtgctgccgatggaggaaacacgagagcgacccggatgaaagggactacggcctgaaactcttcataaccgatgatgagctcaagaaagtacatgactttgaagagcaatgcatagaagaatacttcagagaaaaggatgatcggttcaactcatctaatgatgagaggatacgggtgacttcagaaagggtggagaacatgtctatgcggctggaggaagtcaacgagagagagcactccatgaaggcttcactccagaccgtggacatccggctggcgcagctggaagaccttatcgggcgcatggccacggccctggagcgcctgacaggtctggagcgggccgagtccaacaaaatccgctcgaggacctcgtcagactgcacggacgccgcctacattgtccgtcagagcagcttcaacagccaggaagggaacaccttcaagctccaagagagtatagaccctgcaggtgaggagaccatgtccccaacttctccaaccttaatgccccgtatgcgaagccattctttctattcggtcaatatgaaagacaaaggtggtatagaaaagttggaaagtatttttaaagaaaggtccctgagcctacaccgggctactagttcccactctgtagcaaaagaacccaaagctcctgcagcccctgccaacaccttggccattgttcctgattccagaagaccatcatcgtgtatagacatctatgtctctgctatggatgagctccactgtgatatagaccctctggacaattccgtgaacatccttgggctgggcgagccaagcttttcaactccagtaccttccacagccccttcaagtagtgcctatgcaacacttgcacccacagacagacctccaagccggagcattgattttgaggacatcacctccatggacactagatctttttcttcagactacacccacctcccagaatgccaaaacccctgggactcagagcctccgatgtaccacaccattgagcgttccaaaagtagccgctacctagccaccacaccctttcttctagaagaggctcccattgtgaaatctcatagctttatgttttccccctcaaggagctattatgccaactttggggtgcctgtaaaaacagcagaatacacaagtattacagactgtattgacacaaggtgtgtcaatgcccctcaagcaattgcggacagagctgccttccctggaggtcttggagacaaagtggaggacttaacttgctgccatccagagcgagaagcagaactgagtcaccccagctctgacagtgaggagaatgaggccaaaggccgcagagccaccattgcaatatcctcccaggagggtgataactcagagagaaccctgtccaacaacatcactgttcccaagatagagcgcgccaacagctactcggcagaggagccaagtgcgccatatgcacacaccaggaagagcttctccatcagtgacaaactcgacaggcagcggaacacagcaagcctgcgaaatcccttccagagaagcaagtcctccaagccggagggccgaggggacagcctgtccatgaggagactgtccagaacatcggctttccaaagctttgaaagcaagcacaactaaaccttcttaatatccgccacagaaggctcaagaatccagccctaaaattctctccaactccagtttttcccctttccttgaatcatacctgctttattcttagctgagcaaaacaagcaatgctttgggaggtgttaactcaaaggtgacttctgggccacagatcaagaaagcatttgatctgacccagtgccagacacaggggatttaaggcatgttcacacttgctgggcagggagggggaagagagggagaaggaagggttagagatgaatgtgtatccgcagtcacagcagaaagccatgagagcaggggaaacaaggggcttcgagcacgctccatgccaggaggcatctgttgatttctgaccattatcaagagttgtaggatgcagggctaaattgcaaaataaaataaaatagccagcgtacacaatgagatattctaaacttccattctgttttcttttcacattggctccatcactggtgactgatgaagagcatcctctttattcagtataagccggcagcaagcagttctacctaacgtcccacatccttctcatgccaacacttctgtaattgatcattataaagaaaaaacaaggtaacagtcatagttcacctgtctcttatctattcacttctggtgccacaactgtttatccttttttgaagaaaataagggaacagaaatgcctttttgtattgcaatcgaaatgaaagaagagttgatgttaaaaaaacaaaagtcaagtgatttattatatacagtgggcgttcaagtctagtcgagcaagctcaggagaatgtaattaaataattttatattttttaatttattttgtatctcacctgtcatggatgaattcattcactgaatatgtaatattgaacttaaaaaaaaaaaaaaaaaaa

SEQ ID NO: 829 - protein, 1544 aa, Homo sapiens
MYVRVSFDTKPDLLLHLMTKEWQLELPKLLISVHGGLQNFELQPKLKQVFGKGLIKAAMTTGAWIFTGGVNTGVIRHVGDALKDHASKSRGKICTIGIAPWGIVENQEDLIGRDVVRPYQTMSNPMSKLTVLNSMHSHFILADNGTTGKYGAEVKLRRQLEKHISLQKINTRIGQGVPVVALIVEGGPNVISIVLEYLRDTPPVPVVVCDGSGRASDILAFGHKYSEEGGLINESLRDQLLVTIQKTFTYTRTQAQHLFIILMECMKKKELITVFRMGSEGHQDIDLAILTALLKGANASAPDQLSLALAWNRVDIARSQIFIYGQQWPVGSLEQAMLDALVLDRVDFVKLLIENGVSMHRFLTISRLEELYNTRHGPSNTLYHLVRDVKKGNLPPDYRISLIDIGLVIEYLMGGAYRCNYTRKRFRTLYHNLFGPKRDDIPLRRGRKTTKKREEEVDIDLDDPEINHFPFPFHELMVWAVLMKRQKMALFFWQHGEEAMAKALVACKLCKAMAHEASENDMVDDISQELNHNSRDFGQLAVELLDQSYKQDEQLAMKLLTYELKNWSNATCLQLAVAAKHRDFIAHTCSQMLLTDMWMGRLRMRKNSGLKVILGILLPPSILSLEFKNKDDMPYMSQAQEIHLQEKEAEEPEKPTKEKEEEDMELTAMLGRNNGESSRKKDEEEVQSKHRLIPLGRKIYEFYNAPIVKFWFYTLAYIGYLMLFNYIVLVKMERWPSTQEWIVISYIFTLGIEKMREILMSEPGKLLQKVKVWLQEYWNVTDLIAILLFSVGMILRLQDQPFRSDGRVIYCVNIIYWYIRLLDIFGVNKYLGPYVMMIGKMMIDMMYFVIIMLVVLMSFGVARQAILFPNEEPSWKLAKNIFYMPYWMIYGEVFADQIDPPCGQNETREDGKIIQLPPCKTGAWIVPAIMACYLLVANILLVNLLIAVFNNTFFEVKSISNQVWKFQRYQLIMTFHERPVLPPPLIIFSHMTMIFQHLCCRWRKHESDPDERDYGLKLFITDDELKKVHDFEEQCIEEYFREKDDRFNSSNDERIRVTSERVENMSMRLEEVNEREHSMKASLQTVDIRLAQLEDLIGRMATALERLTGLERAESNKIRSRTSSDCTDAAYIVRQSSFNSQEGNTFKLQESIDPAGEETMSPTSPTLMPRMRSHSFYSVNMKDKGGIEKLESIFKERSLSLHRATSSHSVAKEPKAPAAPANTLAIVPDSRRPSSCIDIYVSAMDELHCDIDPLDNSVNILGLGEPSFSTPVPSTAPSSSAYATLAPTDRPPSRSIDFEDITSMDTRSFSSDYTHLPECQNPWDSEPPMYHTIERSKSSRYLATTPFLLEEAPIVKSHSFMFSPSRSYYANFGVPVKTAEYTSITDCIDTRCVNAPQAIADRAAFPGGLGDKVEDLTCCHPEREAELSHPSSDSEENEAKGRRATIAISSQEGDNSERTLSNNITVPKIERANSYSAEEPSAPYAHTRKSFSISDKLDRQRNTASLRNPFQRSKSSKPEGRGDSLSMRRLSRTSAFQSFESKHN

SEQ ID NO: 830 - DNA, 5946 bp, Homo sapiens
agctgcagcaaaatgaaagcaacaggagctgctccggggactgcttttgccagtacccagaatcagtgctcaggctcagaaatcctggatagaaagagcattttataaaagagaatgtgtccacatcatacccagcaccaaagacccccataggtgttgctgtgggcgtctgataggccagcatgttggcctcacccccagtatctccgtgcttcagaatgagaaaaatgaaagtcgcctctcccgaaatgacatccagtctgaaaagtggtccatcagcaaacacactcaactcagccctacggatgcttttgggaccattgagttccaaggaggtggccattccaacaaagccatgtatgtgcgagtatcttttgatacaaaacctgatctcctcttacacctgatgaccaaggaatggcagttggagcttcccaagcttctcatctctgtccatgggggcctgcagaactttgaactccagccaaaactcaagcaagtctttgggaaagggctcatcaaagcagcaatgacaactggagcgtggatattcactggaggggttaacacaggtgttattcgtcatgttggcgatgccttgaaggatcatgcctctaagtctcgaggaaagatatgcaccataggtattgccccctggggaattgtggaaaaccaggaggacctcattggaagagatgttgtccggccataccagaccatgtccaatcccatgagcaagctcactgttctcaacagcatgcattcccacttcattctggctgacaacgggaccactggaaaatatggagcagaggtgaaacttcgaagacaactggaaaagcatatttcactccagaagataaacacaagaatcggtcaaggtgttcctgtggtggcactcatagtggaaggaggacccaatgtgatctcgattgttttggagtaccttcgagacacccctcccgtgccagtggttgtctgtgatgggagtggacgggcatcggacatcctggcctttgggcataaatactcagaagaaggcggactgataaatgaatctttgagggaccagctgttggtgactatacagaagactttcacatacactcgaacccaagctcagcatctgttcatcatcctcatggagtgcatgaagaagaaggaattgattacggtatttcggatgggatcagaaggacaccaggacattgatttggctatcctgacagctttactcaaaggagccaatgcctcggccccagaccaactgagcttagctttagcctggaacagagtcgacatcgctcgcagccagatctttatttacgggcaacagtggccggtgggatctctggagcaagccatgttggatgccttagttctggacagagtggattttgtgaaattactcatagagaatggagtaagcatgcaccgttttctcaccatctccagactagaggaattgtacaatacgagacatgggccctcaaatacattgtaccacttggtcagggatgtcaaaaagcgagagtatccaggtttcggttggatctattttaaggggaacctgcccccagactacagaatcagcctgattgacatcggcctggtgatcgagtacctgatgggcggggcttatcgctgcaactacacgcgcaagcgcttccggaccctctaccacaacctcttcggccccaagagggatgatattcccttgaggcgaggaagaaagacaaccaagaaacgtgaagaagaggtggacattgacttggatgatcctgagatcaaccacttccccttccctttccatgagctcatggtgtgggctgttctcatgaagcggcagaagatggccctgttcttctggcagcacggtgaggaggccatggccaaggccctggtggcctgcaagctctgcaaagccatggctcatgaggcctctgagaacgacatggttgacgacatttcccaggagctgaatcacaattccagagactttggccagctggctgtggagctcctggaccagtcctacaagcaggacgaacagctggccatgaaactgctgacgtatgagctgaagaactggagcaacgccacgtgcctgcagcttgccgtggctgccaaacaccgcgacttcatcgcgcacacgtgcagccagatgctgctcaccgacatgtggatgggccggctccgcatgcgcaagaactcaggcctcaaggtaattctgggaattctacttcctccttcaattctcagcttggagttcaagaacaaagacgacatgccctatatgtctcaggcccaggaaatccacctccaagagaaggaggcagaagaaccagagaagcccacaaaggaaaaagaggaagaggacatggagctcacagcaatgttgggacgaaacaacggggagtcctccaggaagaaggatgaagaggaagttcagagcaagcaccggttaatccccctcggcagaaaaatctatgaattctacaatgcacccatcgtgaagttctggttctacacactggcgtatatcggatacctgatgctcttcaactatatcgtgttagtgaagatggaacgctggccgtccacccaggaatggatcgtaatctcctatattttcaccctgggaatagaaaagatgagagagattctgatgtcagagccagggaagttgctacagaaagtgaaggtatggctgcaggagtactggaatgtcacggacctcatcgccatccttctgttttctgtcggaatgatccttcgtctccaagaccagcccttcaggagtgacgggagggtcatctactgcgtgaacatcatttactggtatatccgtctcctagacatcttcggcgtgaacaagtatttgggcccgtatgtaatgatgattggaaaaatgatgatagacatgatgtactttgtcatcattatgctggtggttctgatgagctttggggtcgccaggcaagccatcctttttcccaatgaggagccatcatggaaactggccaagaacatcttctacatgccctattggatgatttatggggaagtgtttgcggaccagatagaccctccctgtggacagaatgagacccgagaggatggtaaaataatccagctgcctccctgcaagacaggagcttggatcgtgccggccatcatggcctgctacctcttagtggcaaacatcttgctggtcaacctcctcattgctgtctttaacaatacattttttgaagtaaaatcgatatccaaccaagtctggaagtttcagaggtatcagctcatcatgactttccatgaaaggccagttctgcccccaccactgatcatcttcagccacatgaccatgatattccagcacctgtgctgccgatggaggaaacacgagagcgacccggatgaaagggactacggcctgaaactcttcataaccgatgatgagctcaagaaagtacatgactttgaagagcaatgcatagaagaatacttcagagaaaaggatgatcggttcaactcatctaatgatgagaggatacgggtgacttcagaaagggtggagaacatgtctatgcggctggaggaagtcaacgagagagagcactccatgaaggcttcactccagaccgtggacatccggctggcgcagctggaagaccttatcgggcgcatggccacggccctggagcgcctgacaggtctggagcgggccgagtccaacaaaatccgctcgaggacctcgtcagactgcacggacgccgcctacattgtccgtcagagcagcttcaacagccaggaagggaacaccttcaagctccaagagagtatagaccctgcaggtgaggagaccatgtccccaacttctccaaccttaatgccccgtatgcgaagccattctttctattcggtcaatatgaaagacaaaggtggtatagaaaagttggaaagtatttttaaagaaaggtccctgagcctacaccgggctactagttcccactctgtagcaaaagaacccaaagctcctgcagcccctgccaacaccttggccattgttcctgattccagaagaccatcatcgtgtatagacatctatgtctctgctatggatgagctccactgtgatatagaccctctggacaattccgtgaacatccttgggctgggcgagccaagcttttcaactccagtaccttccacagccccttcaagtagtgcctatgcaacacttgcacccacagacagacctccaagccggagcattgattttgaggacatcacctccatggacactagatctttttcttcagactacacccacctcccagaatgccaaaacccctgggactcagagcctccgatgtaccacaccattgagcgttccaaaagtagccgctacctagccaccacaccctttcttctagaagaggctcccattgtgaaatctcatagctttatgttttccccctcaaggagctattatgccaactttggggtgcctgtaaaaacagcagaatacacaagtattacagactgtattgacacaaggtgtgtcaatgcccctcaagcaattgcggacagagctgccttccctggaggtcttggagacaaagtggaggacttaacttgctgccatccagagcgagaagcagaactgagtcaccccagctctgacagtgaggagaatgaggccaaaggccgcagagccaccattgcaatatcctcccaggagggtgataactcagagagaaccctgtccaacaacatcactgttcccaagatagagcgcgccaacagctactcggcagaggagccaagtgcgccatatgcacacaccaggaagagcttctccatcagtgacaaactcgacaggcagcggaacacagcaagcctgcgaaatcccttccagagaagcaagtcctccaagccggagggccgaggggacagcctgtccatgaggagactgtccagaacatcggctttccaaagctttgaaagcaagcacaactaaaccttcttaatatccgccacagaaggctcaagaatccagccctaaaattctctccaactccagtttttcccctttccttgaatcatacctgctttattcttagctgagcaaaacaagcaatgctttgggaggtgttaactcaaaggtgacttctgggccacagatcaagaaagcatttgatctgacccagtgccagacacaggggatttaaggcatgttcacacttgctgggcagggagggggaagagagggagaaggaagggttagagatgaatgtgtatccgcagtcacagcagaaagccatgagagcaggggaaacaaggggcttcgagcacgctccatgccaggaggcatctgttgatttctgaccattatcaagagttgtaggatgcagggctaaattgcaaaataaaataaaatagccagcgtacacaatgagatattctaaacttccattctgttttcttttcacattggctccatcactggtgactgatgaagagcatcctctttattcagtataagccggcagcaagcagttctacctaacgtcccacatccttctcatgccaacacttctgtaattgatcattataaagaaaaaacaaggtaacagtcatagttcacctgtctcttatctattcacttctggtgccacaactgtttatccttttttgaagaaaataagggaacagaaatgcctttttgtattgcaatcgaaatgaaagaagagttgatgttaaaaaaacaaaagtcaagtgatttattatatacagtgggcgttcaagtctagtcgagcaagctcaggagaatgtaattaaataattttatattttttaatttattttgtatctcacctgtcatggatgaattcattcactgaatatgtaatattgaacttaaaaaaaaaaaaaaaaaaa

SEQ ID NO: 831 - protein, 1556 aa, Homo sapiens
MYVRVSFDTKPDLLLHLMTKEWQLELPKLLISVHGGLQNFELQPKLKQVFGKGLIKAAMTTGAWIFTGGVNTGVIRHVGDALKDHASKSRGKICTIGIAPWGIVENQEDLIGRDVVRPYQTMSNPMSKLTVLNSMHSHFILADNGTTGKYGAEVKLRRQLEKHISLQKINTRIGQGVPVVALIVEGGPNVISIVLEYLRDTPPVPVVVCDGSGRASDILAFGHKYSEEGGLINESLRDQLLVTIQKTFTYTRTQAQHLFIILMECMKKKELITVFRMGSEGHQDIDLAILTALLKGANASAPDQLSLALAWNRVDIARSQIFIYGQQWPVGSLEQAMLDALVLDRVDFVKLLIENGVSMHRFLTISRLEELYNTRHGPSNTLYHLVRDVKKREYPGFGWIYFKGNLPPDYRISLIDIGLVIEYLMGGAYRCNYTRKRFRTLYHNLFGPKRDDIPLRRGRKTTKKREEEVDIDLDDPEINHFPFPFHELMVWAVLMKRQKMALFFWQHGEEAMAKALVACKLCKAMAHEASENDMVDDISQELNHNSRDFGQLAVELLDQSYKQDEQLAMKLLTYELKNWSNATCLQLAVAAKHRDFIAHTCSQMLLTDMWMGRLRMRKNSGLKVILGILLPPSILSLEFKNKDDMPYMSQAQEIHLQEKEAEEPEKPTKEKEEEDMELTAMLGRNNGESSRKKDEEEVQSKHRLIPLGRKIYEFYNAPIVKFWFYTLAYIGYLMLFNYIVLVKMERWPSTQEWIVISYIFTLGIEKMREILMSEPGKLLQKVKVWLQEYWNVTDLIAILLFSVGMILRLQDQPFRSDGRVIYCVNIIYWYIRLLDIFGVNKYLGPYVMMIGKMMIDMMYFVIIMLVVLMSFGVARQAILFPNEEPSWKLAKNIFYMPYWMIYGEVFADQIDPPCGQNETREDGKIIQLPPCKTGAWIVPAIMACYLLVANILLVNLLIAVFNNTFFEVKSISNQVWKFQRYQLIMTFHERPVLPPPLIIFSHMTMIFQHLCCRWRKHESDPDERDYGLKLFITDDELKKVHDFEEQCIEEYFREKDDRFNSSNDERIRVTSERVENMSMRLEEVNEREHSMKASLQTVDIRLAQLEDLIGRMATALERLTGLERAESNKIRSRTSSDCTDAAYIVRQSSFNSQEGNTFKLQESIDPAGEETMSPTSPTLMPRMRSHSFYSVNMKDKGGIEKLESIFKERSLSLHRATSSHSVAKEPKAPAAPANTLAIVPDSRRPSSCIDIYVSAMDELHCDIDPLDNSVNILGLGEPSFSTPVPSTAPSSSAYATLAPTDRPPSRSIDFEDITSMDTRSFSSDYTHLPECQNPWDSEPPMYHTIERSKSSRYLATTPFLLEEAPIVKSHSFMFSPSRSYYANFGVPVKTAEYTSITDCIDTRCVNAPQAIADRAAFPGGLGDKVEDLTCCHPEREAELSHPSSDSEENEAKGRRATIAISSQEGDNSERTLSNNITVPKIERANSYSAEEPSAPYAHTRKSFSISDKLDRQRNTASLRNPFQRSKSSKPEGRGDSLSMRRLSRTSAFQSFESKHN

SEQ ID NO: 832 - DNA, 6015 bp, Homo sapiens
agctgcagcaaaatgaaagcaacaggagctgctccggggactgcttttgccagtacccagaatcagtgctcaggctcagaaatcctggatagaaagagcattttataaaagagaatgtgtccacatcatacccagcaccaaagacccccataggtgttgctgtgggcgtctgataggccagcatgttggcctcacccccagtatctccgtgcttcagaatgagaaaaatgaaagtcgcctctcccgaaatgacatccagtctgaaaagtggtccatcagcaaacacactcaactcagccctacggatgcttttgggaccattgagttccaaggaggtggccattccaacaaagccatgtatgtgcgagtatcttttgatacaaaacctgatctcctcttacacctgatgaccaaggaatggcagttggagcttcccaagcttctcatctctgtccatgggggcctgcagaactttgaactccagccaaaactcaagcaagtctttgggaaagggctcatcaaagcagcaatgacaactggagcgtggatattcactggaggggttaacacaggtgttattcgtcatgttggcgatgccttgaaggatcatgcctctaagtctcgaggaaagatatgcaccataggtattgccccctggggaattgtggaaaaccaggaggacctcattggaagagatgttgtccggccataccagaccatgtccaatcccatgagcaagctcactgttctcaacagcatgcattcccacttcattctggctgacaacgggaccactggaaaatatggagcagaggtgaaacttcgaagacaactggaaaagcatatttcactccagaagataaacacaagatgcctgccgtttttctctcttgactcccgcttgttttattcattttggggtagttgccagttagactcagttggaatcggtcaaggtgttcctgtggtggcactcatagtggaaggaggacccaatgtgatctcgattgttttggagtaccttcgagacacccctcccgtgccagtggttgtctgtgatgggagtggacgggcatcggacatcctggcctttgggcataaatactcagaagaaggcggactgataaatgaatctttgagggaccagctgttggtgactatacagaagactttcacatacactcgaacccaagctcagcatctgttcatcatcctcatggagtgcatgaagaagaaggaattgattacggtatttcggatgggatcagaaggacaccaggacattgatttggctatcctgacagctttactcaaaggagccaatgcctcggccccagaccaactgagcttagctttagcctggaacagagtcgacatcgctcgcagccagatctttatttacgggcaacagtggccggtgggatctctggagcaagccatgttggatgccttagttctggacagagtggattttgtgaaattactcatagagaatggagtaagcatgcaccgttttctcaccatctccagactagaggaattgtacaatacgagacatgggccctcaaatacattgtaccacttggtcagggatgtcaaaaaggggaacctgcccccagactacagaatcagcctgattgacatcggcctggtgatcgagtacctgatgggcggggcttatcgctgcaactacacgcgcaagcgcttccggaccctctaccacaacctcttcggccccaagaggcccaaagccttgaaactgctgggaatggaggatgatattcccttgaggcgaggaagaaagacaaccaagaaacgtgaagaagaggtggacattgacttggatgatcctgagatcaaccacttccccttccctttccatgagctcatggtgtgggctgttctcatgaagcggcagaagatggccctgttcttctggcagcacggtgaggaggccatggccaaggccctggtggcctgcaagctctgcaaagccatggctcatgaggcctctgagaacgacatggttgacgacatttcccaggagctgaatcacaattccagagactttggccagctggctgtggagctcctggaccagtcctacaagcaggacgaacagctggccatgaaactgctgacgtatgagctgaagaactggagcaacgccacgtgcctgcagcttgccgtggctgccaaacaccgcgacttcatcgcgcacacgtgcagccagatgctgctcaccgacatgtggatgggccggctccgcatgcgcaagaactcaggcctcaaggtaattctgggaattctacttcctccttcaattctcagcttggagttcaagaacaaagacgacatgccctatatgtctcaggcccaggaaatccacctccaagagaaggaggcagaagaaccagagaagcccacaaaggaaaaagaggaagaggacatggagctcacagcaatgttgggacgaaacaacggggagtcctccaggaagaaggatgaagaggaagttcagagcaagcaccggttaatccccctcggcagaaaaatctatgaattctacaatgcacccatcgtgaagttctggttctacacactggcgtatatcggatacctgatgctcttcaactatatcgtgttagtgaagatggaacgctggccgtccacccaggaatggatcgtaatctcctatattttcaccctgggaatagaaaagatgagagagattctgatgtcagagccagggaagttgctacagaaagtgaaggtatggctgcaggagtactggaatgtcacggacctcatcgccatccttctgttttctgtcggaatgatccttcgtctccaagaccagcccttcaggagtgacgggagggtcatctactgcgtgaacatcatttactggtatatccgtctcctagacatcttcggcgtgaacaagtatttgggcccgtatgtaatgatgattggaaaaatgatgatagacatgatgtactttgtcatcattatgctggtggttctgatgagctttggggtcgccaggcaagccatcctttttcccaatgaggagccatcatggaaactggccaagaacatcttctacatgccctattggatgatttatggggaagtgtttgcggaccagatagaccctccctgtggacagaatgagacccgagaggatggtaaaataatccagctgcctccctgcaagacaggagcttggatcgtgccggccatcatggcctgctacctcttagtggcaaacatcttgctggtcaacctcctcattgctgtctttaacaatacattttttgaagtaaaatcgatatccaaccaagtctggaagtttcagaggtatcagctcatcatgactttccatgaaaggccagttctgcccccaccactgatcatcttcagccacatgaccatgatattccagcacctgtgctgccgatggaggaaacacgagagcgacccggatgaaagggactacggcctgaaactcttcataaccgatgatgagctcaagaaagtacatgactttgaagagcaatgcatagaagaatacttcagagaaaaggatgatcggttcaactcatctaatgatgagaggatacgggtgacttcagaaagggtggagaacatgtctatgcggctggaggaagtcaacgagagagagcactccatgaaggcttcactccagaccgtggacatccggctggcgcagctggaagaccttatcgggcgcatggccacggccctggagcgcctgacaggtctggagcgggccgagtccaacaaaatccgctcgaggacctcgtcagactgcacggacgccgcctacattgtccgtcagagcagcttcaacagccaggaagggaacaccttcaagctccaagagagtatagaccctgcaggtgaggagaccatgtccccaacttctccaaccttaatgccccgtatgcgaagccattctttctattcggtcaatatgaaagacaaaggtggtatagaaaagttggaaagtatttttaaagaaaggtccctgagcctacaccgggctactagttcccactctgtagcaaaagaacccaaagctcctgcagcccctgccaacaccttggccattgttcctgattccagaagaccatcatcgtgtatagacatctatgtctctgctatggatgagctccactgtgatatagaccctctggacaattccgtgaacatccttgggctgggcgagccaagcttttcaactccagtaccttccacagccccttcaagtagtgcctatgcaacacttgcacccacagacagacctccaagccggagcattgattttgaggacatcacctccatggacactagatctttttcttcagactacacccacctcccagaatgccaaaacccctgggactcagagcctccgatgtaccacaccattgagcgttccaaaagtagccgctacctagccaccacaccctttcttctagaagaggctcccattgtgaaatctcatagctttatgttttccccctcaaggagctattatgccaactttggggtgcctgtaaaaacagcagaatacacaagtattacagactgtattgacacaaggtgtgtcaatgcccctcaagcaattgcggacagagctgccttccctggaggtcttggagacaaagtggaggacttaacttgctgccatccagagcgagaagcagaactgagtcaccccagctctgacagtgaggagaatgaggccaaaggccgcagagccaccattgcaatatcctcccaggagggtgataactcagagagaaccctgtccaacaacatcactgttcccaagatagagcgcgccaacagctactcggcagaggagccaagtgcgccatatgcacacaccaggaagagcttctccatcagtgacaaactcgacaggcagcggaacacagcaagcctgcgaaatcccttccagagaagcaagtcctccaagccggagggccgaggggacagcctgtccatgaggagactgtccagaacatcggctttccaaagctttgaaagcaagcacaactaaaccttcttaatatccgccacagaaggctcaagaatccagccctaaaattctctccaactccagtttttcccctttccttgaatcatacctgctttattcttagctgagcaaaacaagcaatgctttgggaggtgttaactcaaaggtgacttctgggccacagatcaagaaagcatttgatctgacccagtgccagacacaggggatttaaggcatgttcacacttgctgggcagggagggggaagagagggagaaggaagggttagagatgaatgtgtatccgcagtcacagcagaaagccatgagagcaggggaaacaaggggcttcgagcacgctccatgccaggaggcatctgttgatttctgaccattatcaagagttgtaggatgcagggctaaattgcaaaataaaataaaatagccagcgtacacaatgagatattctaaacttccattctgttttcttttcacattggctccatcactggtgactgatgaagagcatcctctttattcagtataagccggcagcaagcagttctacctaacgtcccacatccttctcatgccaacacttctgtaattgatcattataaagaaaaaacaaggtaacagtcatagttcacctgtctcttatctattcacttctggtgccacaactgtttatccttttttgaagaaaataagggaacagaaatgcctttttgtattgcaatcgaaatgaaagaagagttgatgttaaaaaaacaaaagtcaagtgatttattatatacagtgggcgttcaagtctagtcgagcaagctcaggagaatgtaattaaataattttatattttttaatttattttgtatctcacctgtcatggatgaattcattcactgaatatgtaatattgaacttaaaaaaaaaaaaaaaaaaa

SEQ ID NO: 833 - protein, 1579 aa, Homo sapiens
MYVRVSFDTKPDLLLHLMTKEWQLELPKLLISVHGGLQNFELQPKLKQVFGKGLIKAAMTTGAWIFTGGVNTGVIRHVGDALKDHASKSRGKICTIGIAPWGIVENQEDLIGRDVVRPYQTMSNPMSKLTVLNSMHSHFILADNGTTGKYGAEVKLRRQLEKHISLQKINTRCLPFFSLDSRLFYSFWGSCQLDSVGIGQGVPVVALIVEGGPNVISIVLEYLRDTPPVPVVVCDGSGRASDILAFGHKYSEEGGLINESLRDQLLVTIQKTFTYTRTQAQHLFIILMECMKKKELITVFRMGSEGHQDIDLAILTALLKGANASAPDQLSLALAWNRVDIARSQIFIYGQQWPVGSLEQAMLDALVLDRVDFVKLLIENGVSMHRFLTISRLEELYNTRHGPSNTLYHLVRDVKKGNLPPDYRISLIDIGLVIEYLMGGAYRCNYTRKRFRTLYHNLFGPKRPKALKLLGMEDDIPLRRGRKTTKKREEEVDIDLDDPEINHFPFPFHELMVWAVLMKRQKMALFFWQHGEEAMAKALVACKLCKAMAHEASENDMVDDISQELNHNSRDFGQLAVELLDQSYKQDEQLAMKLLTYELKNWSNATCLQLAVAAKHRDFIAHTCSQMLLTDMWMGRLRMRKNSGLKVILGILLPPSILSLEFKNKDDMPYMSQAQEIHLQEKEAEEPEKPTKEKEEEDMELTAMLGRNNGESSRKKDEEEVQSKHRLIPLGRKIYEFYNAPIVKFWFYTLAYIGYLMLFNYIVLVKMERWPSTQEWIVISYIFTLGIEKMREILMSEPGKLLQKVKVWLQEYWNVTDLIAILLFSVGMILRLQDQPFRSDGRVIYCVNIIYWYIRLLDIFGVNKYLGPYVMMIGKMMIDMMYFVIIMLVVLMSFGVARQAILFPNEEPSWKLAKNIFYMPYWMIYGEVFADQIDPPCGQNETREDGKIIQLPPCKTGAWIVPAIMACYLLVANILLVNLLIAVFNNTFFEVKSISNQVWKFQRYQLIMTFHERPVLPPPLIIFSHMTMIFQHLCCRWRKHESDPDERDYGLKLFITDDELKKVHDFEEQCIEEYFREKDDRFNSSNDERIRVTSERVENMSMRLEEVNEREHSMKASLQTVDIRLAQLEDLIGRMATALERLTGLERAESNKIRSRTSSDCTDAAYIVRQSSFNSQEGNTFKLQESIDPAGEETMSPTSPTLMPRMRSHSFYSVNMKDKGGIEKLESIFKERSLSLHRATSSHSVAKEPKAPAAPANTLAIVPDSRRPSSCIDIYVSAMDELHCDIDPLDNSVNILGLGEPSFSTPVPSTAPSSSAYATLAPTDRPPSRSIDFEDITSMDTRSFSSDYTHLPECQNPWDSEPPMYHTIERSKSSRYLATTPFLLEEAPIVKSHSFMFSPSRSYYANFGVPVKTAEYTSITDCIDTRCVNAPQAIADRAAFPGGLGDKVEDLTCCHPEREAELSHPSSDSEENEAKGRRATIAISSQEGDNSERTLSNNITVPKIERANSYSAEEPSAPYAHTRKSFSISDKLDRQRNTASLRNPFQRSKSSKPEGRGDSLSMRRLSRTSAFQSFESKHN

SEQ ID NO: 834 - DNA, 5985 bp, Homo sapiens
agctgcagcaaaatgaaagcaacaggagctgctccggggactgcttttgccagtacccagaatcagtgctcaggctcagaaatcctggatagaaagagcattttataaaagagaatgtgtccacatcatacccagcaccaaagacccccataggtgttgctgtgggcgtctgataggccagcatgttggcctcacccccagtatctccgtgcttcagaatgagaaaaatgaaagtcgcctctcccgaaatgacatccagtctgaaaagtggtccatcagcaaacacactcaactcagccctacggatgcttttgggaccattgagttccaaggaggtggccattccaacaaagccatgtatgtgcgagtatcttttgatacaaaacctgatctcctcttacacctgatgaccaaggaatggcagttggagcttcccaagcttctcatctctgtccatgggggcctgcagaactttgaactccagccaaaactcaagcaagtctttgggaaagggctcatcaaagcagcaatgacaactggagcgtggatattcactggaggggttaacacaggtgttattcgtcatgttggcgatgccttgaaggatcatgcctctaagtctcgaggaaagatatgcaccataggtattgccccctggggaattgtggaaaaccaggaggacctcattggaagagatgttgtccggccataccagaccatgtccaatcccatgagcaagctcactgttctcaacagcatgcattcccacttcattctggctgacaacgggaccactggaaaatatggagcagaggtgaaacttcgaagacaactggaaaagcatatttcactccagaagataaacacaagatgcctgccgtttttctctcttgactcccgcttgttttattcattttggggtagttgccagttagactcagttggaatcggtcaaggtgttcctgtggtggcactcatagtggaaggaggacccaatgtgatctcgattgttttggagtaccttcgagacacccctcccgtgccagtggttgtctgtgatgggagtggacgggcatcggacatcctggcctttgggcataaatactcagaagaaggcggactgataaatgaatctttgagggaccagctgttggtgactatacagaagactttcacatacactcgaacccaagctcagcatctgttcatcatcctcatggagtgcatgaagaagaaggaattgattacggtatttcggatgggatcagaaggacaccaggacattgatttggctatcctgacagctttactcaaaggagccaatgcctcggccccagaccaactgagcttagctttagcctggaacagagtcgacatcgctcgcagccagatctttatttacgggcaacagtggccggtgggatctctggagcaagccatgttggatgccttagttctggacagagtggattttgtgaaattactcatagagaatggagtaagcatgcaccgttttctcaccatctccagactagaggaattgtacaatacgagacatgggccctcaaatacattgtaccacttggtcagggatgtcaaaaaggggaacctgcccccagactacagaatcagcctgattgacatcggcctggtgatcgagtacctgatgggcggggcttatcgctgcaactacacgcgcaagcgcttccggaccctctaccacaacctcttcggccccaagagggatgatattcccttgaggcgaggaagaaagacaaccaagaaacgtgaagaagaggtggacattgacttggatgatcctgagatcaaccacttccccttccctttccatgagctcatggtgtgggctgttctcatgaagcggcagaagatggccctgttcttctggcagcacggtgaggaggccatggccaaggccctggtggcctgcaagctctgcaaagccatggctcatgaggcctctgagaacgacatggttgacgacatttcccaggagctgaatcacaattccagagactttggccagctggctgtggagctcctggaccagtcctacaagcaggacgaacagctggccatgaaactgctgacgtatgagctgaagaactggagcaacgccacgtgcctgcagcttgccgtggctgccaaacaccgcgacttcatcgcgcacacgtgcagccagatgctgctcaccgacatgtggatgggccggctccgcatgcgcaagaactcaggcctcaaggtaattctgggaattctacttcctccttcaattctcagcttggagttcaagaacaaagacgacatgccctatatgtctcaggcccaggaaatccacctccaagagaaggaggcagaagaaccagagaagcccacaaaggaaaaagaggaagaggacatggagctcacagcaatgttgggacgaaacaacggggagtcctccaggaagaaggatgaagaggaagttcagagcaagcaccggttaatccccctcggcagaaaaatctatgaattctacaatgcacccatcgtgaagttctggttctacacactggcgtatatcggatacctgatgctcttcaactatatcgtgttagtgaagatggaacgctggccgtccacccaggaatggatcgtaatctcctatattttcaccctgggaatagaaaagatgagagagattctgatgtcagagccagggaagttgctacagaaagtgaaggtatggctgcaggagtactggaatgtcacggacctcatcgccatccttctgttttctgtcggaatgatccttcgtctccaagaccagcccttcaggagtgacgggagggtcatctactgcgtgaacatcatttactggtatatccgtctcctagacatcttcggcgtgaacaagtatttgggcccgtatgtaatgatgattggaaaaatgatgatagacatgatgtactttgtcatcattatgctggtggttctgatgagctttggggtcgccaggcaagccatcctttttcccaatgaggagccatcatggaaactggccaagaacatcttctacatgccctattggatgatttatggggaagtgtttgcggaccagatagaccctccctgtggacagaatgagacccgagaggatggtaaaataatccagctgcctccctgcaagacaggagcttggatcgtgccggccatcatggcctgctacctcttagtggcaaacatcttgctggtcaacctcctcattgctgtctttaacaatacattttttgaagtaaaatcgatatccaaccaagtctggaagtttcagaggtatcagctcatcatgactttccatgaaaggccagttctgcccccaccactgatcatcttcagccacatgaccatgatattccagcacctgtgctgccgatggaggaaacacgagagcgacccggatgaaagggactacggcctgaaactcttcataaccgatgatgagctcaagaaagtacatgactttgaagagcaatgcatagaagaatacttcagagaaaaggatgatcggttcaactcatctaatgatgagaggatacgggtgacttcagaaagggtggagaacatgtctatgcggctggaggaagtcaacgagagagagcactccatgaaggcttcactccagaccgtggacatccggctggcgcagctggaagaccttatcgggcgcatggccacggccctggagcgcctgacaggtctggagcgggccgagtccaacaaaatccgctcgaggacctcgtcagactgcacggacgccgcctacattgtccgtcagagcagcttcaacagccaggaagggaacaccttcaagctccaagagagtatagaccctgcaggtgaggagaccatgtccccaacttctccaaccttaatgccccgtatgcgaagccattctttctattcggtcaatatgaaagacaaaggtggtatagaaaagttggaaagtatttttaaagaaaggtccctgagcctacaccgggctactagttcccactctgtagcaaaagaacccaaagctcctgcagcccctgccaacaccttggccattgttcctgattccagaagaccatcatcgtgtatagacatctatgtctctgctatggatgagctccactgtgatatagaccctctggacaattccgtgaacatccttgggctgggcgagccaagcttttcaactccagtaccttccacagccccttcaagtagtgcctatgcaacacttgcacccacagacagacctccaagccggagcattgattttgaggacatcacctccatggacactagatctttttcttcagactacacccacctcccagaatgccaaaacccctgggactcagagcctccgatgtaccacaccattgagcgttccaaaagtagccgctacctagccaccacaccctttcttctagaagaggctcccattgtgaaatctcatagctttatgttttccccctcaaggagctattatgccaactttggggtgcctgtaaaaacagcagaatacacaagtattacagactgtattgacacaaggtgtgtcaatgcccctcaagcaattgcggacagagctgccttccctggaggtcttggagacaaagtggaggacttaacttgctgccatccagagcgagaagcagaactgagtcaccccagctctgacagtgaggagaatgaggccaaaggccgcagagccaccattgcaatatcctcccaggagggtgataactcagagagaaccctgtccaacaacatcactgttcccaagatagagcgcgccaacagctactcggcagaggagccaagtgcgccatatgcacacaccaggaagagcttctccatcagtgacaaactcgacaggcagcggaacacagcaagcctgcgaaatcccttccagagaagcaagtcctccaagccggagggccgaggggacagcctgtccatgaggagactgtccagaacatcggctttccaaagctttgaaagcaagcacaactaaaccttcttaatatccgccacagaaggctcaagaatccagccctaaaattctctccaactccagtttttcccctttccttgaatcatacctgctttattcttagctgagcaaaacaagcaatgctttgggaggtgttaactcaaaggtgacttctgggccacagatcaagaaagcatttgatctgacccagtgccagacacaggggatttaaggcatgttcacacttgctgggcagggagggggaagagagggagaaggaagggttagagatgaatgtgtatccgcagtcacagcagaaagccatgagagcaggggaaacaaggggcttcgagcacgctccatgccaggaggcatctgttgatttctgaccattatcaagagttgtaggatgcagggctaaattgcaaaataaaataaaatagccagcgtacacaatgagatattctaaacttccattctgttttcttttcacattggctccatcactggtgactgatgaagagcatcctctttattcagtataagccggcagcaagcagttctacctaacgtcccacatccttctcatgccaacacttctgtaattgatcattataaagaaaaaacaaggtaacagtcatagttcacctgtctcttatctattcacttctggtgccacaactgtttatccttttttgaagaaaataagggaacagaaatgcctttttgtattgcaatcgaaatgaaagaagagttgatgttaaaaaaacaaaagtcaagtgatttattatatacagtgggcgttcaagtctagtcgagcaagctcaggagaatgtaattaaataattttatattttttaatttattttgtatctcacctgtcatggatgaattcattcactgaatatgtaatattgaacttaaaaaaaaaaaaaaaaaaa

SEQ ID NO: 835 - protein, 1569 aa, Homo sapiens
MYVRVSFDTKPDLLLHLMTKEWQLELPKLLISVHGGLQNFELQPKLKQVFGKGLIKAAMTTGAWIFTGGVNTGVIRHVGDALKDHASKSRGKICTIGIAPWGIVENQEDLIGRDVVRPYQTMSNPMSKLTVLNSMHSHFILADNGTTGKYGAEVKLRRQLEKHISLQKINTRCLPFFSLDSRLFYSFWGSCQLDSVGIGQGVPVVALIVEGGPNVISIVLEYLRDTPPVPVVVCDGSGRASDILAFGHKYSEEGGLINESLRDQLLVTIQKTFTYTRTQAQHLFIILMECMKKKELITVFRMGSEGHQDIDLAILTALLKGANASAPDQLSLALAWNRVDIARSQIFIYGQQWPVGSLEQAMLDALVLDRVDFVKLLIENGVSMHRFLTISRLEELYNTRHGPSNTLYHLVRDVKKGNLPPDYRISLIDIGLVIEYLMGGAYRCNYTRKRFRTLYHNLFGPKRDDIPLRRGRKTTKKREEEVDIDLDDPEINHFPFPFHELMVWAVLMKRQKMALFFWQHGEEAMAKALVACKLCKAMAHEASENDMVDDISQELNHNSRDFGQLAVELLDQSYKQDEQLAMKLLTYELKNWSNATCLQLAVAAKHRDFIAHTCSQMLLTDMWMGRLRMRKNSGLKVILGILLPPSILSLEFKNKDDMPYMSQAQEIHLQEKEAEEPEKPTKEKEEEDMELTAMLGRNNGESSRKKDEEEVQSKHRLIPLGRKIYEFYNAPIVKFWFYTLAYIGYLMLFNYIVLVKMERWPSTQEWIVISYIFTLGIEKMREILMSEPGKLLQKVKVWLQEYWNVTDLIAILLFSVGMILRLQDQPFRSDGRVIYCVNIIYWYIRLLDIFGVNKYLGPYVMMIGKMMIDMMYFVIIMLVVLMSFGVARQAILFPNEEPSWKLAKNIFYMPYWMIYGEVFADQIDPPCGQNETREDGKIIQLPPCKTGAWIVPAIMACYLLVANILLVNLLIAVFNNTFFEVKSISNQVWKFQRYQLIMTFHERPVLPPPLIIFSHMTMIFQHLCCRWRKHESDPDERDYGLKLFITDDELKKVHDFEEQCIEEYFREKDDRFNSSNDERIRVTSERVENMSMRLEEVNEREHSMKASLQTVDIRLAQLEDLIGRMATALERLTGLERAESNKIRSRTSSDCTDAAYIVRQSSFNSQEGNTFKLQESIDPAGEETMSPTSPTLMPRMRSHSFYSVNMKDKGGIEKLESIFKERSLSLHRATSSHSVAKEPKAPAAPANTLAIVPDSRRPSSCIDIYVSAMDELHCDIDPLDNSVNILGLGEPSFSTPVPSTAPSSSAYATLAPTDRPPSRSIDFEDITSMDTRSFSSDYTHLPECQNPWDSEPPMYHTIERSKSSRYLATTPFLLEEAPIVKSHSFMFSPSRSYYANFGVPVKTAEYTSITDCIDTRCVNAPQAIADRAAFPGGLGDKVEDLTCCHPEREAELSHPSSDSEENEAKGRRATIAISSQEGDNSERTLSNNITVPKIERANSYSAEEPSAPYAHTRKSFSISDKLDRQRNTASLRNPFQRSKSSKPEGRGDSLSMRRLSRTSAFQSFESKHN

SEQ ID NO: 836 - DNA, 1303 bp, Homo sapiens
agctgcagcaaaatgaaagcaacaggagctgctccggggactgcttttgccagtacccagaatcagtgctcaggctcagaaatcctggatagaaagagcattttataaaagagaatgtgtccacatcatacccagcaccaaagacccccataggtgttgctgtgggcgtctgataggccagcatgttggcctcacccccagtatctccgtgcttcagaatgagaaaaatgaaagtcgcctctcccgaaatgacatccagtctgaaaagtggtccatcagcaaacacactcaactcagccctacggatgcttttgggaccattgagttccaaggaggtggccattccaacaaagccatgtatgtgcgagtatcttttgatacaaaacctgatctcctcttacacctgatgaccaaggaatggcagttggagcttcccaagcttctcatctctgtccatgggggcctgcagaactttgaactccagccaaaactcaagcaagtctttgggaaagggctcatcaaagcagcaatgacaactggagcgtggatattcactggaggggttaacacaggtgttattcgtcatgttggcgatgccttgaaggatcatgcctctaagtctcgaggaaagatatgcaccataggtattgccccctggggaattgtggaaaaccaggaggacctcattggaagagatgttgtccggccataccagaccatgtccaatcccatgagcaagctcactgttctcaacagcatgcattcccacttcattctggctgacaacgggaccactggaaaatatggagcagaggtgaaacttcgaagacaactggaaaagcatatttcactccagaagataaacacaagaatcggtcaaggtgttcctgtggtggcactcatagtggaaggaggacccaatgtgatctcgattgttttggagtaccttcgagacacccctcccgtgccagtggttgtctgtgatgggagtggacgggcatcggacatcctggcctttgggcataaatactcagaagaaggcgggtaggtaactttccaggccccatggaagaaccctaaagcctgtttggaaacgagggtatgagtggattatgttttcagtagctcaaccaagacctcaaatcaaaacaagctatgaacaaattgtctaaaaaatgtctgtcatgggagggctgtggtgaagaacagagaaacatattctaaatgtcctgtgaagtgggaaattctatgaaagctacacggataataaaaagggtgaggaaaagaaaaaaaaaaaaaaaaa

SEQ ID NO: 837 - protein, 230 aa, Homo sapiens
MYVRVSFDTKPDLLLHLMTKEWQLELPKLLISVHGGLQNFELQPKLKQVFGKGLIKAAMTTGAWIFTGGVNTGVIRHVGDALKDHASKSRGKICTIGIAPWGIVENQEDLIGRDVVRPYQTMSNPMSKLTVLNSMHSHFILADNGTTGKYGAEVKLRRQLEKHISLQKINTRIGQGVPVVALIVEGGPNVISIVLEYLRDTPPVPVVVCDGSGRASDILAFGHKYSEEGG

SEQ ID NO: 838 - DNA, 2328 bp, Homo sapiens
aattctctaggttgcaaattgggaggattaggaacaagtaagagagttccatgcaggatggacaagaaaaaaaagttttataccaaaaattgtatttcatggcattagggcagtctactggggtaaggcactatgcagtactaggcaattagaattctattcactagctatgtgcacaagcggctcctgacctggtcattttggctgtaaaactattcatgcctggacagtttttgacggtgcagtcttgctatatggtgtgagaaatggctgtaggaaacaacactcaacgaagttattccatcatcccgtgttttatatttgttgagcttgtcatcatggctgggacagtgctgcttgcctactacttcgaatgcactgacacttttcaggtgcatatccaaggattcttctgtcaggacggagacttaatgaagccttacccagggacagaggaagaaagcttcatcacccctctggtgctctattgtgtgctggctgccaccccaactgctattatttttattggtgagatatccatgtatttcataaaatcaacaagagaatccctgattgctcaggagaaaacaattctgaccggagaatgctgttacctgaaccccttacttcgaaggatcataagattcacaggggtgtttgcatttggactttttgctactgacatttttgtaaacgccggacaagtggtcactgggcacttaacgccatacttcctgactgtgtgcaagccaaactacaccagtgcagactgccaagcgcaccaccagtttataaacaatgggaacatttgtactggggacctggaagtgatagaaaaggctcggagatcctttccctccaaacacgctgctctgagcatttactccgccttatatgccacgatgtatattacaagcacaatcaagacgaagagcagtcgactggccaagccggtgctgtgcctcggaactctctgcacagccttcctgacaggcctcaaccgggtctctgagtatcggaaccactgctcggacgtgattgctggtttcatcctgggcactgcagtggccctgtttctgggaatgtgtgtggttcataactttaaaggaacgcaaggatctccttccaaacccaagcctgaggatccccgtggagtacccctaatggctttcccaaggatagaaagccctctggaaaccttaagtgcacagaatcactctgcgtccatgaccgaagttacctgagacgactgatgtgtcacaagctgttttttaaaatcatcttccaattctatacttcaaaacacacagttgctcaatgtcaaactgtgatgacaaatattacgtttatctagttagaagctaatgttttgtacattttttgtatgaggaagtgatgtagcttgccctgattttttttttttttttttggtcagctttaatatatttatgccagaattttaaaaccaacaaaattttcttgttcaagcgtgcattgaagaaccacatttattcaatggttgacgttgttttgtgatatttgtacacaaattttcttttctcagttttataaacacagaatataacaattcactttaaacttttattaccacagttgctgcctcctccagaatttttgaattttaataaaaggcaaacttttgagctgcaggaaggacaatgttggttaataataaatctcaaagtcaattgtagaaaaaaaattgtcttcaaaaagaatgttgcactctgatctcttaacaaattgttacgttcaaagtttaaagtgatatattaacaaagtcacctagttatacaaacaattgtcagagaattctggatttggagggtattggggttatatgattctttcttagataatggcctctactaaataactcaagatctttctggaatgtcttctggcaggcaggtgccactgtcagcttttctccaaaaagcagccaacatcagcctcccctgtcaactcaacagttttgtatctcatattatatggactttatatgaaaatgaatattttacagtttgcacagtattattttacagaaaaggaatcagagaatctacaacatagggccccagaacaacagtttcactttgtggcttttaattattctagaattttaactgcatctcatttttctagcatggtgagaactaatatgtaactcctttgattgaaggagctcttttgtccgtacctatcagaatgttttcttgacacttccatgttggctcttctcagctttttttgtacatattttttttttctaaagagaagaaaaagttatcacaaaatgtaaaaaaa

SEQ ID NO: 839 - protein, 325 aa, Homo sapiens
MAVGNNTQRSYSIIPCFIFVELVIMAGTVLLAYYFECTDTFQVHIQGFFCQDGDLMKPYPGTEEESFITPLVLYCVLAATPTAIIFIGEISMYFIKSTRESLIAQEKTILTGECCYLNPLLRRIIRFTGVFAFGLFATDIFVNAGQVVTGHLTPYFLTVCKPNYTSADCQAHHQFINNGNICTGDLEVIEKARRSFPSKHAALSIYSALYATMYITSTIKTKSSRLAKPVLCLGTLCTAFLTGLNRVSEYRNHCSDVIAGFILGTAVALFLGMCVVHNFKGTQGSPSKPKPEDPRGVPLMAFPRIESPLETLSAQNHSASMTEVT

SEQ ID NO: 840 - DNA, 2461 bp, Homo sapiens
ttaaacaaacaggagatcctgaaacctggaccctgtgcaagctgcagcgccaggaggaggcagcggaggaagcagagcgcgggatgggcgcccagcggcatctgtgatcccgcgcacctccgccccacgggcgcgcgcacaaacacggacacacacatacacacactcgcgcacacactcgcacaaacacacactcgtacacgcccgcgccgctcgctcgccggcttgctctcccacgcaagcggaatgcagcagcgcctggagagcgtgtctcggaccgccgcctgaatgtacctcgctcccgggagccggacggcccagtagggcgcactggaggacgctccgctgcgggagcctggacagtttttgacggtgcagtcttgctatatggtgtgagaaatggctgtaggaaacaacactcaacgaagttattccatcatcccgtgttttatatttgttgagcttgtcatcatggctgggacagtgctgcttgcctactacttcgaatgcactgacacttttcaggtgcatatccaaggattcttctgtcaggacggagacttaatgaagccttacccagggacagaggaagaaagcttcatcacccctctggtgctctattgtgtgctggctgccaccccaactgctattatttttattggtgagatatccatgtatttcataaaatcaacaagagaatccctgattgctcaggagaaaacaattctgaccggagaatgctgttacctgaaccccttacttcgaaggatcataagattcacaggggtgtttgcatttggactttttgctactgacatttttgtaaacgccggacaagtggtcactgggcacttaacgccatacttcctgactgtgtgcaagccaaactacaccagtgcagactgccaagcgcaccaccagtttataaacaatgggaacatttgtactggggacctggaagtgatagaaaaggctcggagatcctttccctccaaacacgctgctctgagcatttactccgccttatatgccacgatgtatattacaagcacaatcaagacgaagagcagtcgactggccaagccggtgctgtgcctcggaactctctgcacagccttcctgacaggcctcaaccgggtctctgagtatcggaaccactgctcggacgtgattgctggtttcatcctgggcactgcagtggccctgtttctgggaatgtgtgtggttcataactttaaaggaacgcaaggatctccttccaaacccaagcctgaggatccccgtggagtacccctaatggctttcccaaggatagaaagccctctggaaaccttaagtgcacagaatcactctgcgtccatgaccgaagttacctgagacgactgatgtgtcacaagctgttttttaaaatcatcttccaattctatacttcaaaacacacagttgctcaatgtcaaactgtgatgacaaatattacgtttatctagttagaagctaatgttttgtacattttttgtatgaggaagtgatgtagcttgccctgattttttttttttttttttggtcagctttaatatatttatgccagaattttaaaaccaacaaaattttcttgttcaagcgtgcattgaagaaccacatttattcaatggttgacgttgttttgtgatatttgtacacaaattttcttttctcagttttataaacacagaatataacaattcactttaaacttttattaccacagttgctgcctcctccagaatttttgaattttaataaaaggcaaacttttgagctgcaggaaggacaatgttggttaataataaatctcaaagtcaattgtagaaaaaaaattgtcttcaaaaagaatgttgcactctgatctcttaacaaattgttacgttcaaagtttaaagtgatatattaacaaagtcacctagttatacaaacaattgtcagagaattctggatttggagggtattggggttatatgattctttcttagataatggcctctactaaataactcaagatctttctggaatgtcttctggcaggcaggtgccactgtcagcttttctccaaaaagcagccaacatcagcctcccctgtcaactcaacagttttgtatctcatattatatggactttatatgaaaatgaatattttacagtttgcacagtattattttacagaaaaggaatcagagaatctacaacatagggccccagaacaacagtttcactttgtggcttttaattattctagaattttaactgcatctcatttttctagcatggtgagaactaatatgtaactcctttgattgaaggagctcttttgtccgtacctatcagaatgttttcttgacacttccatgttggctcttctcagctttttttgtacatattttttttttctaaagagaagaaaaagttatcacaaaatgtaaaaaaa

SEQ ID NO: 841 - protein, 325 aa, Homo sapiens; identical to SEQ ID NO: 839

SEQ ID NO: 842 - DNA, 10412 bp, Homo sapiens
gtaattgcgagcgagagtgagtggggccgggacccgcagagccgagccgacccttctctcccgggctgcggcagggcagggcggggagctccgcgcaccaacagagccggttctcagggcgctttgctccttgttttttccccggttctgttttctccccttctccggaaggcttgtcaaggggtaggagaaagagacgcaaacacaaaagtggaaaacagttaatgaccagccacggcgtccctgctgtgagctctggccgctgccttccagggctcccgagccacacgctgggggtgctggctgagggaacatggcttgttggcctcagctgaggttgctgctgtggaagaacctcactttcagaagaagacaaacatgtcagctgctgctggaagtggcctggcctctatttatcttcctgatcctgatctctgttcggctgagctacccaccctatgaacaacatgaatgccattttccaaataaagccatgccctctgcaggaacacttccttgggttcaggggattatctgtaatgccaacaacccctgtttccgttacccgactcctggggaggctcccggagttgttggaaactttaacaaatccattgtggctcgcctgttctcagatgctcggaggcttcttttatacagccagaaagacaccagcatgaaggacatgcgcaaagttctgagaacattacagcagatcaagaaatccagctcaaacttgaagcttcaagatttcctggtggacaatgaaaccttctctgggttcctgtatcacaacctctctctcccaaagtctactgtggacaagatgctgagggctgatgtcattctccacaaggtatttttgcaaggctaccagttacatttgacaagtctgtgcaatggatcaaaatcagaagagatgattcaacttggtgaccaagaagtttctgagctttgtggcctaccaagggagaaactggctgcagcagagcgagtacttcgttccaacatggacatcctgaagccaatcctgagaacactaaactctacatctcccttcccgagcaaggagctggctgaagccacaaaaacattgctgcatagtcttgggactctggcccaggagctgttcagcatgagaagctggagtgacatgcgacaggaggtgatgtttctgaccaatgtgaacagctccagctcctccacccaaatctaccaggctgtgtctcgtattgtctgcgggcatcccgagggaggggggctgaagatcaagtctctcaactggtatgaggacaacaactacaaagccctctttggaggcaatggcactgaggaagatgctgaaaccttctatgacaactctacaactccttactgcaatgatttgatgaagaatttggagtctagtcctctttcccgcattatctggaaagctctgaagccgctgctcgttgggaagatcctgtatacacctgacactccagccacaaggcaggtcatggctgaggtgaacaagaccttccaggaactggctgtgttccatgatctggaaggcatgtgggaggaactcagccccaagatctggaccttcatggagaacagccaagaaatggaccttgtccggatgctgttggacagcagggacaatgaccacttttgggaacagcagttggatggcttagattggacagcccaagacatcgtggcgtttttggccaagcacccagaggatgtccagtccagtaatggttctgtgtacacctggagagaagctttcaacgagactaaccaggcaatccggaccatatctcgcttcatggagtgtgtcaacctgaacaagctagaacccatagcaacagaagtctggctcatcaacaagtccatggagctgctggatgagaggaagttctgggctggtattgtgttcactggaattactccaggcagcattgagctgccccatcatgtcaagtacaagatccgaatggacattgacaatgtggagaggacaaataaaatcaaggatgggtactgggaccctggtcctcgagctgacccctttgaggacatgcggtacgtctgggggggcttcgcctacttgcaggatgtggtggagcaggcaatcatcagggtgctgacgggcaccgagaagaaaactggtgtctatatgcaacagatgccctatccctgttacgttgatgacatctttctgcgggtgatgagccggtcaatgcccctcttcatgacgctggcctggatttactcagtggctgtgatcatcaagggcatcgtgtatgagaaggaggcacggctgaaagagaccatgcggatcatgggcctggacaacagcatcctctggtttagctggttcattagtagcctcattcctcttcttgtgagcgctggcctgctagtggtcatcctgaagttaggaaacctgctgccctacagtgatcccagcgtggtgtttgtcttcctgtccgtgtttgctgtggtgacaatcctgcagtgcttcctgattagcacactcttctccagagccaacctggcagcagcctgtgggggcatcatctacttcacgctgtacctgccctacgtcctgtgtgtggcatggcaggactacgtgggcttcacactcaagatcttcgctagcctgctgtctcctgtggcttttgggtttggctgtgagtactttgccctttttgaggagcagggcattggagtgcagtgggacaacctgtttgagagtcctgtggaggaagatggcttcaatctcaccacttcggtctccatgatgctgtttgacaccttcctctatggggtgatgacctggtacattgaggctgtctttccaggccagtacggaattcccaggccctggtattttccttgcaccaagtcctactggtttggcgaggaaagtgatgagaagagccaccctggttccaaccagaagagaatatcagaaatctgcatggaggaggaacccacccacttgaagctgggcgtgtccattcagaacctggtaaaagtctaccgagatgggatgaaggtggctgtcgatggcctggcactgaatttttatgagggccagatcacctccttcctgggccacaatggagcggggaagacgaccaccatgtcaatcctgaccgggttgttccccccgacctcgggcaccgcctacatcctgggaaaagacattcgctctgagatgagcaccatccggcagaacctgggggtctgtccccagcataacgtgctgtttgacatgctgactgtcgaagaacacatctggttctatgcccgcttgaaagggctctctgagaagcacgtgaaggcggagatggagcagatggccctggatgttggtttgccatcaagcaagctgaaaagcaaaacaagccagctgtcaggtggaatgcagagaaagctatctgtggccttggcctttgtcgggggatctaaggttgtcattctggatgaacccacagctggtgtggacccttactcccgcaggggaatatgggagctgctgctgaaataccgacaaggccgcaccattattctctctacacaccacatggatgaagcggacgtcctgggggacaggattgccatcatctcccatgggaagctgtgctgtgtgggctcctccctgtttctgaagaaccagctgggaacaggctactacctgaccttggtcaagaaagatgtggaatcctccctcagttcctgcagaaacagtagtagcactgtgtcatacctgaaaaaggaggacagtgtttctcagagcagttctgatgctggcctgggcagcgaccatgagagtgacacgctgaccatcgatgtctctgctatctccaacctcatcaggaagcatgtgtctgaagcccggctggtggaagacatagggcatgagctgacctatgtgctgccatatgaagctgctaaggagggagcctttgtggaactctttcatgagattgatgaccggctctcagacctgggcatttctagttatggcatctcagagacgaccctggaagaaatattcctcaaggtggccgaagagagtggggtggatgctgagacctcagatggtaccttgccagcaagacgaaacaggcgggccttcggggacaagcagagctgtcttcgcccgttcactgaagatgatgctgctgatccaaatgattctgacatagacccagaatccagagagacagacttgctcagtgggatggatggcaaagggtcctaccaggtgaaaggctggaaacttacacagcaacagtttgtggcccttttgtggaagagactgctaattgccagacggagtcggaaaggattttttgctcagattgtcttgccagctgtgtttgtctgcattgcccttgtgttcagcctgatcgtgccaccctttggcaagtaccccagcctggaacttcagccctggatgtacaacgaacagtacacatttgtcagcaatgatgctcctgaggacacgggaaccctggaactcttaaacgccctcaccaaagaccctggcttcgggacccgctgtatggaaggaaacccaatcccagacacgccctgccaggcaggggaggaagagtggaccactgccccagttccccagaccatcatggacctcttccagaatgggaactggacaatgcagaacccttcacctgcatgccagtgtagcagcgacaaaatcaagaagatgctgcctgtgtgtcccccaggggcaggggggctgcctcctccacaaagaaaacaaaacactgcagatatccttcaggacctgacaggaagaaacatttcggattatctggtgaagacgtatgtgcagatcatagccaaaagcttaaagaacaagatctgggtgaatgagtttaggtatggcggcttttccctgggtgtcagtaatactcaagcacttcctccgagtcaagaagttaatgatgccatcaaacaaatgaagaaacacctaaagctggccaaggacagttctgcagatcgatttctcaacagcttgggaagatttatgacaggactggacaccaaaaataatgtcaaggtgtggttcaataacaagggctggcatgcaatcagctctttcctgaatgtcatcaacaatgccattctccgggccaacctgcaaaagggagagaaccctagccattatggaattactgctttcaatcatcccctgaatctcaccaagcagcagctctcagaggtggctctgatgaccacatcagtggatgtccttgtgtccatctgtgtcatctttgcaatgtccttcgtcccagccagctttgtcgtattcctgatccaggagcgggtcagcaaagcaaaacacctgcagttcatcagtggagtgaagcctgtcatctactggctctctaattttgtctgggatatgtgcaattacgttgtccctgccacactggtcattatcatcttcatctgcttccagcagaagtcctatgtgtcctccaccaatctgcctgtgctagcccttctacttttgctgtatgggtggtcaatcacacctctcatgtacccagcctcctttgtgttcaagatccccagcacagcctatgtggtgctcaccagcgtgaacctcttcattggcattaatggcagcgtggccacctttgtgctggagctgttcaccgacaataagctgaataatatcaatgatatcctgaagtccgtgttcttgatcttcccacatttttgcctgggacgagggctcatcgacatggtgaaaaaccaggcaatggctgatgccctggaaaggtttggggagaatcgctttgtgtcaccattatcttgggacttggtgggacgaaacctcttcgccatggccgtggaaggggtggtgttcttcctcattactgttctgatccagtacagattcttcatcaggcccagacctgtaaatgcaaagctatctcctctgaatgatgaagatgaagatgtgaggcgggaaagacagagaattcttgatggtggaggccagaatgacatcttagaaatcaaggagttgacgaagatatatagaaggaagcggaagcctgctgttgacaggatttgcgtgggcattcctcctggtgagtgctttgggctcctgggagttaatggggctggaaaatcatcaactttcaagatgttaacaggagataccactgttaccagaggagatgctttccttaacaaaaatagtatcttatcaaacatccatgaagtacatcagaacatgggctactgccctcagtttgatgccatcacagagctgttgactgggagagaacacgtggagttctttgcccttttgagaggagtcccagagaaagaagttggcaaggttggtgagtgggcgattcggaaactgggcctcgtgaagtatggagaaaaatatgctggtaactatagtggaggcaacaaacgcaagctctctacagccatggctttgatcggcgggcctcctgtggtgtttctggatgaacccaccacaggcatggatcccaaagcccggcggttcttgtggaattgtgccctaagtgttgtcaaggaggggagatcagtagtgcttacatctcatagtatggaagaatgtgaagctctttgcactaggatggcaatcatggtcaatggaaggttcaggtgccttggcagtgtccagcatctaaaaaataggtttggagatggttatacaatagttgtacgaatagcagggtccaacccggacctgaagcctgtccaggatttctttggacttgcatttcctggaagtgttctaaaagagaaacaccggaacatgctacaataccagcttccatcttcattatcttctctggccaggatattcagcatcctctcccagagcaaaaagcgactccacatagaagactactctgtttctcagacaacacttgaccaagtatttgtgaactttgccaaggaccaaagtgatgatgaccacttaaaagacctctcattacacaaaaaccagacagtagtggacgttgcagttctcacatcttttctacaggatgagaaagtgaaagaaagctatgtatgaagaatcctgttcatacggggtggctgaaagtaaagaggaactagactttcctttgcaccatgtgaagtgttgtggagaaaagagccagaagttgatgtgggaagaagtaaactggatactgtactgatactattcaatgcaatgcaattcaatgcaatgaaaacaaaattccattacaggggcagtgcctttgtagcctatgtcttgtatggctctcaagtgaaagacttgaatttagttttttacctatacctatgtgaaactctattatggaacccaatggacatatgggtttgaactcacacttttttttttttttttgttcctgtgtattctcattggggttgcaacaataattcatcaagtaatcatggccagcgattattgatcaaaatcaaaaggtaatgcacatcctcattcactaagccatgccatgcccaggagactggtttcccggtgacacatccattgctggcaatgagtgtgccagagttattagtgccaagtttttcagaaagtttgaagcaccatggtgtgtcatgctcacttttgtgaaagctgctctgctcagagtctatcaacattgaatatcagttgacagaatggtgccatgcgtggctaacatcctgctttgattccctctgataagctgttctggtggcagtaacatgcaacaaaaatgtgggtgtctccaggcacgggaaacttggttccattgttatattgtcctatgcttcgagccatgggtctacagggtcatccttatgagactcttaaatatacttagatcctggtaagaggcaaagaatcaacagccaaactgctggggctgcaagctgctgaagccagggcatgggattaaagagattgtgcgttcaaacctagggaagcctgtgcccatttgtcctgactgtctgctaacatggtacactgcatctcaagatgtttatctgacacaagtgtattatttctggctttttgaattaatctagaaaatgaaaagatggagttgtattttgacaaaaatgtttgtactttttaatgttatttggaattttaagttctatcagtgacttctgaatccttagaatggcctctttgtagaaccctgtggtatagaggagtatggccactgccccactatttttattttcttatgtaagtttgcatatcagtcatgactagtgcctagaaagcaatgtgatggtcaggatctcatgacattatatttgagtttctttcagatcatttaggatactcttaatctcacttcatcaatcaaatattttttgagtgtatgctgtagctgaaagagtatgtacgtacgtataagactagagagatattaagtctcagtacacttcctgtgccatgttattcagctcactggtttacaaatataggttgtcttgtggttgtaggagcccactgtaacaatactgggcagcctttttttttttttttttaattgcaacaatgcaaaagccaagaaagtataagggtcacaagtctaaacaatgaattcttcaacagggaaaacagctagcttgaaaacttgctgaaaaacacaacttgtgtttatggcatttagtaccttcaaataattggctttgcagatattggataccccattaaatctgacagtctcaaatttttcatctcttcaatcactagtcaagaaaaatataaaaacaacaaatacttccatatggagcatttttcagagttttctaacccagtcttatttttctagtcagtaaacatttgtaaaaatactgtttcactaatacttactgttaactgtcttgagagaaaagaaaaatatgagagaactattgtttggggaagttcaagtgatctttcaatatcattactaacttcttccactttttccagaatttgaatattaacgctaaaggtgtaagacttcagatttcaaattaatctttctatattttttaaatttacagaatattatataacccactgctgaaaaagaaaaaaatgattgttttagaagttaaagtcaatattgattttaaatataagtaatgaaggcatatttccaataactagtgatatggcatcgttgcattttacagtatcttcaaaaatacagaatttatagaataatttctcctcatttaatatttttcaaaatcaaagttatggtttcctcattttactaaaatcgtattctaattcttcattatagtaaatctatgagcaactccttacttcggttcctctgatttcaaggccatattttaaaaaatcaaaaggcactgtgaactattttgaagaaaacacaacattttaatacagattgaaaggacctcttctgaagctagaaacaatctatagttatacatcttcattaatactgtgttaccttttaaaatagtaattttttacattttcctgtgtaaacctaattgtggtagaaatttttaccaactctatactcaatcaagcaaaatttctgtatattccctgtggaatgtacctatgtgagtttcagaaattctcaaaatacgtgttcaaaaatttctgcttttgcatctttgggacacctcagaaaacttattaacaactgtgaatatgagaaatacagaagaaaataataagccctctatacataaatgcccagcacaattcattgttaaaaaacaaccaaacctcacactactgtatttcattatctgtactgaaagcaaatgctttgtgactattaaatgttgcacatcattcattcactgtatagtaatcattgactaaagccatttgtctgtgttttcttcttgtggttgtatatatcaggtaaaatattttccaaagagccatgtgtcatgtaatactgaaccactttgatattgagacattaatttgtacccttgttattatctactagtaataatgtaatactgtagaaatattgctctaattcttttcaaaattgttgcatcccccttagaatgtttctatttccataaggatttaggtatgctattatcccttcttataccctaagatgaagctgtttttgtgctctttgttcatcattggccctcattccaagcactttacgctgtctgtaatgggatctatttttgcactggaatatctgagaattgcaaaactagacaaaagtttcacaacagatttctaagttaaatcattttcattaaaaggaaaaaagaaaaaaaattttgtatgtcaataactttatatgaagtattaaaatgcatatttctatgttgtaatataatgagtcacaaaataaagctgtgacagttctgttggtctacagaaa

SEQ ID NO: 843 - protein, 2261 aa, Homo sapiens
MACWPQLRLLLWKNLTFRRRQTCQLLLEVAWPLFIFLILISVRLSYPPYEQHECHFPNKAMPSAGTLPWVQGIICNANNPCFRYPTPGEAPGVVGNFNKSIVARLFSDARRLLLYSQKDTSMKDMRKVLRTLQQIKKSSSNLKLQDFLVDNETFSGFLYHNLSLPKSTVDKMLRADVILHKVFLQGYQLHLTSLCNGSKSEEMIQLGDQEVSELCGLPREKLAAAERVLRSNMDILKPILRTLNSTSPFPSKELAEATKTLLHSLGTLAQELFSMRSWSDMRQEVMFLTNVNSSSSSTQIYQAVSRIVCGHPEGGGLKIKSLNWYEDNNYKALFGGNGTEEDAETFYDNSTTPYCNDLMKNLESSPLSRIIWKALKPLLVGKILYTPDTPATRQVMAEVNKTFQELAVFHDLEGMWEELSPKIWTFMENSQEMDLVRMLLDSRDNDHFWEQQLDGLDWTAQDIVAFLAKHPEDVQSSNGSVYTWREAFNETNQAIRTISRFMECVNLNKLEPIATEVWLINKSMELLDERKFWAGIVFTGITPGSIELPHHVKYKIRMDIDNVERTNKIKDGYWDPGPRADPFEDMRYVWGGFAYLQDVVEQAIIRVLTGTEKKTGVYMQQMPYPCYVDDIFLRVMSRSMPLFMTLAWIYSVAVIIKGIVYEKEARLKETMRIMGLDNSILWFSWFISSLIPLLVSAGLLVVILKLGNLLPYSDPSVVFVFLSVFAVVTILQCFLISTLFSRANLAAACGGIIYFTLYLPYVLCVAWQDYVGFTLKIFASLLSPVAFGFGCEYFALFEEQGIGVQWDNLFESPVEEDGFNLTTSVSMMLFDTFLYGVMTWYIEAVFPGQYGIPRPWYFPCTKSYWFGEESDEKSHPGSNQKRISEICMEEEPTHLKLGVSIQNLVKVYRDGMKVAVDGLALNFYEGQITSFLGHNGAGKTTTMSILTGLFPPTSGTAYILGKDIRSEMSTIRQNLGVCPQHNVLFDMLTVEEHIWFYARLKGLSEKHVKAEMEQMALDVGLPSSKLKSKTSQLSGGMQRKLSVALAFVGGSKVVILDEPTAGVDPYSRRGIWELLLKYRQGRTIILSTHHMDEADVLGDRIAIISHGKLCCVGSSLFLKNQLGTGYYLTLVKKDVESSLSSCRNSSSTVSYLKKEDSVSQSSSDAGLGSDHESDTLTIDVSAISNLIRKHVSEARLVEDIGHELTYVLPYEAAKEGAFVELFHEIDDRLSDLGISSYGISETTLEEIFLKVAEESGVDAETSDGTLPARRNRRAFGDKQSCLRPFTEDDAADPNDSDIDPESRETDLLSGMDGKGSYQVKGWKLTQQQFVALLWKRLLIARRSRKGFFAQIVLPAVFVCIALVFSLIVPPFGKYPSLELQPWMYNEQYTFVSNDAPEDTGTLELLNALTKDPGFGTRCMEGNPIPDTPCQAGEEEWTTAPVPQTIMDLFQNGNWTMQNPSPACQCSSDKIKKMLPVCPPGAGGLPPPQRKQNTADILQDLTGRNISDYLVKTYVQIIAKSLKNKIWVNEFRYGGFSLGVSNTQALPPSQEVNDAIKQMKKHLKLAKDSSADRFLNSLGRFMTGLDTKNNVKVWFNNKGWHAISSFLNVINNAILRANLQKGENPSHYGITAFNHPLNLTKQQLSEVALMTTSVDVLVSICVIFAMSFVPASFVVFLIQERVSKAKHLQFISGVKPVIYWLSNFVWDMCNYVVPATLVIIIFICFQQKSYVSSTNLPVLALLLLLYGWSITPLMYPASFVFKIPSTAYVVLTSVNLFIGINGSVATFVLELFTDNKLNNINDILKSVFLIFPHFCLGRGLIDMVKNQAMADALERFGENRFVSPLSWDLVGRNLFAMAVEGVVFFLITVLIQYRFFIRPRPVNAKLSPLNDEDEDVRRERQRILDGGGQNDILEIKELTKIYRRKRKPAVDRICVGIPPGECFGLLGVNGAGKSSTFKMLTGDTTVTRGDAFLNKNSILSNIHEVHQNMGYCPQFDAITELLTGREHVEFFALLRGVPEKEVGKVGEWAIRKLGLVKYGEKYAGNYSGGNKRKLSTAMALIGGPPVVFLDEPTTGMDPKARRFLWNCALSVVKEGRSVVLTSHSMEECEALCTRMAIMVNGRFRCLGSVQHLKNRFGDGYTIVVRIAGSNPDLKPVQDFFGLAFPGSVLKEKHRNMLQYQLPSSLSSLARIFSILSQSKKRLHIEDYSVSQTTLDQVFVNFAKDQSDDDHLKDLSLHKNQTVVDVAVLTSFLQDEKVKESYV

SEQ ID NO: 844 - DNA, 4130 bp, Homo sapiens
gggggcacgtctcggcgagtcacgatgatggcggccaccatcctgtggtgagctagcggattccctgcttgtctcgccgaccccctcgcgccttctgcagactccgtggctggcgctcggcgcgtgaggaagcacggcggcccgagttcgcggggaaggccgcagtcgcggaggcagcggcgcggtccggggcacgggctgggggagaggccgctccgctgggcgaatgtgacaagcccccacccccaccgccttcctccccagagcgcgaggagcgcgggcgaccccggggccccgccaggccacagaccccgcccagcggccagcacccggcgcaggcccggcagccgagctgcgcggcggcaccatgcaggtcaccctgaagaccctccagcagcagaccttcaagatagacattgaccccgaggagacggtgaaagcactgaaagagaagattgaatctgaaaaggggaaagatgcctttccagtagcaggtcaaaaattaatttatgcaggcaaaatcctcaatgatgatactgctctcaaagaatataaaattgatgagaaaaactttgtggtggttatggtgaccaaacccaaagcagtgtccacaccagcaccagctacaactcagcagtcagctcctgccagcactacagcagttacttcctccaccaccacaactgtggctcaggctccaacccctgtccctgccttggcccccacttccacacctgcatccatcactccagcatcagcgacagcatcttctgaacctgcacctgctagtgcagctaaacaagagaagcctgcagaaaagccagcagagacaccagtggctactagcccaacagcaactgacagtacatcgggtgattcttctcggtcaaacctttttgaagatgcaacgagtgcacttgtgacgggtcagtcttacgagaatatggtaactgagatcatgtcaatgggctatgaacgagagcaagtaattgcagccctgagagccagtttcaacaaccctgacagagcagtggagtatcttttaatgggaatccctggagatagagaaagtcaggctgtggttgacccccctcaagcagctagtactggggctcctcagtcttcagcagtggctgcagctgcagcaactacgacagcaacaactacaacaacaagttctggaggacatccccttgaatttttacggaatcagcctcagtttcaacagatgagacaaattattcagcagaatccttccttgcttccagcgttactacagcagataggtcgagagaatcctcaattacttcagcaaattagccaacaccaggagcattttattcagatgttaaatgaaccagttcaagaagctggtggtcaaggaggaggaggtggaggtggcagtggaggaattgcagaagctggaagtggtcatatgaactacattcaagtaacacctcaggaaaaagaagctatagaaaggttaaaggcattaggatttcctgaaggacttgtgatacaagcgtattttgcttgtgagaagaatgagaatttggctgccaattttcttctacagcagaactttgatgaagattgaaagggacttttttatatctcacacttcacaccagtgcattacactaacttgttcactggattgtctgggatgacttgggctcatatccacaatacttggtataaggtagtagattgttgggggtggggagggagggatctaggatacagggcagggataaatacagtgcatgtctgcttcaattagcagatgccgcaactccacacagtgtgtaaaatatatacaaccaaaaatcagcttttgcaggtctttatttcttctgtaaaacagtaggtaacttttcctaggtttcactctttttagtgtactagatccagaaacttagtgtaatgccctgctttatatttctttgacttaacattggtttcagaaagaatcttagctacctagaatttacagtctctgtttcatggcaacactggataatggctttgtgaaatttaaaaaatttttgtagcgactgtaaacagaaatgccaaattgatggttaattgttgctgcttcaaaaataagtataaaattaatatgtaaggaagcccattctttcatgttaaatacttggggtgggaggggagaaagggaaccttttcttaaaatgaaaataattactgctattttaaaatttcttgatcattgaatgtgagacccttctaacatgatttgagaagctgtacaagtataggcagagttattttcctgtttacattttttttttgttttggggaaaaaattggtaggtgtctaattactgtttacttcattgttatattgcagtaaaagttttaaaacaaccattgcatgtttgcttttgatgtatccctttgtgaaattagcacttttggggccaatggagaaatgcagcattcactctccctgtcttttccccttccctcagcagaaacgtgtttatcagcaagtcgtgagtcaaactgctgccttttaaaaaacccacaaaatgctgattcagttcaaaattaatgcaaatgtttcaaaactgggtttctgatatttgtaaatgtgtttctttattagataagagtgtattaccattaaagtcattagtataatattgctttcaaaaagaaatggtagacaaaactataatccagcatcttttattgcattggaaagactggcaaagtcttttggatgggttgggagatgtggctggaaagtactttggaaaatatacaatcaagatatctcatggcatattaaaagaaaaatcttaatagcagtgttggcttttatttggattttttcatctcagttttttctgtggaatctccttcattggcattgttatttaatcataaacggggcagatgtctacttgttcagtttttcaaatctgttttcctgagtataaataagagtatttaaagaaataatttggattgcttttgttttttgtttccttttttttaaccatctgatactaagaagatgaatttgcacagatttctctgcataatttctcaatatctttagcacagtatggtgatgatgacttttaagcatttacatcacgtactcataacctattatgaaaataaatgaaactggctgggtatggtggctcatgcctataatcccagcactttgggaggccgaggtgggcagatcacttgaggccaggagattgagaccagcctgaccgtcatggcgaaaccccgtctatactaaaaatacaaaaaatagccaggcatggtggcgcacgcctgtggtcccagctacttgggaggctgaggcatgagaattgcttgaacccgggaagtgaaggttgccgtgagctgagatcacaccactgccataaacatgacaggcttttggactttgtattacctgtatgttttataatggatcatgcataatttctcaggagaataaaatgagaattcatatatacgttcatctttcaagtcagagcaatgagttgggaaaagaggtggcatttctgatcggataatggaatactctcatttattttatgacattctctgtctactcagatcatagtgaaaactggaaacaaaaaaaaaaaacagcctcttcttggaaagtgacagcagaaggtggcatggagcttgtgtccttggacaacaaatctggatatactaggattaattatcagaagacagctcaggccaagttttgatcgttccatacagtaccttgtttatctgcttcttaaagaatcagccgagacaccataaaagaaataggctttttgtgccttttgctgttaatgtttaatttacaaactgttttggtaaatctcttaatgtaagtagctatttgactttggaattttgcattcgaggtatactgtcatttcttgaaatctttttctcgtttagttgctctgtgggaaatgtgaggaagcctaagtttgtatttgtaaatttcttatgccatcctctagtcaaattttttttcattgtttaaaaatacggaagtgttccaatataattttttcctgtactggatggctaggattctagagaattgattataaaatattttcaataca

SEQ ID NO: 845 - protein, 409 aa, Homo sapiens
MQVTLKTLQQQTFKIDIDPEETVKALKEKIESEKGKDAFPVAGQKLIYAGKILNDDTALKEYKIDEKNFVVVMVTKPKAVSTPAPATTQQSAPASTTAVTSSTTTTVAQAPTPVPALAPTSTPASITPASATASSEPAPASAAKQEKPAEKPAETPVATSPTATDSTSGDSSRSNLFEDATSALVTGQSYENMVTEIMSMGYEREQVIAALRASFNNPDRAVEYLLMGIPGDRESQAVVDPPQAASTGAPQSSAVAAAAATTTATTTTTSSGGHPLEFLRNQPQFQQMRQIIQQNPSLLPALLQQIGRENPQLLQQISQHQEHFIQMLNEPVQEAGGQGGGGGGGSGGIAEAGSGHMNYIQVTPQEKEAIERLKALGFPEGLVIQAYFACEKNENLAANFLLQQNFDED

SEQ ID NO: 846 - DNA, 2683 bp, Homo sapiens
gctccacttacctttggtgcccggccctctggccgctctcctcccgccctcgcgccccttcggcccgtcccgtccagcccgggctgcccggctctcgcaggcccccccgcgccgaccgcgttcctatggacagacgcacagacacctgcaggagtgacactgctgatcctgtaacatggaggattgtcttcatacctcatctgagaatctgtccaaattggtcagctgggcccatagccatgggactatttgcagcctcattccaaacctgaaacacttgctttctgaaggttcccatgggaacctgacagcaatgtggggctgtagtgctggccatgcttatcactggccactaacagctacttgcagagctgggtcccaagagagggtctgtttccaggataacagaagttttaactctgatagtcccagtataatcggggtgccctctgagacacagactagccctgttgaaaggtaccctgggagaccagtgaaagcaaagctagactgtaaccggaccagagactcttgtgacttctcctactgtagtgagccctctgaactggatgaaactgttgaagaatatgaagatgagaacaccctgtttgacatggtttgtgagtcttctgttacagatgaggatagtgactttgaaccccaaacccaaaggcctcaaagcattgctcgcaaaagacctggggtagtcccatcttccctccattcaagctcccagacgcagatggttgacgaatgcagcaatgatgtcatcatcaagaaaatcaaacaagaaatccccgaagattattacattgtggcaaatgcagaactgacaggaggagtagatggaccagccctgtccttgacacagatggcaaaacccaagcctcagactcacgctggtccctcctgtgtagggtctgctaaactgattccccatgtcacatctgccatcagcacggagctagacccacacggtatgtctgcatccccctctgtgatctccagaccaattgtccagaagactgctagggtatctctggcttcaccaaacagaggaccccctggtacacatggcaccaaccaacaggtggccatgcaaatgcctgtgagcacatcccatcctaacaaacagatcagtatccccttgtctgccctgcagctgcctggacaggatgagcaagttgcctctgaagagttcctgtcccatctgcccagccaggtctcctcctgtgaggtagccctttctccctcagttaacacagagccagaagtgagctccagtcagcagcagcccccagtcgctccagccataaccactgaggccacagcacagtgcataccagcttattccactaagctcaacaaatttcctgtatttaatattaatgatgacttgaatgatctgtgtaccagtgcagtaagcccaaatactaccaaagccacgcggtacgccttgaatgtgtggcgttattggtgcatgaccaacgggctcaaagaccacacagacatcaccaagatccctgcagtgaagttgaacgagctgctcgagaacttttatgtcaccgtcaagaagagcgacggctcggacttcctggccacctcgctccatgctattcgccgaggcctggaccgcatcctgaagaatgcaggtgtcggcttttccatcaccagcagcaccttcagctcctccaccaagaaactcaaggagaagctgtgggtgctgagtaaggcaggcatgtcgggcgcgcgttctcgcaacatcgtctacttctccctttctgacgaggaggagatgtggcaggcagggtgtctgggggatgacagccctatcactctcctgtccactgtggtcaagtacaacagccagtacctgaacatgcggacgctgcaggagcatgcggatctgatgtatggtgacatcgagctgctcaaagacccccaaaaccagccctactttgcccggacggacagcgtcaagcgggagagtcggagcggctccaccagagtgtgtcacgggaagatctaccatgagcattcccggggacacaaacagtgcccttactgcctcctctacaagtacatgtacatccaccggccgcccacccaaatggaggccaagtcccccttctacctgactgccaggaaggaggccacagacatgggcagcgtgtggtatgaggagcagaggatggggctgcgctctcttcggggaattgtcccaaacttagccaagaaggtcaagctggaaaactgtgagaacttcacctttgtctcgttcactcaggtctcccggaggcttggctcccacagctgctgccagtgagcccccactggggcccggccactgccctgtcacctgctcgggccagccagggttggagcagctggagctccttggaggcaggggctgaccaggtgtgacctcccggtctggcggctctcccctggtgtggcctgccctccctttgacttggggtttgctttttaaaatgaaactagatgagtctaaatcattcggatggtttatccaaatgtgcgtcaacttcgttagcttttagaatctaacacaatgtataattgttacatacaagagtgaggaaattcattttctctagtgcctttctagcacaggttttctcaaaacaaacaaacaaaaaaggaaactgttaagtagtcgttt

SEQ ID NO: 847 - protein, 716 aa, Homo sapiens
MEDCLHTSSENLSKLVSWAHSHGTICSLIPNLKHLLSEGSHGNLTAMWGCSAGHAYHWPLTATCRAGSQERVCFQDNRSFNSDSPSIIGVPSETQTSPVERYPGRPVKAKLDCNRTRDSCDFSYCSEPSELDETVEEYEDENTLFDMVCESSVTDEDSDFEPQTQRPQSIARKRPGVVPSSLHSSSQTQMVDECSNDVIIKKIKQEIPEDYYIVANAELTGGVDGPALSLTQMAKPKPQTHAGPSCVGSAKLIPHVTSAISTELDPHGMSASPSVISRPIVQKTARVSLASPNRGPPGTHGTNQQVAMQMPVSTSHPNKQISIPLSALQLPGQDEQVASEEFLSHLPSQVSSCEVALSPSVNTEPEVSSSQQQPPVAPAITTEATAQCIPAYSTKLNKFPVFNINDDLNDLCTSAVSPNTTKATRYALNVWRYWCMTNGLKDHTDITKIPAVKLNELLENFYVTVKKSDGSDFLATSLHAIRRGLDRILKNAGVGFSITSSTFSSSTKKLKEKLWVLSKAGMSGARSRNIVYFSLSDEEEMWQAGCLGDDSPITLLSTVVKYNSQYLNMRTLQEHADLMYGDIELLKDPQNQPYFARTDSVKRESRSGSTRVCHGKIYHEHSRGHKQCPYCLLYKYMYIHRPPTQMEAKSPFYLTARKEATDMGSVWYEEQRMGLRSLRGIVPNLAKKVKLENCENFTFVSFTQVSRRLGSHSCCQ

SEQ ID NO: 848 - DNA, 1532 bp, Homo sapiens
agcgcagcgggggcgggaaggttgtagtgccgcgagttgagctcctcttgcctaagtggtcgcgccccctttaagagcagcgattgtaaggagaggcggtcccggtgtcctcgggtcccaggtgattgtgaagtgctgaccaattgccactggacatacttgaaacaaaataggaaaatggcagcaaactcttcaggacaaggttttcaaaacaaaaatagagttgcaatcttggcagaactggacaaagagaaaagaaaactacttatgcagaaccagtcttcaacaaatcatcctggagctagcattgcactctcgagaccctctcttaataaggacttccgggatcacgctgagcagcagcatattgcagcccaacagaaggcagctttgcagcatgctcatgcacattcatctggatacttcatcactcaagactctgcatttgggaaccttattcttcctgttttacctcgccttgacccagaatgaagaaaacatttgcgatggaaaagtgactttgtaatatcaaatgccaaagctactatcattcagtgctacatgaactgtgactttaagaattttggtgaactttgatattttttgtttgtctgaaagaaaggaatgtgtaagtgaaagctgaaagaagaataaccaggatgatgagagctgtggaagctgtatcgtccaaggaattgattatgtaccgtgactgtaacttttttgtaatgctgtttaactctcaatcagactgtgaactggatggtcacgaagtcattccccaactcctagcaagtttgactgaatatatcatgtccacagtagattttcaagaatcatttatagtacttaactttaaagaaacaaggctgcttttaaaaaatgaactaataggcttaaatcaattgcatccatatttgctgtttataggattgctatcagtataccttttgcgtttatagtcaacatgtatcatcctgaaatattctttctggacttataactacttccccctttttcactttaaaacaaacctcaagaataaattactaaccagtcttaaccatcttttataaacatatgctcttataaatgttgtgactagatgcaattaaaaataatagggaatgtggtaggtttttaatttgtacatcctcttatttagtgttaccacataaatgatgagtttgtgtggttctgttttccatttttgttctaactgaaaactttttggctgggcacggtgcctcatgcctgtaatcccagcactttgggaggccaaggcgggcagatcacttgagatcaggagtttgagaccagcctggccaacatggtgaaaccctgtctctactaaaagtataaaaaattagccatgtgtggtggcacacgcctgtaatcccagctactcaggaggctgaggcaggagaatcgcttgaacctgggaggcaggggttgcagtgagctgagacggtgtcactgcactccagcctgggtgacagtgagtctttgtctcaaagaaaaaaaaaaaaaaa

SEQ ID NO: 849 - protein, 104 aa, Homo sapiens
MAANSSGQGFQNKNRVAILAELDKEKRKLLMQNQSSTNHPGASIALSRPSLNKDFRDHAEQQHIAAQQKAALQHAHAHSSGYFITQDSAFGNLILPVLPRLDPE

SEQ ID NO: 850 - DNA, 2445 bp, Homo sapiens
ctgagcagccgtagcagccgaatttgggagcatatccttgtcactgcagccagaaagcccttcgatccccatcagagaggtcacatgagccccgaggtcacctgcccgcggaggggccacctgcctcgcttccacccgaggacctgggttgagcccgtgatggcctcgtcccaggtggctgcctccctctacgatgcggggctactcctcgtggtgaaggcgtcctacggaaccggaggctcctccaaccacagtgccagcccatcgccccggggggctctagaggaccaacagcagagagccatctccaatttctacattatctacaaccttgtggtgggcctgtcccccctgctgtccgcctacgggctgggatggctcagcgaccgctaccaccgaaagatctccatctgcatgtcgctgctgggcttcctgctctcccgcctcgggctgctgctcaaggtgctgctggactggccagtggaggtgctgtacggggcggcggcgctgaacgggctattcggcggcttctccgccttctggtccggggtcatggcgctgggatcgctgggctcctccgagggccgccgctctgtgcgcctcatcctcattgacctgatgctgggcttggcggggttctgcgggagcatggcttccgggcatctcttcaagcagatggctgggcactctgggcagggcctgatactgacggcctgcagcgtgagctgtgcctcgtttgccctgctctacagccttttggtgctaaaggtccctgagtcggtggccaaacccagccaggagctccccgccgtggataccgtgtctggcacggttggcacataccgcactctggatcctgatcagttggaccaacagtatgcagtggggcaccctccatctcctggaaaagcaaaaccccataaaaccaccattgccttgctctttgtgggtgctatcatatatgacctggcggtggtgggcacagtggacgtgatccctctttttgtgctgagggagcctctcggttggaaccaagtgcaggtgggctatggtatggctgcagggtacaccatcttcatcaccagcttcctgggtgtcctggtcttctcccgctgctttcgggacaccaccatgatcatgattgggatggtctcctttgggtcaggagccctcctcttggcttttgtgaaagagacatacatgttctatattgctcgagccgtcatgctgtttgctctcatccccgtcacaaccatccgatcagctatgtccaaactcataaagggctcctcttatggaaaggtgttcgtcatactgcagctgtccttggctctgaccggcgtggtgacatccaccttgtacaacaagatctaccagctcaccatggacatgtttgtgggctcctgctttgctctctcctcctttctctccttcctggccatcattccaattagcatcgtggcctataaacaagtcccattgtcaccatatggagacatcatagagaaatgaagatgcttacctgcaggaactgaaaacatcagccatggccaggcccccagaagacaaaagaagggaccagggaactggtgacctaagcaacccactgcttaagaaacctgcgttccagccagagttggcctcagaatgacctgctctggctcagggatccctggtggatggggaaaagcactttcctggtgatggaaaaacgttctcagctttaagacacccccattaggcagacactgggttctgtgacagcagagcatgaccttaagggttacaggcaggctgcacacagcagtcccaggccctgtgaggggcttcagactccagctacagcgagcctgccccttttcttcaagggactgtcttgagggctccaaagtatagctaactagtcacctgggtgctgtgctgaaagtcccatgggagaactcaaagcgtgcattatcacagcctgaggggaatgtggaagggatgttttgtaagaactaccaacagttttgcacgaacaatgtcttttaaattaaaataaaaccttgaaaaaagtcagctttctttcctgagtcttccttacctacaaacactcaggagggggatggagctcaggcccttgtcttctgggtagttttgttactactgttgcttttaagaagcaaatgtcacaaggctttcttcaatgggatgttcaattgagtacttccagtcaacagtgcttcccaaagtgggtggtgtgaaggaagaggaggtacattaagagctattttatttgaggtagtcatttttataaccttgtttacttggatttataaaagcagactcacctaataaaatcaacattcattgtaaaaaaaaaaaaaaaaaaaaaaaaaaaaaaaaaaaaaaaaaaaaaaaaaaaaaaaaaaaaaaaaaaaaaaaaaaaaaaaaaaaaaaaaaaaa

SEQ ID NO: 851 - protein, 475 aa, Homo sapiens
MSPEVTCPRRGHLPRFHPRTWVEPVMASSQVAASLYDAGLLLVVKASYGTGGSSNHSASPSPRGALEDQQQRAISNFYIIYNLVVGLSPLLSAYGLGWLSDRYHRKISICMSLLGFLLSRLGLLLKVLLDWPVEVLYGAAALNGLFGGFSAFWSGVMALGSLGSSEGRRSVRLILIDLMLGLAGFCGSMASGHLFKQMAGHSGQGLILTACSVSCASFALLYSLLVLKVPESVAKPSQELPAVDTVSGTVGTYRTLDPDQLDQQYAVGHPPSPGKAKPHKTTIALLFVGAIIYDLAVVGTVDVIPLFVLREPLGWNQVQVGYGMAAGYTIFITSFLGVLVFSRCFRDTTMIMIGMVSFGSGALLLAFVKETYMFYIARAVMLFALIPVTTIRSAMSKLIKGSSYGKVFVILQLSLALTGVVTSTLYNKIYQLTMDMFVGSCFALSSFLSFLAIIPISIVAYKQVPLSPYGDIIEK

SEQ ID NO: 852 - DNA, 7387 bp, Homo sapiens
gcaactgaagacggaggtgcccaaggtcagaaggaagcaccacacagagggcacaggcaggatggccgatgctgacaggaaccagcggtgactctggggcccctggcagcagctctgtctcctgaagatgaagtggcccaggtgaagcccaggccagccccaatggccagctcggagactgagatccgctgggctgagcctggcctggggaagggcccccagcggcggcgctgggcctgggccgaggacaagagggatgtggatagaagtagttcacaaagctgggaagaagagagactctttcccaatgccaccagccccgagctcctagaggacttccgcctggcccagcagcacctgccgcccctggagtgggacccacacccgcagcccgatgggcatcaggattccgagtcaggagagacttcgggagaagaggctgaagcagaggatgtggacagcccagcaagttcccatgagcctcttgcctggctcccccagcagggccgtcagctggacatgactgaagaggagccagatgggaccctcggaagtctggaggttgaggaggctggagagagctcctcaaggttggggtatgaggctggtctcagcttggaaggccatggaaacaccagccccatggctcttgggcatggtcaggccaggggctgggtggcttctggcgaacaagccagtggggacaaactttctgaacattccgaggtcaacccatccgttgaactcagcccggcaaggtcctggagcagtgggacagtgagcctcgaccaccctagtgacagccttgattctacctgggaaggagagaccgatggcccccagcccactgccctggcagaaaccttgccagagggccccagccaccacctcctaagcccagatggcagaactggaggcagtgttgctcgggcaacccccatggaattccaggactcctcagctcccccagcccagagtccgcagcatgccacagatagatggaggagagaaacgaccagattcttctgccctcagcccaaggaacacatctggaagcagacaaagacgtcacctaagccactcccttcccgattcattggctccatcagccccctgaatccccagcccaggccaacgcggcagggcaggccgctgcccagacagggagccactctggctggccgctcctcttctaatgcccccaagtatggccgggggcagttgaactacccactccctgatttctccaaggtagggccccgggtgagattccccaaagatgagagctaccgtccccccaagtccagaagccacaacaggaagcctcaggcccctgccaggcccctcatcttcaagtctccagctgagattgtgcaggaggtgctgttgagcagtggagaagcagccctggcaaaggacacgcctcctgcccaccctatcaccagggtaccccaagaatttcagacgcctgagcaagccactgagctggtccatcagctccaggaagactaccacaggctcctcaccaagtacgctgaggccgagaacaccattgaccagctacgcctcggggccaaggtgaacctgttctctgacccaccccagcccaaccacagcatccacacgggaatggtgccccaggggaccaaggtcttgtccttcaccatcccacagccccgctctgcagagtggtggccgggcccggccgaggacccccaggcctctgcggcctcagggtggccatcagctcgaggagacttgagcccctcctcgcttaccagcatgcccaccctggggtggcttccggagaaccgggacatctctgaggaccagtcctcagcagagcagacccaggcactggcttctcaggccagccagttcctggccaaggtggagtcctttgaaagactgatacaggcaggacgtctcatgccccaggaccaagtcaagggcttccagcggctgaaggctgcccacgcggccctagaggaggagtacctgaaggcttgtcgggagcaacaccctgcccagccgcttgccggctccaaggggacgcctggaagatttgatcctcgcagggagctggaggcagagatataccgtctgggaagctgcctggaagagctgaaggaacacatagaccagacccagcaagagcctgagccgcccgggtcagactcagctctggacagcaccccagccctgccctgcctccatcagccaacgcacctgcctgctccttctggacaagcccccatgccagccatcaagacctcctgccctgagcctgctaccaccactgccgccgccagcactggcccctgcccattgcacgtaaatgtggaggtgagctctggcaacagtgaggtggaggacaggccacaggaccccctggcccgactcaggcacaaggagctgcagatggagcaagtttaccatggcctcatggagcggtacctcagtgtgaagtctctcccagaagccatgagaatggaggaggaggaagaaggagaggaggaggaggaggaagaggggggaggtgactccctggaagttgatggggtggctgcaactccagggaaagcagaggccaccagggtcctcccaaggcagtgcccggtgcaggctgagaaaagtcatggggctcccctggaggaggccacggagaagatggtatctatgaagccaccaggtttccaggcatccctggctagagacgggcacatgtcaggcctgggcaaggctgaggcagcccctccaggccctggcgtgccaccccaccctccaggcaccaagtccgcagcatcccaccaaagtagtatgaccagcctggagggaagcggcatctctgagcgccttccacagaagcctttgcaccgaggcggtgggccccacctggaggagacctggatggcgtccccagagacagacagtggctttgtgggctcagaaacaagcagagtttcacccctcacccagactccagagcaccggctctcccacatcagcacagcaggaacattagcccagccctttgctgcatctgtgcccagggatggagcttcctaccccaaggccaggggttctctgattcccagaagagccacagagcccagcacaccccggagccaagcacagaggtacctctccagcccaagtgggcctctccggcagagggcacccaacttcagcctggagcggacactggcagccgagatggcggttcctggctcagagtttgaggggcacaaacggatttctgaacagccccttcccaacaagacaatcagcccacccccagcccccgcccctgccgctgcgcctctaccctgtggaccaacagagaccatccccagcttcctgctcaccagggcagggcgagaccaggccatctgtgagctgcaagaagaggtgtcccggcttcgtctgcggctggaagacagcctgcaccagccactccagggcagcccgacacgcccagcatctgcctttgaccgccccgcccggacccgcggccggccagcagactccccagccacctggggctcccattatggcagtaaatccacagagagattgcctggtgagcctagaggtgaagagcagattgtccctccaggaaggcagcgagccaggtcttcctcagtgcctcgggaggtgctccgactgtccctgagttcagaatctgagctgccctccctaccactgttctctgagaagagcaagaccaccaaggacagtccacaggcagctcgggatggaaagagaggggtgggcagtgctggatggccagacagggtcaccttccggggccaatacacaggccacgaataccatgttctgtcccctaaggcggtcccaaaaggcaatggcacagtctcctgtccccactgccggcccattaggacccaggatgcgggtggtgctgtcacaggggacccactgggaccgcctcccgctgatacccttcagtgtcccctgtgtggtcaagttgggtctcccccagaggcagatggtccaggctcagccacctctggggcagagaaggccaccacgaggagaaaagcatcttcaactcccagccccaagcagaggagcaagcaggcggggtcgtcgccacgcccaccccccggactgtggtatctggcaacagcgcccccagcaccagcccctccagcctttgcctacatctcctcggttcccatcatgccttatccacctgccgctgtgtactatgcgcctgcaggacctacctcagcccaaccagctgccaagtggccgcccacagcctctcccccaccagcccggagacaccggcactccatccagctcgacctgggcgacctagaggagctcaacaaggccctgagccgggccgtgcaggctgccgagagcgtccgctctaccaccaggcagatgagaagctcgctgtcagccgacctgcgccaggctcacagcctgcggggctcctgcctcttctgacttcactgggggcccagaggcagatgggtgggtgggtgggcaggtggcctgccaggccaggagtgggctggagctgctgaggcccagaaggcccgcatagttcctcaccaggagggtctccctccagcacaggtcccgcctgctcagtccctgtgctttccaagtggagggggtgtcagctcggtcaccaagagaagtgacttcccaggagcaccagtcccctcacagaggtgctgtgagcgaggcctccttcggtccaggcagaacctcaggcagtctctcctggtcctgcatgtgtgcaactccagctaataataggtattttatatacagatggacagatatttttttaaactggggagttttcctgatcttgggtcctctttagggggccagacaagaaaggcctacggtttctggagcaaacctgtcccccacctgtgaccagtcactctggggcaagcatcactgggaagggcatagccggagacctttctcctagtgactggtagtcagtggggcattttaggatgtcagggccccagggtgacatgtgtccagcttttctatggcagcagaggcctttccctcagacaagctacaaagtgcccaggatgccatccaccatggtccccttcagtacctcacgcatggtccccagcttctcctaggatcccagtggcgtttatcagtggccagctacctgccaggcccgggctggggcacggtctgcggccatgaggccaggccgcctcccgcacccctaccccgtggcagcagcatacctctgcatttctggaatgtgtgtgcatcaatgatgtttgtatatttgaggcatttaaaaatctattttcgttacgagggcaaatgaagaatgaatattgatcttaaaaaaagaaaagaagacaaaaaaaatacccaaagccatccgtgtctctgctgtatgtcattaacttttgccttcaatgtcaagtttatggggtggtaggtttgatgcccagccaagccctttcccaggggacctgttgggtgctctgcctgcctccctctggtggcttctgtttctccagttttccccctttgcctatctcagaaccataaatctttcaactgcggagggccttgaggtggggctgcctagccaagtcccttttgactgaggccagagatgtaaatgaggcacacagcaagttgctgtctacaagagtatgcacctggactctccagtgctcctttctttcttttttttttcttttttctttttctttttttttttttttttgagactgagttttgctctggttgcccaggctggggtacagtggtggaatctcggctcactgcaacctccgcctcccgggttcaagtgattctcttgcctcagcctcccgagtagctgggattacaggcatgcaccaccacgtctggctaattttgtatttttagtagagacagggtttctccatgttggtcgggctgatcttgcactcccagcctcaggtgatccacccacctcagcctcccaaattgctgggattacaggcgtgagccatggcgcccagccttccagtactttcagtagcaaacagcacctgccatttagggagcacctgctagaccctgattccggtgctaagcactgggcattgtctgcttcacacagtccatgtgctaaccctcaggaccctcactctgccccccttttactgatgaggagagtggggttccaatgggccatctgcccaaactggtttgggagagaacctggatttaaactcacattggtctgacccaaagtccacattctttgttatgtgtgttttttgcttcctctacctccatgattctttttctcttgacctctggtttcttcctcacgtggctttttcttccatgttccccacttctcgtctcccttgcttctccctgctctgcccatcatgactcatttctgtttcatttttcagcggatcctcctgagtatggttgaaaatggtgtctcactgaaagtaacactgaaatggacaaacttcctgtaggttctgagccttcagttccaggacattgtgggaccccagaggctgtcctgtccacttgccttctgaggacatcagctcggtgtccccagcctccgtgctgtgggcacagctgtggtttgggtgctgagcaaaggatgctgtagtcttggccctgtggagcttggctgttgggacaggaggtacaaaggggagtggtgcctgtggacacaggactagaccccaggacatcagggcctcgggctcatggtcctatcaccctggatggtatacgcagctgcacacgtggaattgctcaaacaattcaggcccaacttttctgccacggaaggggtgctgcttccctcacgtaacaagaggctgtcaatcacgagcacccaggttggggtgaggccggccctttgtggcttgtgccactgagtgggctgtgcctcgggcttggctccacctcagggctccacatttgcaggatgtcagctgatttccagggaccagcctcacccttacgtgttatctccttcttctgggtctcccaggtgagcaccctaagaacacatccatggagacacccagcccctctggcctgggccccaagccctctgcatcaccccagcccttccctgccctgccctgtcctggcccaggcaaccgcctcttgcctagttgcccacagcagccttcactcaggccttcctgcctccagcctggtccccacaacgtgcctcccccgatggccatggtaatactggaataaggtccttgtgataggcaccacatgcctgaactctccccaccccatccaccttgtatttgtctgttctcacattgctataaagaactacctgagactgggtagtttatgaaaaaaa

SEQ ID NO: 853 - protein, 1439 aa, Homo sapiens
MASSETEIRWAEPGLGKGPQRRRWAWAEDKRDVDRSSSQSWEEERLFPNATSPELLEDFRLAQQHLPPLEWDPHPQPDGHQDSESGETSGEEAEAEDVDSPASSHEPLAWLPQQGRQLDMTEEEPDGTLGSLEVEEAGESSSRLGYEAGLSLEGHGNTSPMALGHGQARGWVASGEQASGDKLSEHSEVNPSVELSPARSWSSGTVSLDHPSDSLDSTWEGETDGPQPTALAETLPEGPSHHLLSPDGRTGGSVARATPMEFQDSSAPPAQSPQHATDRWRRETTRFFCPQPKEHIWKQTKTSPKPLPSRFIGSISPLNPQPRPTRQGRPLPRQGATLAGRSSSNAPKYGRGQLNYPLPDFSKVGPRVRFPKDESYRPPKSRSHNRKPQAPARPLIFKSPAEIVQEVLLSSGEAALAKDTPPAHPITRVPQEFQTPEQATELVHQLQEDYHRLLTKYAEAENTIDQLRLGAKVNLFSDPPQPNHSIHTGMVPQGTKVLSFTIPQPRSAEWWPGPAEDPQASAASGWPSARGDLSPSSLTSMPTLGWLPENRDISEDQSSAEQTQALASQASQFLAKVESFERLIQAGRLMPQDQVKGFQRLKAAHAALEEEYLKACREQHPAQPLAGSKGTPGRFDPRRELEAEIYRLGSCLEELKEHIDQTQQEPEPPGSDSALDSTPALPCLHQPTHLPAPSGQAPMPAIKTSCPEPATTTAAASTGPCPLHVNVEVSSGNSEVEDRPQDPLARLRHKELQMEQVYHGLMERYLSVKSLPEAMRMEEEEEGEEEEEEEGGGDSLEVDGVAATPGKAEATRVLPRQCPVQAEKSHGAPLEEATEKMVSMKPPGFQASLARDGHMSGLGKAEAAPPGPGVPPHPPGTKSAASHQSSMTSLEGSGISERLPQKPLHRGGGPHLEETWMASPETDSGFVGSETSRVSPLTQTPEHRLSHISTAGTLAQPFAASVPRDGASYPKARGSLIPRRATEPSTPRSQAQRYLSSPSGPLRQRAPNFSLERTLAAEMAVPGSEFEGHKRISEQPLPNKTISPPPAPAPAAAPLPCGPTETIPSFLLTRAGRDQAICELQEEVSRLRLRLEDSLHQPLQGSPTRPASAFDRPARTRGRPADSPATWGSHYGSKSTERLPGEPRGEEQIVPPGRQRARSSSVPREVLRLSLSSESELPSLPLFSEKSKTTKDSPQAARDGKRGVGSAGWPDRVTFRGQYTGHEYHVLSPKAVPKGNGTVSCPHCRPIRTQDAGGAVTGDPLGPPPADTLQCPLCGQVGSPPEADGPGSATSGAEKATTRRKASSTPSPKQRSKQAGSSPRPPPGLWYLATAPPAPAPPAFAYISSVPIMPYPPAAVYYAPAGPTSAQPAAKWPPTASPPPARRHRHSIQLDLGDLEELNKALSRAVQAAESVRSTTRQMRSSLSADLRQAHSLRGSCLF

SEQ ID NO: 854 - DNA, 4102 bp, Homo sapiens
agttcgcaaagtccgggcttgcggccgggcggcgcagaggcgcggaggctccccgggcggctgcatcccggggctgccccggacatgccccgcaccccttgtcggacgcccgcgccgcttcaccggctgccactccccggagtgctctgggactagagcgccctccgccccaacttctgactttggggtcccccagccctagaggaacgggcgcccggctgggggagccccgggcatggtgtgacggggcagtcaggtcagctttgcggcgcccccaaactccagccacccgtcgtctccgtgccctccagaatgtagctgctgaccccgcgccccccggactccagcagcagtctccgccacctccgggctccagcagccaactcttgtgtctctcaggaacccgccgacgtctccgcgtcccccggattccaggttcgcgacccccgccgtcttcgcgcctccgggactctagcagcggtctccgcgaccccctaggatccagccactgtacccgtgctccccaaacccaggctccagccgtcgtctccgcgctcccggggatccagctgtcgcgccagtacccgcgaggacagcggcaccgcccacaccccgcgcgctcagagcccggccgggcctcggcgtggagatgaacgcgccgctggacggcctgtcggtgagctcgtcctccaccggctcgctgggctcggcggccggggcgggcggcggcgggggcgcggggctgcggttactgtctgccaacgtgcgccagctgcaccaagcgctgaccgcgctgctgagcgaggcggagcgggagcagttcacccactgcctgaacgcttaccacgcgcgccgcaacgtcttcgacctggtgcgcaccctgcgcgtgctgctggacagtccggtcaagcggcgcctgctgcccatgcttcgtctggtcatcccgcgctccgaccagctgctcttcgaccaatacacggccgagggcctctacctgcccgccaccaccccctacaggcagcccgcctggggcggccccgacagcgcggggccaggggaggtgcgcctggtgagtttgcggcgtgccaaggcccacgagggcttgggcttcagcatccgtgggggctcggagcacggcgtgggcatctacgtgtctctggtggaaccaggctctctagctgagaaggaaggactgcgggtcggggaccagattctgcgcgtcaacgacaaatccctggcccgggtgacccacgcggaggccgtcaaggctctgaagggctccaagaagctggtgctgtctgtgtactcagcagggcgcatccctgggggctacgtcaccaaccacatctacacctgggtggacccgcagggccgcagcatctccccaccctcgggcctgccccagccccacggtggtgccctgaggcagcaggagggtgaccggaggagcaccctgcacctcctgcaaggaggggatgagaaaaaggtgaacctggtgctgggggacggccggtccctgggcctcacgatccgtgggggagctgagtacggccttggcatttacatcactggcgtggacccaggctctgaagcagaaggcagcgggctcaaggttggggaccagattctagaagtgaatgggcggagctttctcaacatcctacacgacgaggctgtcaggctgcttaagtcatctcggcacctcatcctgacagtgaaggacgtcgggaggctgccccatgcccgcaccactgtggacgagaccaagtggatcgccagttcccggatcagggagaccatggcgaactcggcagggtttcttggcgatctcacaacagaaggaataaacaagccaggattttacaagggcccagccggctcccaggtgaccctgagcagcctggggaaccagacacgagtgctgctggaggagcaggctcggcacctgctgaacgagcaggaacacgccaccatggcctactacctggatgagtaccgtggtggcagcgtctctgtggaggccctcgtcatggccctgttcaagctgctcaacacccacgccaagttctcactcctctctgaggtgagaggcaccatttccccgcaagacctagaacgcttcgaccacctggtgctgaggcgtgagattgagtccatgaaggcgcggcagcccccaggccccggggctggggacacctactccatggtctcctacagtgacacgggttcatccacaggcagccacggcacctccaccaccgtcagctcggccaggaacactctggacctggaggaaactggcgaggctgtccagggcaatatcaacgccctcccagatgtgtccgtggatgatgtcagatccacctcccaggggctgtcaagcttcaagccactgcctcgcccaccacctctggcccaaggcaacgacctcccactaggccagccaaggaagctggggagagaggacctccagccaccttcctccatgccttcctgctcgggcactgtcttctcggctccacagaaccgcagcccgccagcgggcaccgcacccaccccagggacctcctctgcacaggacttgccctcttcccccatctatgcctccgtctcccctgccaaccccagctccaagaggccgctggacgcccatctggccctggtcaaccaacaccccatcggccccttcccacgggtccagtcacccccgcacctgaaaagcccctctgcagaggccacagtggctgggggctgccttctgcccccatcaccctctggccacccagaccagacaggcacaaaccagcactttgtcatggtggaggtccaccgccccgacagcgagccagacgtcaatgaagtgagggcgctgccccagacgcgcacagcctctacgctctcccacctctcggacagcgggcagactctaagcgaggacagtggtgtggatgctggcgaggcagaggccagcgccccaggccgaggaaggcagtcggtgtccaccaagagcaggagtagcaaggagctgcctcggaacgagaggcccacagatggggccaacaaaccgcctggacttctggagcccacgtccactctggtccgtgtgaagaaaagtgcggccaccctgggcatcgccatcgagggtggcgccaacacccgccagcccctgcctaggattgtcactattcagagaggcggctcagctcacaactgtgggcagctcaaggtgggccacgtgattctggaagtgaatgggctgacgcttcggggcaaggagcaccgggaggccgcccgcattatcgccgaggccttcaagactaaggaccgtgactacattgactttctggtcactgagttcaatgtgatgctctagaggccaaggcctgagggcctcccaccactgcccagcccctggtcccagtccctttccaccgttggcttcatcaagctccttgcggggttggggctgcatggccagggtggcaggaagacatcccccctccatcccagcccactggaccagaactgggagaggaagagagcaggacaaggcagacagaaggtcaggtcaggaactggtgctgtactgggtacacagtaggcgcccaggacaagtgggttgcaagacaggaagaaaggaaaaggaagggcagagtgctggtttctccaggttgggttgggggcactgctgtcccccctccagctaggacccagcccatccccagatgcctgagcctttgtccaaagtgaggtcactcgagaattcatggacacggcccccagtcagggggcatcttgcaagacctttagtgccacaaataagcatcgagcacctccccattcacacccccattcctcctggctccttatcccccatggtgtttattatttatttccctccccatgcccctggggaccccaaggccccagcttccctctgcacccccagcctatcccagaggccttgcaggtgaccagcagtgtcattgtatttatatacagagcttatgactttaatttttcaataaagaaatctgaacaaggttaaaaaaaaaaaaaaaaaaaaaaaaaaaaaaaaaaaaaaaaaaaaaaaaaaaaaaaa

SEQ ID NO: 855 - protein, 907 aa, Homo sapiens
MNAPLDGLSVSSSSTGSLGSAAGAGGGGGAGLRLLSANVRQLHQALTALLSEAEREQFTHCLNAYHARRNVFDLVRTLRVLLDSPVKRRLLPMLRLVIPRSDQLLFDQYTAEGLYLPATTPYRQPAWGGPDSAGPGEVRLVSLRRAKAHEGLGFSIRGGSEHGVGIYVSLVEPGSLAEKEGLRVGDQILRVNDKSLARVTHAEAVKALKGSKKLVLSVYSAGRIPGGYVTNHIYTWVDPQGRSISPPSGLPQPHGGALRQQEGDRRSTLHLLQGGDEKKVNLVLGDGRSLGLTIRGGAEYGLGIYITGVDPGSEAEGSGLKVGDQILEVNGRSFLNILHDEAVRLLKSSRHLILTVKDVGRLPHARTTVDETKWIASSRIRETMANSAGFLGDLTTEGINKPGFYKGPAGSQVTLSSLGNQTRVLLEEQARHLLNEQEHATMAYYLDEYRGGSVSVEALVMALFKLLNTHAKFSLLSEVRGTISPQDLERFDHLVLRREIESMKARQPPGPGAGDTYSMVSYSDTGSSTGSHGTSTTVSSARNTLDLEETGEAVQGNINALPDVSVDDVRSTSQGLSSFKPLPRPPPLAQGNDLPLGQPRKLGREDLQPPSSMPSCSGTVFSAPQNRSPPAGTAPTPGTSSAQDLPSSPIYASVSPANPSSKRPLDAHLALVNQHPIGPFPRVQSPPHLKSPSAEATVAGGCLLPPSPSGHPDQTGTNQHFVMVEVHRPDSEPDVNEVRALPQTRTASTLSHLSDSGQTLSEDSGVDAGEAEASAPGRGRQSVSTKSRSSKELPRNERPTDGANKPPGLLEPTSTLVRVKKSAATLGIAIEGGANTRQPLPRIVTIQRGGSAHNCGQLKVGHVILEVNGLTLRGKEHREAARIIAEAFKTKDRDYIDFLVTEFNVML

SEQ ID NO: 856 - DNA, 11025 bp, Homo sapiens
gagcatcttttggggggagggaattcagcggatcagtcttaagaggagcttttttttggagcgagaaatcatataaaataaaatgaaataaaacaaggaggaaggcaaccagctgttaggggaaaaataaggcagataaaggagcggggagagaaattaattgccaaccaggaggagttgggctgtatttttcaaaggtggggagagtggagcacacaccttgaggaggaaagcgagaaagaaaagaaaaaagcaagtggaaaggggggctcgcccaagaagggtgaagaagcgaagaaagtcgaggcgccgaggctcccaaagctggcagctccgggtggcggtgcaggggcgaagggggggcggggggaaccgtcggacatgcggctctggagttgggtgctgcacctggggctgctgagcgccgcgctgggctgcgggctggccgagcgtccccgccgggcccggagagacccgcgggccggccgacccccgcgccccgccgccggcccggccacctgcgccacccgggcggcccgcggccgccgcgcctcgccgccgccgccgccgccgccgggcggtgcctgggaagccgtgcgcgtcccccggcggcggcagcagcgggaggcgaggggcgccaccgaggagccgagcccgccgagccgggcgctctatttcagcgggcgaggcgagcagctgcgcctccgggccgacctcgagctgccccgggacgcgttcacgctgcaagtgtggctgcgagcggaggggggccagaggtctccggcagtgatcacagggctgtatgacaaatgttcttatatctcacgtgaccgaggatgggtcgtgggcattcacaccatcagtgaccaagacaacaaagacccacgctactttttctccttgaagacagaccgagcccggcaagtgaccaccatcaatgcccaccgcagctacctcccaggccagtgggtatacctagctgccacctatgatgggcagttcatgaagctctatgtgaatggtgcccaggtggccacctctggggaacaagtgggtggcatattcagcccactgacccagaagtgcaaagtgctcatgttagggggcagtgccctgaatcacaactaccggggctacatcgagcacttcagtctgtggaaggtggccaggactcagcgggagatactgtctgacatggaaacccatggcgcccacactgctctacctcagctcctcctccaggagaactgggacaatgtgaagcatgcctggtcccccatgaaggatggcagcagccccaaagtggaattcagcaatgcccacggctttctgctggacacgagtctggagcctcctctgtgcggacagacattgtgtgacaacacagaggtcattgccagctacaatcagctctcaagtttccgccagcccaaggtggtgcgctaccgcgtggtcaacctctatgaagatgatcataagaacccgacggtgacgcgcgagcaggtggacttccagcaccatcagctggctgaggccttcaagcaatacaacatctcctgggagctggacgtgctggaggtgagcaactcctcccttcgccgccgcctcatcctggccaactgtgacatcagcaagattggggatgagaactgtgaccccgagtgcaaccacacgctgacgggccacgacggcggggattgccgccacctgcgccaccctgccttcgtgaagaagcagcacaacggggtgtgtgacatggactgcaactatgaacggttcaactttgatggtggagagtgctgtgaccctgaaatcaccaatgtcactcagacttgctttgaccccgactctccacacagagcctacttggatgttaatgagctgaagaacattcttaaattggatggatcaacacatctcaatattttctttgcaaaatcctcagaggaggagttggcaggagtagcaacttggccatgggacaaggaggccctgatgcacttaggtggcattgtcttgaacccatctttctatggcatgcctgggcacacccacaccatgatccatgagattggtcacagcctgggcctctatcacgtcttccgaggcatctcagaaatccagtcctgcagtgacccctgcatggagacagagccctccttcgagactggagacctctgcaatgataccaacccagcccctaaacacaagtcctgtggtgacccagggccaggaaatgacacctgtggctttcatagcttcttcaacactccttacaacaacttcatgagctatgcagatgacgactgtacggactccttcacgcccaatcaagtcgccagaatgcactgttacctggacctggtctaccagggctggcagccctccaggaaaccagcgcctgttgccctcgccccccaagttctgggccacacaacggactctgtgacactggagtggttcccacctatagatggccatttctttgaaagagaattgggatcagcatgtcatctttgcctggaagggagaatcctggtgcagtatgcttccaacgcttcctccccaatgccctgcagcccatcaggacactggagccctcgtgaagcagaaggtcatcctgatgttgaacagccctgtaagtccagtgtccgcacctggagcccaaattcagctgtcaacccacacacggttcctccagcctgccctgagcctcaaggctgctacctcgagctggagttcctctaccccttggtccctgagtctctgaccatttgggtgacctttgtctccactgactgggactctagtggagctgtcaatgacatcaaactgttggctgtcagtgggaagaacatctccctgggtcctcagaatgtcttctgtgatgtcccactgaccatcagactctgggacgtgggcgaggaggtgtatggcatccaaatctacacgctggatgagcacctggagatcgatgctgccatgttgacctccactgcagacaccccactctgtctacagtgtaagcccctgaagtataaggtggtccgggaccctcctctccagatggatgtggcctccatcctacatctcaataggaaattcgtagacatggatctaaatcttggcagtgtgtaccagtattgggtcataactatttcaggaactgaagagagtgagccatcacctgctgtcacatacatccatggaagtgggtactgtggcgatggcattatacaaaaagaccaaggtgaacaatgcgacgacatgaataagatcaatggtgatggctgctcccttttctgccgacaagaagtctccttcaattgtattgatgaacccagccggtgctatttccatgatggtgatggggtatgtgaggagtttgaacaaaaaaccagcattaaggactgtggtgtctacacgccccagggattcctggatcagtgggcatccaatgcttcagtatctcatcaagaccagcaatgcccaggctgggtcatcatcggacagccagcagcatcccaggtgtgtcgaaccaaggtgatagatctcagtgaaggcatttcccagcatgcctggtacccttgcaccatcagctacccatattcccagctggctcagaccactttttggctccgggcgtatttttctcaaccaatggttgccgcagctgtcattgtccacctggtgacggatgggacatattatggggaccaaaagcaggagaccatcagcgtgcagctgcttgataccaaagatcagagccacgatctaggcctccatgtcctgagctgcaggaacaatcccctgattatccctgtggtccatgacctcagccagcccttctaccacagccaggcggtacgtgtgagcttcagttcgcccctggtcgccatctcgggggtggccctccgttccttcgacaactttgaccccgtcaccctgagcagctgccagagaggggagacctacagccctgccgagcagagctgcgtgcacttcgcatgtgagaaaactgactgtccagagctggctgtggagaatgcttctctcaattgctccagcagcgaccgctaccacggtgcccagtgtactgtgagctgccggacaggctacgtgctccagatacggcgggatgatgagctgatcaagagccagacgggacccagcgtcacagtgacctgtacagagggcaagtggaataagcaggtggcctgtgagccagtcgactgcagcatcccagatcaccatcaagtctatgctgcctccttctcctgccctgagggcaccacctttggcagtcaatgttccttccagtgccgtcaccctgcacaattgaaaggcaacaacagcctcctgacctgcatggaggatgggctgtggtccttcccagaggccctgtgtgagctcatgtgcctcgctccaccccctgtgcccaatgcagacctccagaccgcccggtgccgagagaataagcacaaggtgggctccttctgcaaatacaaatgcaagcctggataccatgtgcctggatcctctcggaagtcaaagaaacgggccttcaagactcagtgtacccaggatggcagctggcaggagggagcttgtgttcctgtgacctgtgacccacctccaccaaaattccatgggctctaccagtgtactaatggcttccagttcaacagtgagtgtaggatcaagtgtgaagacagtgatgcctcccagggacttgggagcaatgtcattcattgccggaaagatggcacctggaacggctccttccatgtctgccaggagatgcaaggccagtgctcggttccaaacgagctcaacagcaacctcaaactgcagtgccctgatggctatgccatagggtcggagtgtgccacctcgtgcctggaccacaacagcgagtccatcatcctgccaatgaacgtgaccgtgcgtgacatcccccactggctgaaccccacacgggtagagagagttgtctgcactgctggtctcaagtggtatcctcaccctgctctgattcactgtgtcaaaggctgtgagcccttcatgggagacaattattgtgatgccatcaacaaccgagccttttgcaactatgacggtggggattgctgcacctccacagtgaagaccaaaaaggtcaccccattccctatgtcctgtgatctacaaggtgactgtgcttgtcgggacccccaggcccaagaacacagccggaaagacctccggggatacagccatggctaaggaaggacaagaagttgtcaaagaattcccaacgccaggacccacatccctttggtattgatttcacagtcagctgctcaacggaatggcctctccacaccagggatccttagcacccaaccggtctgcctttaattttacccaggaaggactcacattggggcgaatgaaccaagtttcgccatgctggatgatgaaatggattcccatcccaaagtctgagatggattgcatatacagtgtgcagtcccagagcctcctaaaattctagccatttgtcacacaaccacagcaagaaacgtgttctatatctagagtgtgcccatctgtgtttagtacacatgcatgcatacacacccatacaaacatctgtgtgagggcagttctggagatgagcagagagagaccggaataaactcaatcttttctttcccaagctcctagccaacactatccttgggagaaagaaatttgcagaaactgctaagaccaagtgtggagatgtcaagctagttcacactctgaggctcagaatatgtaggacatgcacaattgtgcagtcctttgggattggaagtgaaacagtctgtgatcccctaccttctagggaactaggacctaggaagaggtaaagattatcaggtatgcaaagcgccccaattcttctgctgccatgggggattttaccccaactccagggttcgaggccaatctgagaatggcttaggattgcaatgtcaaggtattatatcagccccttgcttgaggcttgaggtcataatatccctctaggacttacctgttcccccagatcttgccttgggaccacatttgctgctacttttcctgctgctctatcctatacattgaataatccaagatggtagaactaggttaggaaaaattccacacaaccaaacagtctgccttaaaagtgacccacatttttccatagctcctcactttttagcccttctgcaagagaaaaaccctcatgggtccacatggtgagaagttaagtttcctgtaagtgggcctctcaccctggaaaggagttgagggacatcagatgctggaaccctcactgaaagtccagaatgtctaagccagtgttagattttgtaaacaagtggaacagtgttaaatttctatgatgttggagccatccagagactactggaattgtcgagacttttggattattatccttatccttatcctaatcttcctagcccttcaggctagagtaggcttcgatcctgagaaccttgctgttgctctgaggagatataattctgggagaaagaatcttttataagaacagtacagattgttctcaagagggccatcagaaggaagccaaagagttcacagcctcagcaccaacaactcaacatggtcatcatgttttctatatggtttttccagctagcagtactcccttccatacctgtgactgggcagtgcttttctctctcccatgtctagcctccaaaagttaagtgaaaattagtcaactgcacgtggaagcccccaccactttggggatctctttatttcttttcagccagggacctgtccactccctttgaattaatatgggaagaaattaatacaggatgaactggagagaagggttgagtgtggcatactttctgaaacctggagctgggaattgcggagaagggaaggtctagactagttacatcacatagggattactgtaaatcaagtcatctcaagtctagtgaagacagccaacagaaacaaaacctagcatagggatagaaaataccatgcacgtgtgcagccccacctaattcctgcatccaaggcaggtgttgttaatctatcatagcacttaaaaaaaaaaaaaaaaagagaccaaaaataactttaggaaccaccatattatatcactcccaatagcactgacctggtgatcaaaaacacttgagaagacatctattggccatctctggccaattacactaagaaacatatcaaggtgcttttggcacaggtgcccacaaatacggatgcagtgctgagatagtttatgagacttgtaccatttcacaaactctgaaattgggttccatattggcaaggctgccacagttgttaagaataatcctctatgtttcttcctcacaaaaccatatctcatttatatccagaccattacttcactataattacaaggacaaattattagcaagaaataagaatagtattagaagaattgatcctattttgaacccctctccagtatcttcacactcttgtcaactctccaggcctctctcttgccctgagttatcagcctgtgtggtgttaactaccttagaaggtacaagctaagaaatgtaacagtatcaaccctcccagttgcttaattatacccataggtaatacaaaaagctctgaagacccaaagatgacattactaatgatgtgatttcaggagccacagaagaaccttaccagcttccctcaaatcagtccttatcctctttctatcttcactcccatcatcatctattttcacactatccagctaagcaaagattcctggaggctgacttgtatcttcagactcacagagtgaattcagctcttctgaatcaagacccacccagtctctttcattcagacctgttgctaacaaatttatatttgccaaggatattaggcaaaagaggctacttgattggtggccaacctcgtgcccacatggaaggtatctttaatagggtcttttcaaaccttagtggaggagggtcagctcaatttgggcaatgcatttgttcccagtttcattttcttcctgggaattaactcgtcatttcattccttcagtcatcttctgtgtaggtgaccggagcactgagaggcagctctgatgcactattgtgtgtcagcagctcaaaggccctaaaacactgaaggttctgcatctgaagtattagattgttagcagcaaaatatgaaagatgaggtggacagtcctctaagccctatttagggaagcttttccaagccacaatcttaactacctacccaaaggatttgcattacccccagattctgtgccaacaaccttttaaggaaatacagtccttgggaaatgagttttgatggtgaattggggtgttaaggaagggaaagattgtcatagatggtagggctttgaaaatgcagggtatcagctgccactcctggcttcaacacattgagtcactgcctagacggttctcttggtcttattcccatcctggccaatgcttaaatactatttgttgaaaataattctttgagacagatttcagctacctcccttccaggttcgatttaacttggttgtaattgtcaatttgttgttataggtcttacctgtgtgaaagaaagaaaaagaaagaaagaaagaaagagaaaggaaattataaggtcaagttaacagttttgaggttttgtgtttttttctggaactacttcaagtgagaaaataaaaaaaaatggtgacaaagctgtacagatagagataatagaagacaaagagattaaaaggaaataaaaatgcatgattaaaaactaagaataaaaaacctatttttatgtttcctaaaggaaattgtttattctacagcctcagtaggtagacacaaacataaagatttccctagaagacatagagtgggatttgataacactgtctgttattttctgtacattgtggtaggtccaggaaatatgacattttcccccttgatgtgttattgttgttgttgggtggggtgggcattttgtttatttgtttggtggcaatcagtggtagtagggagtgggagggcttatattggtttttccagctattaaggggacatattgtgtcgttgtgcttttcacgttataaaatgtttatatttaccagtacagcactgggctttataaagactgcactcagaaccacactgcacagtccagttttttaaaaagctgctacatgacagacaggtaatcccactgagtgagttttgagaaacaaatcaaacgaagtaaacaagaaacataaaaaccaaatagcaaatgaataaaagcctgttcttgtaacttattcaacttttgccaaattcctaccaatcacttgctttttaaaagaaatgtataatagccaaaagagaaattatgtccctgttgtacagaagttagaatttttgactccaggcagcagtttgctcagtgatcttgaacaagttatccaattgcctctacatttgcatcagtttctctagctgcaaaatggggataatactatatacctacctcacagtgggagggcaggagattttgaggccctgaggttttaggtgggctgtgagggccaacgcttgacacaaagtccatgggttattattcaagaatgcacaggcccatcggccttttagaaagacaagacagggagtgcttgtttgatatttcaaggaataaagccggagctcctgaattgtagtccaccttaaaagagagacctgtattggagaatattttatttttttggcaaatttgatcttaccctttaccagttctataatttggttaaaagctgattatgtcctacaatgtcaaagtcagctaactgtcgtctacttaagacttctggtcatttccaacttatagaggaagggagtctctaaaatctcttcttcagaaggcacctcacttctcagacttaaaattccacatcaagtgttccattaaaagaagataaggcattctgagtgcaaacaaatgggggcttcttaaactacacaccagcagtcagtgaggaaaactttgaacaattattgagttgctttcttgggtctctataatcaataacctgtctgcagatatctatctatataaagatattatatataaatataaatttacatatatatgcacatgtatatatagttgtacatatatgtgtgtatatatatacttaaatgtaatatttacaaaataaaactgtgatctcgtctagagaaaatgtattcatattacaaactgctcttccatatttatgtaccatattatacctttttattattgttataattattatgggtatttctaattaatatgatgttgaaacctgtttggcaccttctggaagctaccaaaaaaatgacactccattgaagtgcttaaaagctgttctcataagaattctactggcctattgtaaaaaagaaaaaaaaaaagaaaaagaagaaagacacaaagaaaataatctaaacaccaaaaactaaacacaattccaatcctttttctgtacctcacgcgcataaatttgctgctcctatttttttttctgtttatgtgtttttatggatctaagttaaatcttttggcaatatataaaaatgtaaatagtaaactttatttattaagaatgtcatcttttttaatttatatttacacaattgttcatctaatttattttttctatacagttttaaatactcagacatattttgctgttcatgatatttttatcctgttctcatggatttgttttcccatactgttttctctgatctcaattacaggttggatctcacaaataataatgtcagagacagaaatattttgccactgttgattactatactttaaagttctatattatgaaaatatataatagcttgtacgcttcaaaaaaaaaaaaaaaaaaaaaaaaaaaaaaaaaaaaaaaaaaaaaaaaaaaaaaaa

SEQ ID NO: 857 - protein, 1627 aa, Homo sapiens
MRLWSWVLHLGLLSAALGCGLAERPRRARRDPRAGRPPRPAAGPATCATRAARGRRASPPPPPPPGGAWEAVRVPRRRQQREARGATEEPSPPSRALYFSGRGEQLRLRADLELPRDAFTLQVWLRAEGGQRSPAVITGLYDKCSYISRDRGWVVGIHTISDQDNKDPRYFFSLKTDRARQVTTINAHRSYLPGQWVYLAATYDGQFMKLYVNGAQVATSGEQVGGIFSPLTQKCKVLMLGGSALNHNYRGYIEHFSLWKVARTQREILSDMETHGAHTALPQLLLQENWDNVKHAWSPMKDGSSPKVEFSNAHGFLLDTSLEPPLCGQTLCDNTEVIASYNQLSSFRQPKVVRYRVVNLYEDDHKNPTVTREQVDFQHHQLAEAFKQYNISWELDVLEVSNSSLRRRLILANCDISKIGDENCDPECNHTLTGHDGGDCRHLRHPAFVKKQHNGVCDMDCNYERFNFDGGECCDPEITNVTQTCFDPDSPHRAYLDVNELKNILKLDGSTHLNIFFAKSSEEELAGVATWPWDKEALMHLGGIVLNPSFYGMPGHTHTMIHEIGHSLGLYHVFRGISEIQSCSDPCMETEPSFETGDLCNDTNPAPKHKSCGDPGPGNDTCGFHSFFNTPYNNFMSYADDDCTDSFTPNQVARMHCYLDLVYQGWQPSRKPAPVALAPQVLGHTTDSVTLEWFPPIDGHFFERELGSACHLCLEGRILVQYASNASSPMPCSPSGHWSPREAEGHPDVEQPCKSSVRTWSPNSAVNPHTVPPACPEPQGCYLELEFLYPLVPESLTIWVTFVSTDWDSSGAVNDIKLLAVSGKNISLGPQNVFCDVPLTIRLWDVGEEVYGIQIYTLDEHLEIDAAMLTSTADTPLCLQCKPLKYKVVRDPPLQMDVASILHLNRKFVDMDLNLGSVYQYWVITISGTEESEPSPAVTYIHGSGYCGDGIIQKDQGEQCDDMNKINGDGCSLFCRQEVSFNCIDEPSRCYFHDGDGVCEEFEQKTSIKDCGVYTPQGFLDQWASNASVSHQDQQCPGWVIIGQPAASQVCRTKVIDLSEGISQHAWYPCTISYPYSQLAQTTFWLRAYFSQPMVAAAVIVHLVTDGTYYGDQKQETISVQLLDTKDQSHDLGLHVLSCRNNPLIIPVVHDLSQPFYHSQAVRVSFSSPLVAISGVALRSFDNFDPVTLSSCQRGETYSPAEQSCVHFACEKTDCPELAVENASLNCSSSDRYHGAQCTVSCRTGYVLQIRRDDELIKSQTGPSVTVTCTEGKWNKQVACEPVDCSIPDHHQVYAASFSCPEGTTFGSQCSFQCRHPAQLKGNNSLLTCMEDGLWSFPEALCELMCLAPPPVPNADLQTARCRENKHKVGSFCKYKCKPGYHVPGSSRKSKKRAFKTQCTQDGSWQEGACVPVTCDPPPPKFHGLYQCTNGFQFNSECRIKCEDSDASQGLGSNVIHCRKDGTWNGSFHVCQEMQGQCSVPNELNSNLKLQCPDGYAIGSECATSCLDHNSESIILPMNVTVRDIPHWLNPTRVERVVCTAGLKWYPHPALIHCVKGCEPFMGDNYCDAINNRAFCNYDGGDCCTSTVKTKKVTPFPMSCDLQGDCACRDPQAQEHSRKDLRGYSHG

SEQ ID NO: 858 - DNA, 4606 bp, Homo sapiens
ggttcgcttcggcgtccgccgtctccgcagctgcctcctcttcctccttcgccaccgccgccaccgccgccgccgcccgcagcaccgcagcccctcccgccatggccgccgccggcgcccggctcagccccggccccggctcggggctccgggggcggccgaggctctgcttccacccggggccgccgccactgctgccgctgctgctgctgttcctgctcctgctgccgccgccgccgctgctggccggcgccaccgccgctgcctcgcgggagcccgacagcccgtgccggctgaagaccgtcacggtgtccacactgcccgccctgcgggagagcgacatcggctggagcggcgcccgcgccggggccggggctgggaccggggccggagccgccgccgccgccgcgtccccgggctctcctggctctgccggcaccgccgccgagtcgcgcctcctgctctttgtgcgtaacgagctgccggggcgcatcgcggtgcaggacgacctggacaacaccgagctgcccttcttcaccctggagatgtctggcacagcggcggacatctcgctggtgcactggagacagcagtggctggagaatggcaccttgtacttccacgtctccatgagcagctccgggcagctggcccaagccaccgcccccactctccaggagccctcggagattgttgaggagcagatgcacatcctccacatttctgtgatgggtggcctcatcgcgctgctgctgctgctgctggtgttcaccgtggcgctgtacgcccagcgacgttggcagaagcgtcgccgcatcccccagaagagcgcaagcacagaagccactcatgagatccactacatcccatctgtgctgctgggtccccaggcgcgggagagcttccgttcatcccggctgcaaacccacaattccgtcattggcgtgcccatccgggagactcccatcctggatgactatgactgtgaggaggatgaggagccacctaggcgggccaaccatgtctcccgcgaggacgagtttggcagccaggtgacccacactctggacagtctgggacatccaggggaagagaaggtggactttgagaagaaaggaggaatcagctttgggagagccaaggggacgtcgggctcagaggcagacgatgaaactcagctgacattctacacggagcagtaccgcagtcgccgccgcagcaaaggtttgctgaaaagcccagtgaacaagacagccctgacactgattgctgtgagttcctgcatcctggccatggtgtgtggcagccagatgtcttgtccactcactgtgaaggtgactctgcatgtgcccgagcacttcatagcagatggaagcagcttcgtggtgagtgaagggagctacctggacatctccgactggttaaacccggccaagctttccctgtattaccagatcaatgccacctccccatgggtgagggacctctgtggacaaaggacgacagatgcctgtgagcagctctgcgacccagaaaccggagagtgcagctgtcatgaaggctatgcccctgaccctgttcacagacacctgtgtgtgcgcagtgactggggacagagtgaaggaccttggccctacacgacacttgagaggggctatgatctggtgacaggggagcaagcccctgaaaagattctcaggtctactttcagcttgggccaaggcctctggcttcctgtcagcaaaagctttgtggttccgcctgtggagctgtccatcaaccccctggccagctgcaagaccgatgtgctcgtcacggaagaccctgcagatgtcagggaagaagcgatgctgtccacatactttgaaaccatcaatgacctgctgtcttccttcgggccagttcgtgactgctctcggaacaatgggggctgcactcgcaacttcaagtgtgtgtctgaccggcaggtggattcctcgggatgtgtgtgccctgaggagctgaaacccatgaaggatggctctggctgctacgaccactccaaaggcattgactgctctgatggctttaatggcggctgtgagcagctgtgcctgcagcagacgctgcccctgccctacgatgccacttcgagcaccatcttcatgttctgcggttgcgtggaggagtacaaactggctcctgatggaaaatcctgcttaatgctctcagatgtctgcgagggccccaagtgcctcaaacctgactccaaattcaatgataccctctttggagagatgctacatggttacaacaaccggacccagcatgtgaaccaaggccaagtcttccagatgacctttagggagaacaacttcatcaaggactttccccagctggccgatgggctgttggtgatcccgctgccggtggaggagcagtgccggggggtcctctccgagccccttccggacctccaactgctcactggagatatcaggtatgatgaggccatgggttaccccatggtgcagcagtggcgggtccggagcaacctctaccgtgtgaagctcagcaccatcaccctcgcagcaggcttcactaatgttctcaagatcctgaccaaggagagcagtcgggaggagctgctgtccttcatccagcactatggctcccactacatcgcagaggccctctatggctcagagctcacctgcatcatccactttcccagcaagaaggtccagcagcagctgtggctccagtatcagaaagagaccacagagctgggcagcaagaaggagctcaagtccatgcccttcatcacctacctctcaggtttgctgacagcccagatgctgtcagatgaccagctcatttcaggtgtggagattcgctgtgaggagaaggggcgctgtccatctacctgtcacctttgccgccggccaggcaaggagcagctgagccccacaccagtgctgctggaaatcaaccgtgtggtgccactttataccctcatccaagacaatggcacaaaggaggccttcaagagtgcactgatgagttcctactggtgctcagggaaaggggatgtgatcgatgactggtgcaggtgtgacctcagcgcctttgatgccaatgggctccccaactgcagcccccttctgcagccggtgctgcggctgtccccaacagtggagccctccagtactgtggtctccttggagtgggtggatgttcagccagctattgggaccaaggtctccgactatattctgcagcataagaaagtggatgaatacacagacactgacctgtacacaggagaattcctgagttttgctgatgacttactctctggcctgggcacatcttgtgtagcagctggtcgaagccatggagaggtccctgaagtcagtatctactcagtcatcttcaagtgtctggagcccgacggtctctacaagttcactctgtatgctgtggatacacgagggaggcactcagagctaagcacggtgaccctgaggacggcctgtccactggtagatgacaacaaggcagaagaaatagctgacaagatctacaatctgtacaatgggtacacaagtggaaaggagcagcagatggcctacaacacactgatggaggtctcagcctcgatgctgttccgagtccagcaccactacaactctcactatgaaaagtttggcgacttcgtctggagaagtgaggatgagctggggcccaggaaggcccacctgattctacggcgactggagagggtgagtagccactgctccagcctcctgcggagtgcctacatccagagccgcgtggaaacagtgccctatcttttctgccgcagcgaggaggtccggcctgcaggcatggtgtggtatagcatcctcaaggacaccaaaatcacgtgtgaggagaagatggtgtcaatggcccgaaacacgtacggggagtccaagggccggtgagggagggtattgccctccgtgagcacagagactctccatgggagggggagcagtattctcctggatcctggggcctgggtgggctgggggacagctgaggatgggcctagcagatgaagcttgccagcaaggccaaagcaaacggtttctcctgtggatagtggacagagacctttgtaaccaatggaattattcatttttctctatcttttattttttcaaagatattatttgactctatcaaaagtctctcctttttaaaccttttcttatggatggctgtcaatcccgaggcagaagttttcaggtggagaccaagcggcctttgctcttcttccttcttcctgccacactctgctttcttcctgccatggacccctggaggagacctatggagggacagttttgacctgacccctagaggagacagttttgacctcttcagcaccaggaaggaagctctgaggatggttgcagtgaggaagcatgggtctttaaggacttctctctcttttttgctggacattattgagtttgtgggaccctgcctcttcctgctacctgtgggtctgcccagagtccctgcaggcctgtccatgcattaaaaattcctattgtctctcaaaaaaaaaaaaaaa

SEQ ID NO: 859 - protein, 1288 aa, Homo sapiens
MAAAGARLSPGPGSGLRGRPRLCFHPGPPPLLPLLLLFLLLLPPPPLLAGATAAASREPDSPCRLKTVTVSTLPALRESDIGWSGARAGAGAGTGAGAAAAAASPGSPGSAGTAAESRLLLFVRNELPGRIAVQDDLDNTELPFFTLEMSGTAADISLVHWRQQWLENGTLYFHVSMSSSGQLAQATAPTLQEPSEIVEEQMHILHISVMGGLIALLLLLLVFTVALYAQRRWQKRRRIPQKSASTEATHEIHYIPSVLLGPQARESFRSSRLQTHNSVIGVPIRETPILDDYDCEEDEEPPRRANHVSREDEFGSQVTHTLDSLGHPGEEKVDFEKKGGISFGRAKGTSGSEADDETQLTFYTEQYRSRRRSKGLLKSPVNKTALTLIAVSSCILAMVCGSQMSCPLTVKVTLHVPEHFIADGSSFVVSEGSYLDISDWLNPAKLSLYYQINATSPWVRDLCGQRTTDACEQLCDPETGECSCHEGYAPDPVHRHLCVRSDWGQSEGPWPYTTLERGYDLVTGEQAPEKILRSTFSLGQGLWLPVSKSFVVPPVELSINPLASCKTDVLVTEDPADVREEAMLSTYFETINDLLSSFGPVRDCSRNNGGCTRNFKCVSDRQVDSSGCVCPEELKPMKDGSGCYDHSKGIDCSDGFNGGCEQLCLQQTLPLPYDATSSTIFMFCGCVEEYKLAPDGKSCLMLSDVCEGPKCLKPDSKFNDTLFGEMLHGYNNRTQHVNQGQVFQMTFRENNFIKDFPQLADGLLVIPLPVEEQCRGVLSEPLPDLQLLTGDIRYDEAMGYPMVQQWRVRSNLYRVKLSTITLAAGFTNVLKILTKESSREELLSFIQHYGSHYIAEALYGSELTCIIHFPSKKVQQQLWLQYQKETTELGSKKELKSMPFITYLSGLLTAQMLSDDQLISGVEIRCEEKGRCPSTCHLCRRPGKEQLSPTPVLLEINRVVPLYTLIQDNGTKEAFKSALMSSYWCSGKGDVIDDWCRCDLSAFDANGLPNCSPLLQPVLRLSPTVEPSSTVVSLEWVDVQPAIGTKVSDYILQHKKVDEYTDTDLYTGEFLSFADDLLSGLGTSCVAAGRSHGEVPEVSIYSVIFKCLEPDGLYKFTLYAVDTRGRHSELSTVTLRTACPLVDDNKAEEIADKIYNLYNGYTSGKEQQMAYNTLMEVSASMLFRVQHHYNSHYEKFGDFVWRSEDELGPRKAHLILRRLERVSSHCSSLLRSAYIQSRVETVPYLFCRSEEVRPAGMVWYSILKDTKITCEEKMVSMARNTYGESKGR

SEQ ID NO: 860 - DNA, 4756 bp, Homo sapiens
ggttcgcttcggcgtccgccgtctccgcagctgcctcctcttcctccttcgccaccgccgccaccgccgccgccgcccgcagcaccgcagcccctcccgccatggccgccgccggcgcccggctcagccccggccccggctcggggctccgggggcggccgaggctctgcttccacccggggccgccgccactgctgccgctgctgctgctgttcctgctcctgctgccgccgccgccgctgctggccggcgccaccgccgctgcctcgcgggagcccgacagcccgtgccggctgaagaccgtcacggtgtccacactgcccgccctgcgggagagcgacatcggctggagcggcgcccgcgccggggccggggctgggaccggggccggagccgccgccgccgccgcgtccccgggctctcctggctctgccggcaccgccgccgagtcgcgcctcctgctctttgtgcgtaacgagctgccggggcgcatcgcggtgcaggacgacctggacaacaccgagctgcccttcttcaccctggagatgtctggcacagcggcggacatctcgctggtgcactggagacagcagtggctggagaatggcaccttgtacttccacgtctccatgagcagctccgggcagctggcccaagccaccgcccccactctccaggagccctcggagattgttgaggagcagatgcacatcctccacatttctgtgatgggtggcctcatcgcgctgctgctgctgctgctggtgttcaccgtggcgctgtacgcccagcgacgttggcagaagcgtcgccgcatcccccagaagagcgcaagcacagaagccactcatgagatccactacatcccatctgtgctgctgggtccccaggcgcgggagagcttccgttcatcccggctgcaaacccacaattccgtcattggcgtgcccatccgggagactcccatcctggatgactatgactgtgaggaggatgaggagccacctaggcgggccaaccatgtctcccgcgaggacgagtttggcagccaggtgacccacactctggacagtctgggacatccaggggaagagaaggtggactttgagaagaaagcagcagctgaggcgactcaggagacagtggagtccctgatgcagaagttcaaggagagtttccgcgctaacacgcccatcgagatcggtcagctgcaaccacccctgcgcagcacatcggcagggaagaggaagcggaggagcaagtctcgaggaggaatcagctttgggagagccaaggggacgtcgggctcagaggcagacgatgaaactcagctgacattctacacggagcagtaccgcagtcgccgccgcagcaaaggtttgctgaaaagcccagtgaacaagacagccctgacactgattgctgtgagttcctgcatcctggccatggtgtgtggcagccagatgtcttgtccactcactgtgaaggtgactctgcatgtgcccgagcacttcatagcagatggaagcagcttcgtggtgagtgaagggagctacctggacatctccgactggttaaacccggccaagctttccctgtattaccagatcaatgccacctccccatgggtgagggacctctgtggacaaaggacgacagatgcctgtgagcagctctgcgacccagaaaccggagagtgcagctgtcatgaaggctatgcccctgaccctgttcacagacacctgtgtgtgcgcagtgactggggacagagtgaaggaccttggccctacacgacacttgagaggggctatgatctggtgacaggggagcaagcccctgaaaagattctcagcttgggccaaggcctctggcttcctgtcagcaaaagctttgtggttccgcctgtggagctgtccatcaaccccctggccagctgcaagaccgatgtgctcgtcacggaagaccctgcagatgtcagggaagaagcgatgctgtccacatactttgaaaccatcaatgacctgctgtcttccttcgggccagttcgtgactgctctcggaacaatgggggctgcactcgcaacttcaagtgtgtgtctgaccggcaggtggattcctcgggatgtgtgtgccctgaggagctgaaacccatgaaggatggctctggctgctacgaccactccaaaggcattgactgctctgatggctttaatggcggctgtgagcagctgtgcctgcagcagacgctgcccctgccctacgatgccacttcgagcaccatcttcatgttctgcggttgcgtggaggagtacaaactggctcctgatggaaaatcctgcttaatgctctcagatgtctgcgagggccccaagtgcctcaaacctgactccaaattcaatgataccctctttggagagatgctacatggttacaacaaccggacccagcatgtgaaccaaggccaagtcttccagatgacctttagggagaacaacttcatcaaggactttccccagctggccgatgggctgttggtgatcccgctgccggtggaggagcagtgccggggggtcctctccgagccccttccggacctccaactgctcactggagatatcaggtatgatgaggccatgggttaccccatggtgcagcagtggcgggtccggagcaacctctaccgtgtgaagctcagcaccatcaccctcgcagcaggcttcactaatgttctcaagatcctgaccaaggagagcagtcgggaggagctgctgtccttcatccagcactatggctcccactacatcgcagaggccctctatggctcagagctcacctgcatcatccactttcccagcaagaaggtccagcagcagctgtggctccagtatcagaaagagaccacagagctgggcagcaagaaggagctcaagtccatgcccttcatcacctacctctcaggtttgctgacagcccagatgctgtcagatgaccagctcatttcaggtgtggagattcgctgtgaggagaaggggcgctgtccatctacctgtcacctttgccgccggccaggcaaggagcagctgagccccacaccagtgctgctggaaatcaaccgtgtggtgccactttataccctcatccaagacaatggcacaaaggaggccttcaagagtgcactgatgagttcctactggtgctcagggaaaggggatgtgatcgatgactggtgcaggtgtgacctcagcgcctttgatgccaatgggctccccaactgcagcccccttctgcagccggtgctgcggctgtccccaacagtggagccctccagtactgtggtctccttggagtgggtggatgttcagccagctattgggaccaaggtctccgactatattctgcagcataagaaagtggatgaatacacagacactgacctgtacacaggagaattcctgagttttgctgatgacttactctctggcctgggcacatcttgtgtagcagctggtcgaagccatggagaggtccctgaagtcagtatctactcagtcatcttcaagtgtctggagcccgacggtctctacaagttcactctgtatgctgtggatacacgagggaggcactcagagctaagcacggtgaccctgaggacggcctgtccactggtagatgacaacaaggcagaagaaatagctgacaagatctacaatctgtacaatgggtacacaagtggaaaggagcagcagatggcctacaacacactgatggaggtctcagcctcgatgctgttccgagtccagcaccactacaactctcactatgaaaagtttggcgacttcgtctggagaagtgaggatgagctggggcccaggaaggcccacctgattctacggcgactggagagggtgagtagccactgctccagcctcctgcggagtgcctacatccagagccgcgtggaaacagtgccctatcttttctgccgcagcgaggaggtccggcctgcaggcatggtgtggtatagcatcctcaaggacaccaaaatcacgtgtgaggagaagatggtgtcaatggcccgaaacacgtacggggagtccaagggccggtgagggagggtattgccctccgtgagcacagagactctccatgggagggggagcagtattctcctggatcctggggcctgggtgggctgggggacagctgaggatgggcctagcagatgaagcttgccagcaaggccaaagcaaacggtttctcctgtggatagtggacagagacctttgtaaccaatggaattattcatttttctctatcttttattttttcaaagatattatttgactctatcaaaagtctctcctttttaaaccttttcttatggatggctgtcaatcccgaggcagaagttttcaggtggagaccaagcggcctttgctcttcttccttcttcctgccacactctgctttcttcctgccatggacccctggaggagacctatggagggacagttttgacctgacccctagaggagacagttttgacctcttcagcaccaggaaggaagctctgaggatggttgcagtgaggaagcatgggtctttaaggacttctctctcttttttgctggacattattgagtttgtgggaccctgcctcttcctgctacctgtgggtctgcccagagtccctgcaggcctgtccatgcattaaaaattcctattgtctctcaaaaaaaaaaaaaaaaaaaaaaaa

SEQ ID NO: 861 - protein, 1335 aa, Homo sapiens
MAAAGARLSPGPGSGLRGRPRLCFHPGPPPLLPLLLLFLLLLPPPPLLAGATAAASREPDSPCRLKTVTVSTLPALRESDIGWSGARAGAGAGTGAGAAAAAASPGSPGSAGTAAESRLLLFVRNELPGRIAVQDDLDNTELPFFTLEMSGTAADISLVHWRQQWLENGTLYFHVSMSSSGQLAQATAPTLQEPSEIVEEQMHILHISVMGGLIALLLLLLVFTVALYAQRRWQKRRRIPQKSASTEATHEIHYIPSVLLGPQARESFRSSRLQTHNSVIGVPIRETPILDDYDCEEDEEPPRRANHVSREDEFGSQVTHTLDSLGHPGEEKVDFEKKAAAEATQETVESLMQKFKESFRANTPIEIGQLQPPLRSTSAGKRKRRSKSRGGISFGRAKGTSGSEADDETQLTFYTEQYRSRRRSKGLLKSPVNKTALTLIAVSSCILAMVCGSQMSCPLTVKVTLHVPEHFIADGSSFVVSEGSYLDISDWLNPAKLSLYYQINATSPWVRDLCGQRTTDACEQLCDPETGECSCHEGYAPDPVHRHLCVRSDWGQSEGPWPYTTLERGYDLVTGEQAPEKILSLGQGLWLPVSKSFVVPPVELSINPLASCKTDVLVTEDPADVREEAMLSTYFETINDLLSSFGPVRDCSRNNGGCTRNFKCVSDRQVDSSGCVCPEELKPMKDGSGCYDHSKGIDCSDGFNGGCEQLCLQQTLPLPYDATSSTIFMFCGCVEEYKLAPDGKSCLMLSDVCEGPKCLKPDSKFNDTLFGEMLHGYNNRTQHVNQGQVFQMTFRENNFIKDFPQLADGLLVIPLPVEEQCRGVLSEPLPDLQLLTGDIRYDEAMGYPMVQQWRVRSNLYRVKLSTITLAAGFTNVLKILTKESSREELLSFIQHYGSHYIAEALYGSELTCIIHFPSKKVQQQLWLQYQKETTELGSKKELKSMPFITYLSGLLTAQMLSDDQLISGVEIRCEEKGRCPSTCHLCRRPGKEQLSPTPVLLEINRVVPLYTLIQDNGTKEAFKSALMSSYWCSGKGDVIDDWCRCDLSAFDANGLPNCSPLLQPVLRLSPTVEPSSTVVSLEWVDVQPAIGTKVSDYILQHKKVDEYTDTDLYTGEFLSFADDLLSGLGTSCVAAGRSHGEVPEVSIYSVIFKCLEPDGLYKFTLYAVDTRGRHSELSTVTLRTACPLVDDNKAEEIADKIYNLYNGYTSGKEQQMAYNTLMEVSASMLFRVQHHYNSHYEKFGDFVWRSEDELGPRKAHLILRRLERVSSHCSSLLRSAYIQSRVETVPYLFCRSEEVRPAGMVWYSILKDTKITCEEKMVSMARNTYGESKGR

SEQ ID NO: 862 - DNA, 4768 bp, Homo sapiens
ggttcgcttcggcgtccgccgtctccgcagctgcctcctcttcctccttcgccaccgccgccaccgccgccgccgcccgcagcaccgcagcccctcccgccatggccgccgccggcgcccggctcagccccggccccggctcggggctccgggggcggccgaggctctgcttccacccggggccgccgccactgctgccgctgctgctgctgttcctgctcctgctgccgccgccgccgctgctggccggcgccaccgccgctgcctcgcgggagcccgacagcccgtgccggctgaagaccgtcacggtgtccacactgcccgccctgcgggagagcgacatcggctggagcggcgcccgcgccggggccggggctgggaccggggccggagccgccgccgccgccgcgtccccgggctctcctggctctgccggcaccgccgccgagtcgcgcctcctgctctttgtgcgtaacgagctgccggggcgcatcgcggtgcaggacgacctggacaacaccgagctgcccttcttcaccctggagatgtctggcacagcggcggacatctcgctggtgcactggagacagcagtggctggagaatggcaccttgtacttccacgtctccatgagcagctccgggcagctggcccaagccaccgcccccactctccaggagccctcggagattgttgaggagcagatgcacatcctccacatttctgtgatgggtggcctcatcgcgctgctgctgctgctgctggtgttcaccgtggcgctgtacgcccagcgacgttggcagaagcgtcgccgcatcccccagaagagcgcaagcacagaagccactcatgagatccactacatcccatctgtgctgctgggtccccaggcgcgggagagcttccgttcatcccggctgcaaacccacaattccgtcattggcgtgcccatccgggagactcccatcctggatgactatgactgtgaggaggatgaggagccacctaggcgggccaaccatgtctcccgcgaggacgagtttggcagccaggtgacccacactctggacagtctgggacatccaggggaagagaaggtggactttgagaagaaagcagcagctgaggcgactcaggagacagtggagtccctgatgcagaagttcaaggagagtttccgcgctaacacgcccatcgagatcggtcagctgcaaccacccctgcgcagcacatcggcagggaagaggaagcggaggagcaagtctcgaggaggaatcagctttgggagagccaaggggacgtcgggctcagaggcagacgatgaaactcagctgacattctacacggagcagtaccgcagtcgccgccgcagcaaaggtttgctgaaaagcccagtgaacaagacagccctgacactgattgctgtgagttcctgcatcctggccatggtgtgtggcagccagatgtcttgtccactcactgtgaaggtgactctgcatgtgcccgagcacttcatagcagatggaagcagcttcgtggtgagtgaagggagctacctggacatctccgactggttaaacccggccaagctttccctgtattaccagatcaatgccacctccccatgggtgagggacctctgtggacaaaggacgacagatgcctgtgagcagctctgcgacccagaaaccggagagtgcagctgtcatgaaggctatgcccctgaccctgttcacagacacctgtgtgtgcgcagtgactggggacagagtgaaggaccttggccctacacgacacttgagaggggctatgatctggtgacaggggagcaagcccctgaaaagattctcaggtctactttcagcttgggccaaggcctctggcttcctgtcagcaaaagctttgtggttccgcctgtggagctgtccatcaaccccctggccagctgcaagaccgatgtgctcgtcacggaagaccctgcagatgtcagggaagaagcgatgctgtccacatactttgaaaccatcaatgacctgctgtcttccttcgggccagttcgtgactgctctcggaacaatgggggctgcactcgcaacttcaagtgtgtgtctgaccggcaggtggattcctcgggatgtgtgtgccctgaggagctgaaacccatgaaggatggctctggctgctacgaccactccaaaggcattgactgctctgatggctttaatggcggctgtgagcagctgtgcctgcagcagacgctgcccctgccctacgatgccacttcgagcaccatcttcatgttctgcggttgcgtggaggagtacaaactggctcctgatggaaaatcctgcttaatgctctcagatgtctgcgagggccccaagtgcctcaaacctgactccaaattcaatgataccctctttggagagatgctacatggttacaacaaccggacccagcatgtgaaccaaggccaagtcttccagatgacctttagggagaacaacttcatcaaggactttccccagctggccgatgggctgttggtgatcccgctgccggtggaggagcagtgccggggggtcctctccgagccccttccggacctccaactgctcactggagatatcaggtatgatgaggccatgggttaccccatggtgcagcagtggcgggtccggagcaacctctaccgtgtgaagctcagcaccatcaccctcgcagcaggcttcactaatgttctcaagatcctgaccaaggagagcagtcgggaggagctgctgtccttcatccagcactatggctcccactacatcgcagaggccctctatggctcagagctcacctgcatcatccactttcccagcaagaaggtccagcagcagctgtggctccagtatcagaaagagaccacagagctgggcagcaagaaggagctcaagtccatgcccttcatcacctacctctcaggtttgctgacagcccagatgctgtcagatgaccagctcatttcaggtgtggagattcgctgtgaggagaaggggcgctgtccatctacctgtcacctttgccgccggccaggcaaggagcagctgagccccacaccagtgctgctggaaatcaaccgtgtggtgccactttataccctcatccaagacaatggcacaaaggaggccttcaagagtgcactgatgagttcctactggtgctcagggaaaggggatgtgatcgatgactggtgcaggtgtgacctcagcgcctttgatgccaatgggctccccaactgcagcccccttctgcagccggtgctgcggctgtccccaacagtggagccctccagtactgtggtctccttggagtgggtggatgttcagccagctattgggaccaaggtctccgactatattctgcagcataagaaagtggatgaatacacagacactgacctgtacacaggagaattcctgagttttgctgatgacttactctctggcctgggcacatcttgtgtagcagctggtcgaagccatggagaggtccctgaagtcagtatctactcagtcatcttcaagtgtctggagcccgacggtctctacaagttcactctgtatgctgtggatacacgagggaggcactcagagctaagcacggtgaccctgaggacggcctgtccactggtagatgacaacaaggcagaagaaatagctgacaagatctacaatctgtacaatgggtacacaagtggaaaggagcagcagatggcctacaacacactgatggaggtctcagcctcgatgctgttccgagtccagcaccactacaactctcactatgaaaagtttggcgacttcgtctggagaagtgaggatgagctggggcccaggaaggcccacctgattctacggcgactggagagggtgagtagccactgctccagcctcctgcggagtgcctacatccagagccgcgtggaaacagtgccctatcttttctgccgcagcgaggaggtccggcctgcaggcatggtgtggtatagcatcctcaaggacaccaaaatcacgtgtgaggagaagatggtgtcaatggcccgaaacacgtacggggagtccaagggccggtgagggagggtattgccctccgtgagcacagagactctccatgggagggggagcagtattctcctggatcctggggcctgggtgggctgggggacagctgaggatgggcctagcagatgaagcttgccagcaaggccaaagcaaacggtttctcctgtggatagtggacagagacctttgtaaccaatggaattattcatttttctctatcttttattttttcaaagatattatttgactctatcaaaagtctctcctttttaaaccttttcttatggatggctgtcaatcccgaggcagaagttttcaggtggagaccaagcggcctttgctcttcttccttcttcctgccacactctgctttcttcctgccatggacccctggaggagacctatggagggacagttttgacctgacccctagaggagacagttttgacctcttcagcaccaggaaggaagctctgaggatggttgcagtgaggaagcatgggtctttaaggacttctctctcttttttgctggacattattgagtttgtgggaccctgcctcttcctgctacctgtgggtctgcccagagtccctgcaggcctgtccatgcattaaaaattcctattgtctctcaaaaaaaaaaaaaaaaaaaaaaaa

SEQ ID NO: 863 - protein, 1339 aa, Homo sapiens
MAAAGARLSPGPGSGLRGRPRLCFHPGPPPLLPLLLLFLLLLPPPPLLAGATAAASREPDSPCRLKTVTVSTLPALRESDIGWSGARAGAGAGTGAGAAAAAASPGSPGSAGTAAESRLLLFVRNELPGRIAVQDDLDNTELPFFTLEMSGTAADISLVHWRQQWLENGTLYFHVSMSSSGQLAQATAPTLQEPSEIVEEQMHILHISVMGGLIALLLLLLVFTVALYAQRRWQKRRRIPQKSASTEATHEIHYIPSVLLGPQARESFRSSRLQTHNSVIGVPIRETPILDDYDCEEDEEPPRRANHVSREDEFGSQVTHTLDSLGHPGEEKVDFEKKAAAEATQETVESLMQKFKESFRANTPIEIGQLQPPLRSTSAGKRKRRSKSRGGISFGRAKGTSGSEADDETQLTFYTEQYRSRRRSKGLLKSPVNKTALTLIAVSSCILAMVCGSQMSCPLTVKVTLHVPEHFIADGSSFVVSEGSYLDISDWLNPAKLSLYYQINATSPWVRDLCGQRTTDACEQLCDPETGECSCHEGYAPDPVHRHLCVRSDWGQSEGPWPYTTLERGYDLVTGEQAPEKILRSTFSLGQGLWLPVSKSFVVPPVELSINPLASCKTDVLVTEDPADVREEAMLSTYFETINDLLSSFGPVRDCSRNNGGCTRNFKCVSDRQVDSSGCVCPEELKPMKDGSGCYDHSKGIDCSDGFNGGCEQLCLQQTLPLPYDATSSTIFMFCGCVEEYKLAPDGKSCLMLSDVCEGPKCLKPDSKFNDTLFGEMLHGYNNRTQHVNQGQVFQMTFRENNFIKDFPQLADGLLVIPLPVEEQCRGVLSEPLPDLQLLTGDIRYDEAMGYPMVQQWRVRSNLYRVKLSTITLAAGFTNVLKILTKESSREELLSFIQHYGSHYIAEALYGSELTCIIHFPSKKVQQQLWLQYQKETTELGSKKELKSMPFITYLSGLLTAQMLSDDQLISGVEIRCEEKGRCPSTCHLCRRPGKEQLSPTPVLLEINRVVPLYTLIQDNGTKEAFKSALMSSYWCSGKGDVIDDWCRCDLSAFDANGLPNCSPLLQPVLRLSPTVEPSSTVVSLEWVDVQPAIGTKVSDYILQHKKVDEYTDTDLYTGEFLSFADDLLSGLGTSCVAAGRSHGEVPEVSIYSVIFKCLEPDGLYKFTLYAVDTRGRHSELSTVTLRTACPLVDDNKAEEIADKIYNLYNGYTSGKEQQMAYNTLMEVSASMLFRVQHHYNSHYEKFGDFVWRSEDELGPRKAHLILRRLERVSSHCSSLLRSAYIQSRVETVPYLFCRSEEVRPAGMVWYSILKDTKITCEEKMVSMARNTYGESKGR

SEQ ID NO: 864 - DNA, 1772 bp, Homo sapiens
gcttgtcgtgcagctggccccaagcgcgcggggcaaggcggccctgcaggggtgagctttcctctgagaacccggggccttagcgacacgtaatccagttttccgtctccttggtgcagatgaagaaaccgacgcccatgggcgaaagggacctgctcaagttcactcaagaccacagagctgggcagcaagaaggagctcaagtccatgcccttcatcacctacctctcaggtttgctgacagcccagatgctgtcagatgaccagctcatttcaggtgtggagattcgctgtgaggagaaggggcgctgtccatctacctgtcacctttgccgccggccaggcaaggagcagctgagccccacaccagtgctgctggaaatcaaccgtgtggtgccactttataccctcatccaagacaatggcacaaaggaggccttcaagagtgcactgatgagttcctactggtgctcagggaaaggggatgtgatcgatgactggtgcaggtgtgacctcagcgcctttgatgccaatgggctccccaactgcagcccccttctgcagccggtgctgcggctgtccccaacagtggagccctccagtactgtggtctccttggagtgggtggatgttcagccagctattgggaccaaggtctccgactatattctgcagcataagaaagtggatgaatacacagacactgacctgtacacaggagaattcctgagttttgctgatgacttactctctggcctgggcacatcttgtgtagcagctggtcgaagccatggagaggtccctgaagtcagtatctactcagtcatcttcaagtgtctggagcccgacggtctctacaagttcactctgtatgctgtggatacacgagggaggcactcagagctaagcacggtgaccctgaggacggcctgtccactggtagatgacaacaaggcagaagaaatagctgacaagatctacaatctgtacaatgggtacacaagtggaaaggagcagcagatggcctacaacacactgatggaggtctcagcctcgatgctgttccgagtccagcaccactacaactctcactatgaaaagtttggcgacttcgtctggagaagtgaggatgagctggggcccaggaaggcccacctgattctacggcgactggagagggtgagtagccactgctccagcctcctgcggagtgcctacatccagagccgcgtggaaacagtgccctatcttttctgccgcagcgaggaggtccggcctgcaggcatggtgtggtatagcatcctcaaggacaccaaaatcacgtgtgaggagaagatggtgtcaatggcccgaaacacatattatttgactctatcaaaagtctctcctttttaaaccttttcttatggatggctgtcaatcccgaggcagaagttttcaggtggagaccaagcggcctttgctcttcttccttcttcctgccacactctgctttcttcctgccatggacccctggaggagacctatggagggacagttttgacctgacccctagaggagacagttttgacctcttcagcaccaggaaggaagctctgaggatggttgcagtgaggaagcatgggtctttaaggacttctctctcttttttgctggacattattgagtttgtgggaccctgcctcttcctgctacctgtgggtctgcccagagtccctgcaggcctgtccatgcattaaaaattcctattgtctctcaaaaaaaaaaaaaaa

SEQ ID NO: 865 - protein, 395 aa, Homo sapiens
MPFITYLSGLLTAQMLSDDQLISGVEIRCEEKGRCPSTCHLCRRPGKEQLSPTPVLLEINRVVPLYTLIQDNGTKEAFKSALMSSYWCSGKGDVIDDWCRCDLSAFDANGLPNCSPLLQPVLRLSPTVEPSSTVVSLEWVDVQPAIGTKVSDYILQHKKVDEYTDTDLYTGEFLSFADDLLSGLGTSCVAAGRSHGEVPEVSIYSVIFKCLEPDGLYKFTLYAVDTRGRHSELSTVTLRTACPLVDDNKAEEIADKIYNLYNGYTSGKEQQMAYNTLMEVSASMLFRVQHHYNSHYEKFGDFVWRSEDELGPRKAHLILRRLERVSSHCSSLLRSAYIQSRVETVPYLFCRSEEVRPAGMVWYSILKDTKITCEEKMVSMARNTYYLTLSKVSPF

SEQ ID NO: 866 - DNA, 1968 bp, Homo sapiens
agcttcccgagcgagccctgcggccgccggagcagctcccgcggcggagcaggagccggatggtcagaggagcccggcagccccagcagccgcggagtcgcctggcccccagactgactggcacagtggagaaaccgcctcgaaaacggagaagcagtatcagaggttctggtgatagcagtcattcacaatctcaaggggaaagatatcaacatttcactgaaaagactgaatttgctcttaaagaaatcatgtcctctggaggtgctgaagatgatatcccacagggagagaggaaaacagttacagatttttgttatcttctggataaatctaagcaactgttcaatgggttaagagatttgccacaatatggacagaagcagtggcagtcctattttggaagaacttttgatgtttacaccaaactctggaagttccagcagcagcatcgacaagtcttggataatcggtatggcttgaagcgctggcaaataggagaaattgcttccaagattgggcagctatactatcattattacttacgcacatcggaaaccagctatctgaatgaggctttttccttctattctgcaatcagacagagatcatattattctcaagtcaataaagaggacagacctgaattggtagttaagaagttacgatattatgcaagatttatagtagtttgtcttcttctcaacaaaatggatgttgtaaaggatctggtaaaggaattgtcagatgaaattgaagattatactcaccgatttaatactgaagatcaagtggaatggaacttggtgcttcaagaagtagcagctttcattgaggcggatcctgtaatggtattaaatgatgataataccattgttatcacatcgaatcgccttgctgaaacaggagccccattgctggaacagggcatgattgtgggacagttgtctctggctgacgcactcattattggtaattgtaataatcaggttaagttcagtgaactaactgttgacatgttccggatgttacaagctctggaaagggagccaatgaatttagcttcccagatgaataaaccaggaatgcaggaatcagctgacaagcctactagacgagaaaacccccacaagtatctgctctacaaaccaaccttcagccagctatataccttcttagcagcgtcttttaaggagctgcctgccaatagcgtgcttctgatttacctgtcggccactggcgttttccccacaggtcgttctgatagtgaaggtccttatgattttggaggtgtacttactaatagtaaccgggatattattaatggagatgccatccacaaacgaaatcagtcccacaaggaaatgcactgccttcatcccggggatctctatcctttcaccaggaagccactgttcatcattgtggattcgtctaatagtgttgcgtataagaatttcacaaacttgtttggacagccactagtctgcttgctttctcctacagcatatccaaaagctttacaagatcaatctcagcgaggtagcctcttcactctctttttgaacaatcctctaatggccttcctatttgtctctggattgtcaagcatgcgcagaggcctatgggaaaagtgtcaagaatatcttcgaaaaatcaaccgtgatattgcccagctactgactcattcacgttcaatagatcaggcatttctccagttttttggagatgaatttcttcgcttgctcctcacaagatttatcttttgttcagccaccatgaggatgcacaagatttttcgggaaacacgaaattatccagaatcatatccacaactgccaagggatgaaacagtggagaatcctcatctccagaagcacattttggaattagcatccattctggatgttcgaaacgtgttctttgagaataccattgatgactattaaaacaaaaaccctgttgtcg

SEQ ID NO: 867 - protein, 629 aa, Homo sapiens
MVRGARQPQQPRSRLAPRLTGTVEKPPRKRRSSIRGSGDSSHSQSQGERYQHFTEKTEFALKEIMSSGGAEDDIPQGERKTVTDFCYLLDKSKQLFNGLRDLPQYGQKQWQSYFGRTFDVYTKLWKFQQQHRQVLDNRYGLKRWQIGEIASKIGQLYYHYYLRTSETSYLNEAFSFYSAIRQRSYYSQVNKEDRPELVVKKLRYYARFIVVCLLLNKMDVVKDLVKELSDEIEDYTHRFNTEDQVEWNLVLQEVAAFIEADPVMVLNDDNTIVITSNRLAETGAPLLEQGMIVGQLSLADALIIGNCNNQVKFSELTVDMFRMLQALEREPMNLASQMNKPGMQESADKPTRRENPHKYLLYKPTFSQLYTFLAASFKELPANSVLLIYLSATGVFPTGRSDSEGPYDFGGVLTNSNRDIINGDAIHKRNQSHKEMHCLHPGDLYPFTRKPLFIIVDSSNSVAYKNFTNLFGQPLVCLLSPTAYPKALQDQSQRGSLFTLFLNNPLMAFLFVSGLSSMRRGLWEKCQEYLRKINRDIAQLLTHSRSIDQAFLQFFGDEFLRLLLTRFIFCSATMRMHKIFRETRNYPESYPQLPRDETVENPHLQKHILELASILDVRNVFFENTIDDY

SEQ ID NO: 868 - DNA, 1563 bp, Homo sapiens
ctccgccgctgccgccgccgctgctacagccgccgccgccgctgttgccgcggcttgttattcttaaaatggcgccgctagacctggacaagtatgtggaaatagcgcggctgtgcaagtacctgccagagaacgacctgaagcggctatgtgactacgtttgtgacctcctcttagaagagtcaaatgttcagccagtatcaacaccagtaacagtgtgtggagatatccatggacagttttatgacctttgtgaactgttcagaactggaggtcaggttcctgacacaaactacatatttatgggtgattttgtagacagaggttactatagtttggagaccttcacttaccttcttgcattaaaggctaaatggcctgatcgtattacacttttgcgaggaaatcatgagagtagacagataacacaggtctatggattttatgatgagtgccaaaccaaatatggaaatgctaatgcctggagatactgtaccaaagtttttgacatgctcacagtagcagctttaatagatgagcagattttgtgtgtccatggtggtttatctcctgatatcaaaacactggatcaaattcgaaccatcgaacggaatcaggaaattcctcataaaggagcattttgtgatctggtttggtcagatcctgaagatgtggatacctgggctatcagtccccgaggagcaggttggctttttggagcaaaggtcacaaatgagtttgttcatatcaacaacttaaaactcatctgcagagcacatcaactagtgcacgaaggctataaatttatgtttgatgagaagctggtgacagtatggtctgctcctaattactgctatcgttgtggaaatattgcttcgatcatggtcttcaaagatgtaaatacaagagaaccaaagttattccgggcagttccagattcagaacgtgttattcctcccagaacgacaacgccatatttcctttgaggccttcgcccatcctgctgacccatttttctgccctcttcttaccccaattttcttgtattaccctctacaatatactttttattgagcactttgctgctgaaatgctgcctcttgccttttttttttttaaattttaaattatctaaatttattgtttgttgtggtgtctatagcaaagtttttctatcaattttcccccatcccatccccaccctggactcatttgagaagacttgagaaatgtcttaatactcacactgctgcatgtagctcttgcttatttactggtctgggaaacaggatgtgtttccttttttttaaaagccaattgacagattacacctaaatactcctccttttgtatcattcagccttttgttttagtttggtaagttttaagaaatttcagcagcaaagttgttattcagtgggcacgatggactccaaatgcctcaagttatgtatacctgtcccagatgtaaacttcattgtcctttgttggatgatattttaaatggatataaaataaattggtctaaaggacaaaaaaaaaaaaaaaaaaaaaaaaaaaaaa

SEQ ID NO: 869 - protein, 305 aa, Homo sapiens
MAPLDLDKYVEIARLCKYLPENDLKRLCDYVCDLLLEESNVQPVSTPVTVCGDIHGQFYDLCELFRTGGQVPDTNYIFMGDFVDRGYYSLETFTYLLALKAKWPDRITLLRGNHESRQITQVYGFYDECQTKYGNANAWRYCTKVFDMLTVAALIDEQILCVHGGLSPDIKTLDQIRTIERNQEIPHKGAFCDLVWSDPEDVDTWAISPRGAGWLFGAKVTNEFVHINNLKLICRAHQLVHEGYKFMFDEKLVTVWSAPNYCYRCGNIASIMVFKDVNTREPKLFRAVPDSERVIPPRTTTPYFL

SEQ ID NO: 870 - DNA, 4204 bp, Homo sapiens
ccggggctgagctgcggcggcgcctgacaatgccccctcgcgccccggcctcggcgcccgctcccggctccagcgcgcctgcacgtacgtagccttcacgtgtgtgtggatacggagtgcatgtgtggagacagaggaatatgctccaacaaatttcggatagaggcgccgaagacaggacgtggggaagctaaagaagtaaacaggtcatggcacgtttaacaaaaagacgacaggcggatacaaaagctatccagcatctttgggcagccattgagattatacggaaccagaagcagattgccaacattgaccgtattacaaagtatatgtctcgagtccacggtatgcaccctaaagagaccacccgtcagctgagcttagctgtgaaagatggtcttattgtcgaaactctaacagtgggctgcaaaggttcaaaagctggtattgaacaagaaggatattggttgccaggagatgagattgactgggaaacagaaaatcatgactggtattgttttgaatgccatttgcctggagaggtgttgatatgtgacctgtgttttcgtgtgtatcattccaagtgtttgtctgatgagttcaggcttagagacagcagtagtccctggcagtgcccagtttgcaggagcattaagaagaagaatacaaacaaacaggagatgggcacatacctcagattcattgtctcccgcatgaaggagagggctatagatcttaataaaaaggggaaggacaataaacacccgatgtacaggaggctggtgcactcagctgtggacgttcccaccattcaagagaaagtgaatgaagggaaataccgaagttatgaagagttcaaagctgatgcccaattgcttctccacaataccgtgattttctatggagcagacagtgagcaagctgacattgcgaggatgctatataaagacacatgtcatgagctggatgaactgcagctttgcaagaattgcttttacttgtcaaatgctcgtcctgacaactggttctgttatccttgtatacctaatcatgagctggtttgggctaaaatgaaaggttttgggttttggccagccaaagtcatgcagaaagaagacaatcaagtcgacgttcgcttctttggccaccaccaccagagggcctggattccttctgaaaacattcaagatatcacagtcaacattcatcggctgcacgtgaagcgcagtatgggttggaaaaaggcctgtgatgagctggagctgcatcagcgtttcctacgagaagggagattttggaaatctaagaatgaggaccgaggtgaggaagaggcagaatccagtatctcctccaccagtaatgagcagctaaaggtcactcaagaaccaagagcaaagaaaggacgacgtaatcaaagtgtggagcccaaaaaggaagaaccagagcctgaaacagaagcagtaagttctagccaggaaatacccacgatgcctcagcccatcgaaaaagtctccgtgtcaactcagacaaagaagttaagtgcctcttcaccaagaatgctgcatcggagcacccagaccacaaacgacggcgtgtgtcagagcatgtgccatgacaaatacaccaagatcttcaatgacttcaaagaccggatgaagtcggaccacaagcgggagacagagcgtgttgtccgagaagctctggagaagctgcgttctgaaatggaagaagaaaagagacaagctgtaaataaagctgtagccaacatgcagggtgagatggacagaaaatgtaagcaagtaaaggaaaagtgtaaggaagaatttgtagaagaaatcaagaagctggcaacacagcacaagcaactgatttctcagaccaagaagaagcagtggtgctacaactgtgaggaggaggccatgtaccactgctgctggaacacatcctactgctccatcaagtgccagcaggagcactggcacgcggagcacaagcgcacctgccgccggaaaagatgaagctggcccttcccggagtcaccccgatgattactcttttcagacacagcggtttttgtttccaagaagccaaaattgtttagaatttgcttcccattttgcaccagcctttaaacacttttcgtgaagaaattttgcacagtagtttaaatcttttgttaatgctcctccgaagtttttcagggggtaaaagtaacatcagtggagggtattattttaaataaattttaattgagaatttgttgcattttcagcaaattttaaaacatttttaggttttacagagattttaacctttaaacaacagatctttaaaaaacaggtgaatacaagtgagtttaacaaagaaacatttagaatagatctgaatgtaagaactacagaactgtttcagaaataaaacatactaccttgatgtgacatttttttcttaaccttgttgagctggttttgttcagcttaatttactgttcaaaggcattatctgttggtcacaccagtgggtatatgattgaatttagggaacagggttgacacagcagggctagtcctgcatattttttcttaaatatttcccaattgtgtttttcattatttcttttcaatatataacttttataacaaattattagctttgatcttgtagtttaaaattgcagggaactggggtaatcttttactgagctggatcttagagaaaatgaatatttaaattttaaagtttgcacatttcatctttgtcctaacatgagtgcttgtaacaaaataaacaacaaaaacaaagccaaaaactacctttatccatatgtgaaattatagatgaggcatacgaatttgtttaatgcttcccttcccttcccacatatcatctcactgcctattatctggtgtcacctcatgtatcgtaagttaatactaaaagaagagaaagcacttaagtttcacagaagccgttatgtttgtagtaatgggtcattgcctactaatgaactccatcactgtacacagaatgaagaataatgcatgttaattttcttgtattaaagatgccgtgatttgtaaaaagtctgtattttgcggaatgtctggattaagaagcattaccaataggaatggatcgatagttgaataatgattttttatacatagatatataaaatacagccaggaaaacttaaattacttttcttttaaaatatctcacaatttatgtggtatttttaaagactgatcttagaccaagtcaaattcccatttatcatttagttattttttgaggttagagaataatttgtacatatttatttagacctttgatatttattaaagcaattactcacaatggaagtgaaagaatcaggagaaaagccttttaaaaagtattctccaggtttgtcagggtcactctaaagataaaaatgtaactaagtcttctgtgaaatatcatccatctaatcttgatgctgttgcagatggtggtgacacaagttaattgacaaactactgccaaatggtgcacaatattttgtaaaaagtacccagtagccccatttcatacaatgtacctaaattatgcagtaacttggcatcatcgttccctccttgttgctgtgtaattagtcagtgttgccacagtgtgtggcgctgatggagatgtcagaaccgagaacacttaaccttctttgattgtttttcaagttttaagacttcgatccacccctatgagagcaagtaattgtggaaatatttttggtgtaaaatcattccagagtatgtaatatttaactgatagctgcatgaaagtgagattcgtgttactttggcttttctgtctctgttgacacggttgcacatttccaagttactacagcgtgaaaactgtgtgtttaaaaaaaaacaaaattaaaaaaagagattgtggcctggttttgtaaaagttttaggtaaaattacaattgattgttttaggaatcattattaaaaattttctgcaaatcataaagctatatcgaggtgttgagcttagccactatgcacattgtaattattcattgtggctgtccagttctatgatgcattctggcattttgtaagctgctctgactagcaatatatagattcatttaatgtgttaacattggttaataaatgtatttaaaaaaaactaaaaaaaaaaaaaaaaaaaa

SEQ ID NO: 871 - protein, 562 aa, Homo sapiens
MSRVHGMHPKETTRQLSLAVKDGLIVETLTVGCKGSKAGIEQEGYWLPGDEIDWETENHDWYCFECHLPGEVLICDLCFRVYHSKCLSDEFRLRDSSSPWQCPVCRSIKKKNTNKQEMGTYLRFIVSRMKERAIDLNKKGKDNKHPMYRRLVHSAVDVPTIQEKVNEGKYRSYEEFKADAQLLLHNTVIFYGADSEQADIARMLYKDTCHELDELQLCKNCFYLSNARPDNWFCYPCIPNHELVWAKMKGFGFWPAKVMQKEDNQVDVRFFGHHHQRAWIPSENIQDITVNIHRLHVKRSMGWKKACDELELHQRFLREGRFWKSKNEDRGEEEAESSISSTSNEQLKVTQEPRAKKGRRNQSVEPKKEEPEPETEAVSSSQEIPTMPQPIEKVSVSTQTKKLSASSPRMLHRSTQTTNDGVCQSMCHDKYTKIFNDFKDRMKSDHKRETERVVREALEKLRSEMEEEKRQAVNKAVANMQGEMDRKCKQVKEKCKEEFVEEIKKLATQHKQLISQTKKKQWCYNCEEEAMYHCCWNTSYCSIKCQQEHWHAEHKRTCRRKR

SEQ ID NO: 872 - DNA, 2129 bp, Homo sapiens
ccggggctgagctgcggcggcgcctgacaatgccccctcgcgccccggcctcggcgcccgctcccggctccagcgcgcctgcacgtacgtagccttcacgtgtgtgtggatacggagtgcatgtgtggagacagaggaatatgctccaacaaatttcggatagaggcgccgaagacaggacgtggggaagctaaagaagtaaacaggtcatggcacgtttaacaaaaagacgacaggcggatacaaaagctatccagcatctttgggcagccattgagattatacggaaccagaagcagattgccaacattgaccgtattacaaagtatatgtctcgagtccacggtatgcaccctaaagagaccacccgtcagctgagcttagctgtgaaagatggtcttattgtcgaaactctaacagtgggctgcaaaggttcaaaagctggtattgaacaagaaggatattggttgccaggagatgagattgactgggaaacagaaaatcatgactggtattgttttgaatgccatttgcctggagaggtgttgatatgtgacctgtgttttcgtgtgtatcattccaagtgtttgtctgatgagttcaggcttagagacagcagtagtccctggcagtgcccagtttgcaggagcattaagaagaagaatacaaacaaacaggagatgggcacatacctcagattcattgtctcccgcatgaaggagagggctatagatcttaataaaaaggggaaggacaataaacacccgatgtacaggaggctggtgcactcagctgtggacgttcccaccattcaagagaaagtgaatgaagggaaataccgaagttatgaagagttcaaagctgatgcccaattgcttctccacaataccgtgattttctatggagcagacagtgagcaagctgacattgcgaggatgctatataaagacacatgtcatgagctggatgaactgcagctttgcaagaattgcttttacttgtcaaatgctcgtcctgacaactggttctgttatccttgtatacctaatcatgagctggtttgggctaaaatgaaaggttttgggttttggccagccaaagtcatgcagaaagaagacaatcaagtcgacgttcgcttctttggccaccaccaccagagggcctggattccttctgaaaacattcaagatatcacagtcaacattcatcggctgcacgtgaagcgcagtatgggttggaaaaaggcctgtgatgagctggagctgcatcagcgtttcctacgagaagggagattttggaaatctaagaatgaggaccgaggtgaggaagaggcagaatccagtatctcctccaccagtaatgagcagctaaaggtcactcaagaaccaagagcaaagaaaggacgacgtaatcaaagtgtggagcccaaaaaggaagaaccagagcctgaaacagaagcagtaagttctagccaggaaatacccacgatgcctcagcccatcgaaaaagtctccgtgtcaactcagacaaagaagttaagtgcctcttcaccaagaatgctgcatcggagcacccagaccacaaacgacggcgtgtgtcagagcatgtgccatgacaaatacaccaagatcttcaatgacttcaaagaccggatgaagtcggaccacaagcgggagacagagcgtgttgtccgagaagctctggagaagctgcgttctgaaatggaagaagaaaagagacaagctgtaaataaagctgtagccaacatgcagggtgagatggacagaaaatgtaagcaagtaaaggaaaagtgtaaggaagaatttgtagaagaaatcaagaagctggcaacacagcacaagcaactgatttctcagaccaagaagaagcagtgggtaaataccagtcttttttagacccttatttctgaaaatgtaccacaggtatgatgcccgttaattcagaaggtagctgtggcacatgcagaagatgtttctgaaataagatcaaatgtgaaatggtcagctttagttttaaaaattttattaaaagtcctatgatctctcaaaaaaaaaaaaaaaaaaaaaaaaaaaaaaaaaaaaaaaaaaaaaaaaaaaaaaaaaaaaaaa

SEQ ID NO: 873 - protein, 528 aa, Homo sapiens
MSRVHGMHPKETTRQLSLAVKDGLIVETLTVGCKGSKAGIEQEGYWLPGDEIDWETENHDWYCFECHLPGEVLICDLCFRVYHSKCLSDEFRLRDSSSPWQCPVCRSIKKKNTNKQEMGTYLRFIVSRMKERAIDLNKKGKDNKHPMYRRLVHSAVDVPTIQEKVNEGKYRSYEEFKADAQLLLHNTVIFYGADSEQADIARMLYKDTCHELDELQLCKNCFYLSNARPDNWFCYPCIPNHELVWAKMKGFGFWPAKVMQKEDNQVDVRFFGHHHQRAWIPSENIQDITVNIHRLHVKRSMGWKKACDELELHQRFLREGRFWKSKNEDRGEEEAESSISSTSNEQLKVTQEPRAKKGRRNQSVEPKKEEPEPETEAVSSSQEIPTMPQPIEKVSVSTQTKKLSASSPRMLHRSTQTTNDGVCQSMCHDKYTKIFNDFKDRMKSDHKRETERVVREALEKLRSEMEEEKRQAVNKAVANMQGEMDRKCKQVKEKCKEEFVEEIKKLATQHKQLISQTKKKQWVNTSLF

SEQ ID NO: 874 - DNA, 1384 bp, Homo sapiens
gtaagaaacggttgaactggatgcaatttttatcacagcttgtgtaagactgcctctgtccctcctctcacatgccattggttaaccagcagacagtgtgctcaggggcgttgccagctcattgctcttatagcctgtgagggaggaagaaagaaacatttgccagccaggctagtgacagaaatggattcgaaatatcagtgtgtgaagctgaatgatggtcacttcatgcctgtcctgggatttggcacctatgcgcctgcagaggttcctaaaagtaaagctttagaggccaccaaattggcaattgaagctggcttccgccatattgattctgctcatttatacaataatgaggagcaggttggactggccatccgaagcaagattgcagatggcagtgtgaagagagaagacatattctacacttcaaagctttggtgcaattcccatcgaccagagttggtccgaccagccttggaaaggtcactgaaaaatcttcaattggattatgttgacctctaccttattcattttccagtgtctgtaaagccaggtgaggaagtgatcccaaaagatgaaaatggaaaaatactatttgacacagtggatctctgtgccacatgggaggccgtggagaagtgtaaagatgcaggattggccaagtccatcggggtgtccaacttcaaccgcaggcagctggagatgatcctcaacaagccagggctcaagtacaagcctgtctgcaaccaggtggaatgtcatccttacttcaaccagagaaaactgctggatttctgcaagtcaaaagacattgttctggttgcctatagtgctctgggatcccaccgagaagaaccatgggtggacccgaactccccggtgctcttggaggacccagtcctttgtgccttggcaaaaaagcacaagcgaaccccagccctgattgccctgcgctaccagctacagcgtggggttgtggtcctggccaagagctacaatgagcagcgcatcagacagaacgtgcaggtgtttgaattccagttgacttcagaggagatgaaagccatagatggcctaaacagaaatgtgcgatatttgacccttgatatttttgctggcccccctaattatccattttctgatgaatattaacatggagggcattgcatgaggtctgccagaaggccctgcgtgtggatggtgacacagaggatggctctatgctggtgactggacacatcgcctctggttaaatctctcctgcttggtgatttcagcaagctacagcaaagcccattggccagaaaggaaagacaataattttgttttttcattttgaaaaaattaaatgctctctcctaaagattcttcacctaaaaaa

SEQ ID NO: 875 - protein, 323 aa, Homo sapiens
MDSKYQCVKLNDGHFMPVLGFGTYAPAEVPKSKALEATKLAIEAGFRHIDSAHLYNNEEQVGLAIRSKIADGSVKREDIFYTSKLWCNSHRPELVRPALERSLKNLQLDYVDLYLIHFPVSVKPGEEVIPKDENGKILFDTVDLCATWEAVEKCKDAGLAKSIGVSNFNRRQLEMILNKPGLKYKPVCNQVECHPYFNQRKLLDFCKSKDIVLVAYSALGSHREEPWVDPNSPVLLEDPVLCALAKKHKRTPALIALRYQLQRGVVVLAKSYNEQRIRQNVQVFEFQLTSEEMKAIDGLNRNVRYLTLDIFAGPPNYPFSDEY

SEQ ID NO: 876 - DNA, 1174 bp, Homo sapiens
ccccgcgcagcccggcccgacccgcggcgatggcccagcccggggacccgcggcgcctctgcaggctggtgcaggagggccggctgcgcgccctgaaggaggagctgcaggcggccgggggctgcccggggccggccggggataccctcctgcactgcgccgcgcgccacgggcatcgggacgtgctggcctatctggccgaggcctggggcatggacatcgaggccaccaaccgagactacaagcggcctctgcacgaggcggcctccatgggccaccgagactgcgtgcgctacctgctgggccggggggcagcggtcgactgcctgaagaaggccgactggactcctctgatgatggcctgcacaaggaagaacctgggggtgatccaggagctggtggaacatggcgccaatccactcctgaagaacaaagatggctggaacagtttccacattgccagtcgagaaggcgaccctctgatcctccagtacctgctcactgtttgcccaggtgcctggaagacagagagcaaaattagaaggactcctctgcatactgcagcaatgcatggccatttggaggcagtcaaggtgcttcttaagaggtgccaatatgaaccagactacagagacaactgtggcgtcaccgccttgatggacgcaatccagtgtgggcacatcgacgtcgctaggctgctcctcgatgaacatggggcttgcctttcagcagaagacagcctgggtgcccaggctctgcacagggcagctgtcacagggcaggacgaagccatccgattcttggtctctgaacttggcgtcgatgtagatgtgagagccacatcaacccacctcacagcacttcattatgcagctaaggaaggacatacaagtacaattcagactctcttatccttgggagctgacatcaattctaaagatgaaaaaaatcgatcagccctgcatctggcctgtgcaggtcagcacttggcctgtgccaagtttctcctgcagtcgggactgaaggattctgaagacatcacgggcaccctggctcagcagctcccaaggagagcagatgtccttcagggctctggccatagcgcaatgacataaggatgtttccaagaggaggcaataaagtgcatggtaattcaaaaaaaaaaaaaaaaaaa

SEQ ID NO: 877 - protein, 361 aa, Homo sapiens
MAQPGDPRRLCRLVQEGRLRALKEELQAAGGCPGPAGDTLLHCAARHGHRDVLAYLAEAWGMDIEATNRDYKRPLHEAASMGHRDCVRYLLGRGAAVDCLKKADWTPLMMACTRKNLGVIQELVEHGANPLLKNKDGWNSFHIASREGDPLILQYLLTVCPGAWKTESKIRRTPLHTAAMHGHLEAVKVLLKRCQYEPDYRDNCGVTALMDAIQCGHIDVARLLLDEHGACLSAEDSLGAQALHRAAVTGQDEAIRFLVSELGVDVDVRATSTHLTALHYAAKEGHTSTIQTLLSLGADINSKDEKNRSALHLACAGQHLACAKFLLQSGLKDSEDITGTLAQQLPRRADVLQGSGHSAMT

SEQ ID NO: 878 - DNA, 1069 bp, Homo sapiens
ccccgcgcagcccggcccgacccgcggcgatggcccagcccggggacccgcggcgcctctgcaggctggtgcaggagggccggctgcgcgccctgaaggaggagctgcaggcggccgggggctgcccggggccggccggggataccctcctgcactgcgccgcgcgccacgggcatcgggacgtgctggcctatctggccgaggcctggggcatggacatcgaggccaccaaccgagactacaagcggcctctgcacgaggcggcctccatgggccaccgagactgcgtgcgctacctgctgggccggggggcagcggtcgactgcctgaagaaggccgactggactcctctgatgatggcctgcacaaggaagaacctgggggtgatccaggagctggtggaacatggcgccaatccactcctgaagaacaaagatggctggaacagtttccacattgccagtcgagaaggcgaccctctgatcctccagtacctgctcactgtttgcccaggtgcctggaagacagagagcaaaattagaaggactcctctgcatactgcagcaatgcatggccatttggaggcagtcaaggtgcttcttaagaggtgccaatatgaaccagactacagagacaactgtggcgtcaccgccttgatggacgcaatccagtgtgggcacatcgacgtcgctaggctgctcctcgatgaacatggggcttgcctttcagcagaagacagcctgggtgcccaggctctgcacagggcagctgtcacaggacatacaagtacaattcagactctcttatccttgggagctgacatcaattctaaagatgaaaaaaatcgatcagccctgcatctggcctgtgcaggtcagcacttggcctgtgccaagtttctcctgcagtcgggactgaaggattctgaagacatcacgggcaccctggctcagcagctcccaaggagagcagatgtccttcagggctctggccatagcgcaatgacataaggatgtttccaagaggaggcaataaagtgcatggtaattcaaaaaaaaaaaaaaaaaaa

SEQ ID NO: 879 - protein, 326 aa, Homo sapiens
MAQPGDPRRLCRLVQEGRLRALKEELQAAGGCPGPAGDTLLHCAARHGHRDVLAYLAEAWGMDIEATNRDYKRPLHEAASMGHRDCVRYLLGRGAAVDCLKKADWTPLMMACTRKNLGVIQELVEHGANPLLKNKDGWNSFHIASREGDPLILQYLLTVCPGAWKTESKIRRTPLHTAAMHGHLEAVKVLLKRCQYEPDYRDNCGVTALMDAIQCGHIDVARLLLDEHGACLSAEDSLGAQALHRAAVTGHTSTIQTLLSLGADINSKDEKNRSALHLACAGQHLACAKFLLQSGLKDSEDITGTLAQQLPRRADVLQGSGHSAMT

SEQ ID NO: 880 - DNA, 1095 bp, Homo sapiens
ccccgcgcagcccggcccgacccgcggcgatggcccagcccggggacccgcggcgcctctgcaggctggtgcaggagggccggctgcgcgccctgaaggaggagctgcaggcggccgggggctgcccggggccggccggggataccctcctgcactgcgccgcgcgccacgggcatcgggacgtgctggcctatctggccgaggcctggggcatggacatcgaggccaccaaccgagactacaagcggcctctgcacgaggcggcctccatgggccaccgagactgcgtgcgctacctgctgggccggggggcagcggtcgactgcctgaagaaggccgactggactcctctgatgatggcctgcacaaggaagaacctgggggtgatccaggagctggtggaacatggcgccaatccactcctgaagaacaaagatggctggaacagtttccacattgccagtcgagaaggcgaccctctgatcctccagtacctgctcactgtttgcccaggtgcctggaagacagagagcaaaattagaaggactcctctgcatactgcagcaatgcatggccatttggaggcagtcaaggtgcttcttaagaggtgccaatatgaaccagactacagagacaactgtggcgtcaccgccttgatggacgcaatccagtgtgggcacatcgacgtcgctaggctgctcctcgatgaacatggggcttgcctttcagcagaagacagcctgggtgcccaggctctgcacagggcagctgtcacagggcaggacgaagccatccgattcttggtctctgaacttggcgtcgatgtagatgtgagagccacatcaacccacctcacagcacttcattatgcagctaagccctgcatctggcctgtgcaggtcagcacttggcctgtgccaagtttctcctgcagtcgggactgaaggattctgaagacatcacgggcaccctggctcagcagctcccaaggagagcagatgtccttcagggctctggccatagcgcaatgacataaggatgtttccaagaggaggcaataaagtgcatggtaattcaaaaaaaaaaaaaaaaaaa

SEQ ID NO: 881 - protein, 304 aa, Homo sapiens
MAQPGDPRRLCRLVQEGRLRALKEELQAAGGCPGPAGDTLLHCAARHGHRDVLAYLAEAWGMDIEATNRDYKRPLHEAASMGHRDCVRYLLGRGAAVDCLKKADWTPLMMACTRKNLGVIQELVEHGANPLLKNKDGWNSFHIASREGDPLILQYLLTVCPGAWKTESKIRRTPLHTAAMHGHLEAVKVLLKRCQYEPDYRDNCGVTALMDAIQCGHIDVARLLLDEHGACLSAEDSLGAQALHRAAVTGQDEAIRFLVSELGVDVDVRATSTHLTALHYAAKPCIWPVQVSTWPVPSFSCSRD

SEQ ID NO: 882 - DNA, 2121 bp, Homo sapiens
ccccgcgcagcccggcccgacccgcggcgatggcccagcccggggacccgcggcgcctctgcaggctggtgcaggagggccggctgcgcgccctgaaggaggagctgcaggcggccgggggctgcccggggccggccggggataccctcctgcactgcgccgcgcgccacgggcatcgggacgtgctggcctatctggccgaggcctggggcatggacatcgaggccaccaaccgagactacaagcggcctctgcacgaggcggcctccatgggccaccgagactgcgtgcgctacctgctgggccggggggcagcggtcgactgcctgaagaaggccgactggactcctctgatgatggcctgcacaaggaagaacctgggggtgatccaggagctggtggaacatggcgccaatccactcctgaagaacaaagatggctggaacagtttccacattgccagtcgagaaggcgaccctctgatcctccagtacctgctcactgtttgcccaggtgcctggaagacagagagcaaaattagaaggactcctctgcatactgcagcaatgcatggccatttggaggcagtcaaggtgcttcttaagaggtgccaatatgaaccagactacagagacaactgtggcgtcaccgccttgatggacgcaatccagtgtgggcacatcgacgtcgctaggctgctcctcgatgaacatggggcttgcctttcagcagaagacagcctgggtgcccaggctctgcacagggcagctgtcacagggcaggacgaagccatccgattcttggtctctgaacttggcgtcgatgtagatgtgagagccacatcaacccacctcacagcacttcattatgcagctaaggaaggacatacaagtacaattcagactctcttatccttgggagctgacatcaattctaaagatgaaaaaaatcgatcagccctgcatctggcctgtgcaggtcagcacttggcctgtgccaagtttctcctgcagtcgggactgaaggattctgaagacatcacgggcaccctggctcagcagctcccaaggagagcagatgtccttcagggctctggccatagcgcaatgacataaggatgtttccaagaggaggcaataaagtgcatgagttgctgggagcctgagcacctttcgtttttcggctcagagaaagccaagtgcaacttgcttcagtcatcctgaacctgagttcaaccaaccgcagccacctacgtttgaccccagcgagatcaaagttgtatatctgaggtgtaccagtggtgaagtcagtgccacatctgcactggcccccaaggtcagctccctgggtctgtctccaaaaatggttgctgatgacatcaccaaccattgactggaagagtctgaggatgatagtgaaactgaccagccacagcagacaggcccagattgaggtggtgccttctgcctctgccctgatcgtcacaaccctcaggaaccaccgacagaaagaaagaaacacaaaaacatgaaacacagtggtagcaccacttctgatgagattgtcaacattgcctaacagatgcagcagcagtctttagccagagaactctctggaaccattaaagaattcctgggggccggttgcggtggctcatgcctgtaatcccagcactttgggaggccgaggcgggaggatcatgaggtcaggagatcgagaccatcctggctaacgtggtgaaaccccgtctcttactaaaaatacaaaaaaattagccaggcatggtggtgggcgcctgtagtcccagctactcaggaggctgaggcaggagaatgctgtgaaccctggaggcagagcttgcagtgagccgaatatgcgccactgcactccagcctgggcaacagagcaagactccgtctccaaaaaaaaaagaattcctggggcctgcccagtctgtgagctgccatgttgatagtatcacagatgataccaacagtgaagctgtggaatgcccagctagttaaagaatgcaaaggaaaatattttcacaaagggttatctgataaccaaaaaataaaaagacatttcatctaagccacttaaaaaaaaaaaaaaaaaaaa

SEQ ID NO: 883 - protein, 361 aa, Homo sapiens; identical to SEQ ID NO: 877

SEQ ID NO: 884 - DNA, 3727 bp, Homo sapiens
ctgctttcaaggtgtctagatacagagtgaagaatgtcacagtaggaagtgcactggactaggggagtcaggagacccgggttcttgtgttggcaccatcactcatgagctacgaggtgacttcaggctgccattggacctgtcaagtgcctgagtcatgtgataatgggctacattgcgcagggcccctgggccatctccacaggagatgccagaggacgagtgcccacttgctggtcttcacagagcacgctgaaatgagacggtttaagcggaagcatcttactgccattgactgccagcatttggctcggagtcacttggctgtgacccagcccttcggtcaaagatggacaaacagagatccgaaccatggtctctatcctaaaccgagaacaaaaagagggagtaggggtcagggaagtcaaagatgcatccctgagttcttcctagcaggcaagcagccgtgcaccaatgacatggccaaaagcaattctgttggccaggacagctgtcaggactctgagggtgacatgatctttcctgcagagagcagctgtgcactgcctcaggaaggcagtgcagggccgggctcaccagggtctgccccgccctccaggaagcggtcttggtcctctgaggaagagagtaaccaggctaccgggaccagccggtgggatggagtttctaagaaagctccacggcaccatttgtctgtgccatgcacaaggcctagggaggccaggcaagaagcagaggacagtacgtctcggctctctgcggagtctggtgaaaccgaccaagatgctggggacgtgggtcctgatcccattcctgactcatactatgggcttcttgggaccttgccctgccaggaagcactgagccacatttgcagcctgcctagtgaggtcctgaggcacgtgtttgccttcctcccggtggaagacctctattggaacctgagcttggtgtgccacttgtggagggagatcatcagtgacccgctgttcattccttggaagaagctgtaccatcgatacctgatgaatgaagagcaagctgtcagcaaagtggacggcatcctgtctaactgtggcatagaaaaggagtcagacctgtgtgtgctgaacctcatacgatacacagccaccactaagtgctctccgagtgtggatcccgagagggtgctgtggagtctgagggaccaccccctcctccccgaggctgaggcgtgtgtgcggcaacacctccccgacctctacgctgctgccgggggtgtcaacatctgggccctggtggcggctgtggtgctcctctccagcagtgtgaatgacatccagcgactgctcttctgcctccggagacccagctccacggtgaccatgccagatgtcaccgagaccctgtactgcatagccgtgcttctctacgccatgagggagaaggggattaacatcagcaataggattcactacaacattttctattgcctatatcttcaggagaattcctgcactcaggccacaaaagttaaagaggagccatctgtctggccaggcaagaaaaccatccaacttacacatgaacaacagctgattctgaatcacaagatggaacctctccaggtggtgaaaattatggcctttgccggcactgggaagacctcaacgctggtcaagtatgcagagaagtggtctcagagcaggtttctgtatgtgacattcaacaagagcatcgcaaagcaggccgaacgcgtcttccccagcaacgtcatctgcaaaaccttccactccatggcctacgggcacatagggcggaagtaccagtcaaagaagaagttgaatctcttcaagttaacacccttcatggtcaactccgtccttgctgaagggaagggtggattcataagagccaagcttgtgtgtaagactctagaaaacttctttgcctcggctgacgaagagctgaccattgatcacgtgcctatttggtgtaagaacagccaaggacagagagtcatggttgagcagagtgaaaaactgaatggtgtccttgaagcgagccgcctctgggataacatgcggaagctgggggagtgcacagaagaggcgcaccagatgactcatgacggctacttgaaactctggcagctgagcaagccttcgctggcctcttttgacgccatctttgtggatgaggcccaggactgcacaccagctatcatgaacatagttctgtctcagccatgtgggaaaatctttgtaggggacccgcaccagcagatctataccttccggggtgcggtcaacgccctgttcacagtgccccacacccacgtcttctatctcacgcagagttttcggtttggtgtggaaatagcttatgtgggagctactatcttggatgtttgcaagagagtcaggaaaaagactttggttggaggaaaccatcagagtggcattagaggtgacgcaaaggggcaagtggccttgttgtcccggaccaacgccaacgtgtttgatgaggccgtacgggtgacggaaggggaattcccttcaaggatacatttgattggggggattaaatcatttggattggacagaatcattgatatttggatccttcttcagccagaggaagaacggaggaaacaaaacctcgtcattaaagacaaatttatcagaagatgggtgcacaaagaaggctttagtggcttcaagaggtatgtgaccgctgccgaggacaaggagcttgaagccaagatcgcagttgttgaaaagtataacatcaggattccagagctggtgcaaaggatagaaaaatgccatatagaagatttggactttgcagagtacattctgggcactgtgcacaaagccaaaggcctggagtttgacactgtgcatgttttggatgattttgtgaaagtgccttgtgcccggcataacctgccccagcttccgcacttcagagttgagtcattttctgaggatgaatggaatttactgtatgttgcagtaactcgagccaagaagcgtctcatcatgaccaaatcattggaaaacattttgactttggctggggagtacttcttgcaagcagagctgacaagcaacgtcttaaaaacaggcgtggtgcgctgctgcgtgggacagtgcaacaatgccatccctgttgacaccgtccttaccatgaagaagctgcccatcacctatagcaacaggaaggaaaacaaggggggctacctctgccactcctgtgcggagcagcgcatcgggcccctggcgttcctgacagcctccccggagcaggtgcgcgccatggagcgcactgtggagaacatcgtactgccccggcatgaggccctgctcttcctcgtcttctgaggacaaggcgcacgttctccgcagtgcagagcagcttgccgaggaccccgcgtgaagaaagccagcgaggggggcttctgctccctgagactctgggttcacccacagcactttctgaggaagaggacaccagcccaagctggacctgccatttctccactccctacagacagccagtctccacttgcctcccctctggatgtatctggtcagggaagtgggggatgttcttttgataaaaaaaaaaaaaaaaatttatgtatttaaacttttattacaagatttcaattaaacaggcaccatagcactggcaaaaaaaaaaaaaaaaaaaaaaaaaa

SEQ ID NO: 885 - protein, 1094 aa, Homo sapiens
MSYEVTSGCHWTCQVPESCDNGLHCAGPLGHLHRRCQRTSAHLLVFTEHAEMRRFKRKHLTAIDCQHLARSHLAVTQPFGQRWTNRDPNHGLYPKPRTKRGSRGQGSQRCIPEFFLAGKQPCTNDMAKSNSVGQDSCQDSEGDMIFPAESSCALPQEGSAGPGSPGSAPPSRKRSWSSEEESNQATGTSRWDGVSKKAPRHHLSVPCTRPREARQEAEDSTSRLSAESGETDQDAGDVGPDPIPDSYYGLLGTLPCQEALSHICSLPSEVLRHVFAFLPVEDLYWNLSLVCHLWREIISDPLFIPWKKLYHRYLMNEEQAVSKVDGILSNCGIEKESDLCVLNLIRYTATTKCSPSVDPERVLWSLRDHPLLPEAEACVRQHLPDLYAAAGGVNIWALVAAVVLLSSSVNDIQRLLFCLRRPSSTVTMPDVTETLYCIAVLLYAMREKGINISNRIHYNIFYCLYLQENSCTQATKVKEEPSVWPGKKTIQLTHEQQLILNHKMEPLQVVKIMAFAGTGKTSTLVKYAEKWSQSRFLYVTFNKSIAKQAERVFPSNVICKTFHSMAYGHIGRKYQSKKKLNLFKLTPFMVNSVLAEGKGGFIRAKLVCKTLENFFASADEELTIDHVPIWCKNSQGQRVMVEQSEKLNGVLEASRLWDNMRKLGECTEEAHQMTHDGYLKLWQLSKPSLASFDAIFVDEAQDCTPAIMNIVLSQPCGKIFVGDPHQQIYTFRGAVNALFTVPHTHVFYLTQSFRFGVEIAYVGATILDVCKRVRKKTLVGGNHQSGIRGDAKGQVALLSRTNANVFDEAVRVTEGEFPSRIHLIGGIKSFGLDRIIDIWILLQPEEERRKQNLVIKDKFIRRWVHKEGFSGFKRYVTAAEDKELEAKIAVVEKYNIRIPELVQRIEKCHIEDLDFAEYILGTVHKAKGLEFDTVHVLDDFVKVPCARHNLPQLPHFRVESFSEDEWNLLYVAVTRAKKRLIMTKSLENILTLAGEYFLQAELTSNVLKTGVVRCCVGQCNNAIPVDTVLTMKKLPITYSNRKENKGGYLCHSCAEQRIGPLAFLTASPEQVRAMERTVENIVLPRHEALLFLVF

SEQ ID NO: 886 - DNA, 3540 bp, Homo sapiens
cagaggaggagctcgctgccgggggacgctgggctgagcggccggcggcgcgggcccggcggcggcggcagcggggtccgggtccggagcgccacatgagacggtttaagcggaagcatcttactgccattgactgccagcatttggctcggagtcacttggctgtgacccagcccttcggtcaaagatggacaaacagagatccgaaccatggtctctatcctaaaccgagaacaaaaagagggagtaggggtcagggaagtcaaagatgcatccctgagttcttcctagcaggcaagcagccgtgcaccaatgacatggccaaaagcaattctgttggccaggacagctgtcaggactctgagggtgacatgatctttcctgcagagagcagctgtgcactgcctcaggaaggcagtgcagggccgggctcaccagggtctgccccgccctccaggaagcggtcttggtcctctgaggaagagagtaaccaggctaccgggaccagccggtgggatggagtttctaagaaagctccacggcaccatttgtctgtgccatgcacaaggcctagggaggccaggcaagaagcagaggacagtacgtctcggctctctgcggagtctggtgaaaccgaccaagatgctggggacgtgggtcctgatcccattcctgactcatactatgggcttcttgggaccttgccctgccaggaagcactgagccacatttgcagcctgcctagtgaggtcctgaggcacgtgtttgccttcctcccggtggaagacctctattggaacctgagcttggtgtgccacttgtggagggagatcatcagtgacccgctgttcattccttggaagaagctgtaccatcgatacctgatgaatgaagagcaagctgtcagcaaagtggacggcatcctgtctaactgtggcatagaaaaggagtcagacctgtgtgtgctgaacctcatacgatacacagccaccactaagtgctctccgagtgtggatcccgagagggtgctgtggagtctgagggaccaccccctcctccccgaggctgaggcgtgtgtgcggcaacacctccccgacctctacgctgctgccgggggtgtcaacatctgggccctggtggcggctgtggtgctcctctccagcagtgtgaatgacatccagcgactgctcttctgcctccggagacccagctccacggtgaccatgccagatgtcaccgagaccctgtactgcatagccgtgcttctctacgccatgagggagaaggggattaacatcagcaataggattcactacaacattttctattgcctatatcttcaggagaattcctgcactcaggccacaaaagttaaagaggagccatctgtctggccaggcaagaaaaccatccaacttacacatgaacaacagctgattctgaatcacaagatggaacctctccaggtggtgaaaattatggcctttgccggcactgggaagacctcaacgctggtcaagtatgcagagaagtggtctcagagcaggtttctgtatgtgacattcaacaagagcatcgcaaagcaggccgaacgcgtcttccccagcaacgtcatctgcaaaaccttccactccatggcctacgggcacatagggcggaagtaccagtcaaagaagaagttgaatctcttcaagttaacacccttcatggtcaactccgtccttgctgaagggaagggtggattcataagagccaagcttgtgtgtaagactctagaaaacttctttgcctcggctgacgaagagctgaccattgatcacgtgcctatttggtgtaagaacagccaaggacagagagtcatggttgagcagagtgaaaaactgaatggtgtccttgaagcgagccgcctctgggataacatgcggaagctgggggagtgcacagaagaggcgcaccagatgactcatgacggctacttgaaactctggcagctgagcaagccttcgctggcctcttttgacgccatctttgtggatgaggcccaggactgcacaccagctatcatgaacatagttctgtctcagccatgtgggaaaatctttgtaggggacccgcaccagcagatctataccttccggggtgcggtcaacgccctgttcacagtgccccacacccacgtcttctatctcacgcagagttttcggtttggtgtggaaatagcttatgtgggagctactatcttggatgtttgcaagagagtcaggaaaaagactttggttggaggaaaccatcagagtggcattagaggtgacgcaaaggggcaagtggccttgttgtcccggaccaacgccaacgtgtttgatgaggccgtacgggtgacggaaggggaattcccttcaaggatacatttgattggggggattaaatcatttggattggacagaatcattgatatttggatccttcttcagccagaggaagaacggaggaaacaaaacctcgtcattaaagacaaatttatcagaagatgggtgcacaaagaaggctttagtggcttcaagaggtatgtgaccgctgccgaggacaaggagcttgaagccaagatcgcagttgttgaaaagtataacatcaggattccagagctggtgcaaaggatagaaaaatgccatatagaagatttggactttgcagagtacattctgggcactgtgcacaaagccaaaggcctggagtttgacactgtgcatgttttggatgattttgtgaaagtgccttgtgcccggcataacctgccccagcttccgcacttcagagttgagtcattttctgaggatgaatggaatttactgtatgttgcagtaactcgagccaagaagcgtctcatcatgaccaaatcattggaaaacattttgactttggctggggagtacttcttgcaagcagagctgacaagcaacgtcttaaaaacaggcgtggtgcgctgctgcgtgggacagtgcaacaatgccatccctgttgacaccgtccttaccatgaagaagctgcccatcacctatagcaacaggaaggaaaacaaggggggctacctctgccactcctgtgcggagcagcgcatcgggcccctggcgttcctgacagcctccccggagcaggtgcgcgccatggagcgcactgtggagaacatcgtactgccccggcatgaggccctgctcttcctcgtcttctgaggacaaggcgcacgttctccgcagtgcagagcagcttgccgaggaccccgcgtgaagaaagccagcgaggggggcttctgctccctgagactctgggttcacccacagcactttctgaggaagaggacaccagcccaagctggacctgccatttctccactccctacagacagccagtctccacttgcctcccctctggatgtatctggtcagggaagtgggggatgttcttttgataaaaaaaaaaaaaaaaatttatgtatttaaacttttattacaagatttcaattaaacaggcaccatagcactggca

SEQ ID NO: 887 - protein, 1043 aa, Homo sapiens
MRRFKRKHLTAIDCQHLARSHLAVTQPFGQRWTNRDPNHGLYPKPRTKRGSRGQGSQRCIPEFFLAGKQPCTNDMAKSNSVGQDSCQDSEGDMIFPAESSCALPQEGSAGPGSPGSAPPSRKRSWSSEEESNQATGTSRWDGVSKKAPRHHLSVPCTRPREARQEAEDSTSRLSAESGETDQDAGDVGPDPIPDSYYGLLGTLPCQEALSHICSLPSEVLRHVFAFLPVEDLYWNLSLVCHLWREIISDPLFIPWKKLYHRYLMNEEQAVSKVDGILSNCGIEKESDLCVLNLIRYTATTKCSPSVDPERVLWSLRDHPLLPEAEACVRQHLPDLYAAAGGVNIWALVAAVVLLSSSVNDIQRLLFCLRRPSSTVTMPDVTETLYCIAVLLYAMREKGINISNRIHYNIFYCLYLQENSCTQATKVKEEPSVWPGKKTIQLTHEQQLILNHKMEPLQVVKIMAFAGTGKTSTLVKYAEKWSQSRFLYVTFNKSIAKQAERVFPSNVICKTFHSMAYGHIGRKYQSKKKLNLFKLTPFMVNSVLAEGKGGFIRAKLVCKTLENFFASADEELTIDHVPIWCKNSQGQRVMVEQSEKLNGVLEASRLWDNMRKLGECTEEAHQMTHDGYLKLWQLSKPSLASFDAIFVDEAQDCTPAIMNIVLSQPCGKIFVGDPHQQIYTFRGAVNALFTVPHTHVFYLTQSFRFGVEIAYVGATILDVCKRVRKKTLVGGNHQSGIRGDAKGQVALLSRTNANVFDEAVRVTEGEFPSRIHLIGGIKSFGLDRIIDIWILLQPEEERRKQNLVIKDKFIRRWVHKEGFSGFKRYVTAAEDKELEAKIAVVEKYNIRIPELVQRIEKCHIEDLDFAEYILGTVHKAKGLEFDTVHVLDDFVKVPCARHNLPQLPHFRVESFSEDEWNLLYVAVTRAKKRLIMTKSLENILTLAGEYFLQAELTSNVLKTGVVRCCVGQCNNAIPVDTVLTMKKLPITYSNRKENKGGYLCHSCAEQRIGPLAFLTASPEQVRAMERTVENIVLPRHEALLFLVF

SEQ ID NO: 888 - DNA, 459 bp, Homo sapiens
atggtccaggacccttcagattatattacgatggagaacaggaaaattaaccaaaacctgggcaagactgcgaatgtgtgctactatccatcccagttctggaggccggagttggaaatcagtttcactgggcacacatggaggtgtttgaagggctgcccgtgccagaggctctcagggagaatcccttccttgtctgttccagctctacctcctcctctgctgtgtggggctgagctgttgttctagaagaaaaaaggatgtcttgtcctgtgtgaactggaacagcgcttagaaatcgaggagcgtggccctgggaacagaggctgtgtgctgttgtttttgcttcctcattaatgagcatgggccttcagtgagctcctttcccttgctggccttcatttgtaaaatgttggctgacggctaagggtgtttattcctctaaaatcacctaattag

SEQ ID NO: 889 - protein, 82 aa, Homo sapiens
MVQDPSDYITMENRKINQNLGKTANVCYYPSQFWRPELEISFTGHTWRCLKGCPCQRLSGRIPSLSVPALPPPLLCGAELLF

SEQ ID NO: 890 - DNA, 3105 bp, Homo sapiens
gtcccgcagtggctggagccctgggcgctgcaaagcgtgtcccgccgggtccccgagcgtcccgcgccctcgccccgccatgctcctgctgctggggctgtgcctggggctgtccctgtgtgtggggtcgcaggaagaggcgcagagctggggccactcttcggagcaggatggactcagggtcccgaggcaagtcagactgttgcagaggctgaaaaccaaacctttgatgacagaattctcagtgaagtctaccatcatttcccgttatgccttcactacggtttcctgcagaatgctgaacagagcttctgaagaccaggacattgagttccagatgcagattccagctgcagctttcatcaccaacttcactatgcttattggagacaaggtgtatcagggcgaaattacagagagagaaaagaagagtggtgatagggtaaaagagaaaaggaataaaaccacagaagaaaatggagagaaggggactgaaatattcagagcttctgcagtgattcccagcaaggacaaagccgcctttttcctgagttatgaggagcttctgcagaggcgcctgggcaagtacgagcacagcatcagcgtgcggccccagcagctgtccgggaggctgagcgtggacgtgaatatcctggagagcgcgggcatcgcatccctggaggtgctgccgcttcacaacagcaggcagaggggcagtgggcgcggggaagatgattctgggcctcccccatctactgtcattaaccaaaatgaaacatttgccaacataatttttaaacctactgtagtacaacaagccaggattgcccagaatggaattttgggagactttatcattagatatgacgtcaatagagaacagagcattggggacatccaggttctaaatggctattttgtgcactactttgctcctaaagaccttcctcctttacccaagaatgtggtattcgtgcttgacagcagtgcttctatggtgggaaccaaactccggcagaccaaggatgccctcttcacaattctccatgacctccgaccccaggaccgtttcagtatcattggattttccaaccggatcaaagtatggaaggaccacttgatatcagtcactccagacagcatcagggatgggaaagtgtacattcaccatatgtcacccactggaggcacagacatcaacggggccctgcagagggccatcaggctcctcaacaagtacgtggcccacagtggcattggagaccggagcgtgtccctcatcgtcttcctgacggatgggaagcccacggtcggggagacgcacaccctcaagatcctcaacaacacccgagaggccgcccgaggccaagtctgcatcttcaccattggcatcggcaacgacgtggacttcaggctgctggagaaactgtcgctggagaactgtggcctcacacggcgcgtgcacgaggaggaggacgcaggctcgcagctcatcgggttctacgatgaaatcaggaccccgctcctctctgacatccgcatcgattatccccccagctcagtggtgcaggccaccaagaccctgttccccaactacttcaacggctcggagatcatcattgcggggaagctggtggacaggaagctggatcacctgcacgtggaggtcaccgccagcaacagtaagaaattcatcatcctgaagacagatgtgcctgtgcggcctcagaaggcagggaaagatgtcacaggaagccccaggcctggaggcgatggagagggggacaccaaccacatcgagcgtctctggagctacctcaccacaaaggagctgctgagctcctggctgcaaagtgacgatgaaccggagaaggagcggctgcggcagcgggcccaggccctggctgtgagctaccgcttcctcactcccttcacctccatgaagctgagggggccggtcccacgcatggatggcctggaggaggcccacggcatgtcggctgccatgggacccgaaccggtggtgcagagcgtgcgaggagctggcacgcagccaggacctttgctcaagaagccataccagccaagaattaaaatctctaaaacatcagttcgtggcttcagaagggaagaacagattttttcaaatgtcatgaaatttccttttgccagcatcctggaactataataaaaattcagaggaaagaacaacctatgactgggttttgttctgctgtgtccagatcatcctctggaagtcttgattgttgcctttctgctgctgtgctgtacgtgcaagttcctaaagccagggacatcccggagatgagctgtggatatagagtccgcacagcctgcgggagacagaatgtaattccttccaacacacacacacaggctttatggaatgccagaaaagcttcctcttggatgctgcctggagtaatgactttttgaccctcccctcttttttggagcaagcactatctttccttgtaaagaaatttggacaatttgagtagaaatggtgtggtatgtgcacatagaaactctcagaaaactgtcagatgagctagacagttgtcctctatctccatgggtcccgcatcccaaggatcgaaccaacaacagatcaaaaatacgtgaaaaaggaattgcatctgtattgaatgtgtacggactttttttcttgtctttgttccttaaacaatgtagtgtaacaactatttacatcgcatctcctttgcattcattattataagtaaactagagatgatttaaagtgtatagaaaggctgcgtgcagtggctaatgtctgtaatcccagcactttgagaggccgaggcaggtggatcacctgaggtcaggagttcgagaccagcctggccaacgtggtgaaaccccatctctactaaaaatacaataattagctgggcatggtggtgcacgcctgtaatcccagctattcgggaggctgaggcaggagaatcgcttgaacccaggaggcagagattgcagtgaaccgagattgcaccattgcactccagcctgggtgacagagtgaacctccgtctcaaaaacaaaataaataaataagaataaatt

SEQ ID NO: 891 - protein, 702 aa, Homo sapiens
MLLLLGLCLGLSLCVGSQEEAQSWGHSSEQDGLRVPRQVRLLQRLKTKPLMTEFSVKSTIISRYAFTTVSCRMLNRASEDQDIEFQMQIPAAAFITNFTMLIGDKVYQGEITEREKKSGDRVKEKRNKTTEENGEKGTEIFRASAVIPSKDKAAFFLSYEELLQRRLGKYEHSISVRPQQLSGRLSVDVNILESAGIASLEVLPLHNSRQRGSGRGEDDSGPPPSTVINQNETFANIIFKPTVVQQARIAQNGILGDFIIRYDVNREQSIGDIQVLNGYFVHYFAPKDLPPLPKNVVFVLDSSASMVGTKLRQTKDALFTILHDLRPQDRFSIIGFSNRIKVWKDHLISVTPDSIRDGKVYIHHMSPTGGTDINGALQRAIRLLNKYVAHSGIGDRSVSLIVFLTDGKPTVGETHTLKILNNTREAARGQVCIFTIGIGNDVDFRLLEKLSLENCGLTRRVHEEEDAGSQLIGFYDEIRTPLLSDIRIDYPPSSVVQATKTLFPNYFNGSEIIIAGKLVDRKLDHLHVEVTASNSKKFIILKTDVPVRPQKAGKDVTGSPRPGGDGEGDTNHIERLWSYLTTKELLSSWLQSDDEPEKERLRQRAQALAVSYRFLTPFTSMKLRGPVPRMDGLEEAHGMSAAMGPEPVVQSVRGAGTQPGPLLKKPYQPRIKISKTSVRGFRREEQIFSNVMKFPFASILEL

SEQ ID NO: 892 - DNA, 6319 bp, Homo sapiens
gtcccgcagtggctggagccctgggcgctgcaaagcgtgtcccgccgggtccccgagcgtcccgcgccctcgccccgccatgctcctgctgctggggctgtgcctggggctgtccctgtgtgtggggtcgcaggaagaggcgcagagctggggccactcttcggagcaggatggactcagggtcccgaggcaagtcagactgttgcagaggctgaaaaccaaacctttgatgacagaattctcagtgaagtctaccatcatttcccgttatgccttcactacggtttcctgcagaatgctgaacagagcttctgaagaccaggacattgagttccagatgcagattccagctgcagctttcatcaccaacttcactatgcttattggagacaaggtgtatcagggcgaaattacagagagagaaaagaagagtggtgatagggtaaaagagaaaaggaataaaaccacagaagaaaatggagagaaggggactgaaatattcagagcttctgcagtgattcccagcaaggacaaagccgcctttttcctgagttatgaggagcttctgcagaggcgcctgggcaagtacgagcacagcatcagcgtgcggccccagcagctgtccgggaggctgagcgtggacgtgaatatcctggagagcgcgggcatcgcatccctggaggtgctgccgcttcacaacagcaggcagaggggcagtgggcgcggggaagatgattctgggcctcccccatctactgtcattaaccaaaatgaaacatttgccaacataatttttaaacctactgtagtacaacaagccaggattgcccagaatggaattttgggagactttatcattagatatgacgtcaatagagaacagagcattggggacatccaggttctaaatggctattttgtgcactactttgctcctaaagaccttcctcctttacccaagaatgtggtattcgtgcttgacagcagtgcttctatggtgggaaccaaactccggcagaccaaggatgccctcttcacaattctccatgacctccgaccccaggaccgtttcagtatcattggattttccaaccggatcaaagtatggaaggaccacttgatatcagtcactccagacagcatcagggatgggaaagtgtacattcaccatatgtcacccactggaggcacagacatcaacggggccctgcagagggccatcaggctcctcaacaagtacgtggcccacagtggcattggagaccggagcgtgtccctcatcgtcttcctgacggatgggaagcccacggtcggggagacgcacaccctcaagatcctcaacaacacccgagaggccgcccgaggccaagtctgcatcttcaccattggcatcggcaacgacgtggacttcaggctgctggagaaactgtcgctggagaactgtggcctcacacggcgcgtgcacgaggaggaggacgcaggctcgcagctcatcgggttctacgatgaaatcaggaccccgctcctctctgacatccgcatcgattatccccccagctcagtggtgcaggccaccaagaccctgttccccaactacttcaacggctcggagatcatcattgcggggaagctggtggacaggaagctggatcacctgcacgtggaggtcaccgccagcaacagtaagaaattcatcatcctgaagacagatgtgcctgtgcggcctcagaaggcagggaaagatgtcacaggaagccccaggcctggaggcgatggagagggggacaccaaccacatcgagcgtctctggagctacctcaccacaaaggagctgctgagctcctggctgcaaagtgacgatgaaccggagaaggagcggctgcggcagcgggcccaggccctggctgtgagctaccgcttcctcactcccttcacctccatgaagctgagggggccggtcccacgcatggatggcctggaggaggcccacggcatgtcggctgccatgggacccgaaccggtggtgcagagcgtgcgaggagctggcacgcagccaggacctttgctcaagaagccataccagccaagaattaaaatctctaaaacatcagtggatggtgatccccactttgttgtggatttccccctgagcagactcaccgtgtgcttcaacattgatgggcagcccggggacatcctcaggctggtctctgatcacagggactctggtgtcacagtgaacggagagttaattggggcacccgcccctccaaatggccacaagaaacagcgcacttacttgcgcactatcaccatcctcatcaacaagccagagagatcttatctcgagatcacaccgagcagagtcatcttggatggtggggacagactggtgctcccctgcaaccagagtgtggtggtggggagctgggggctggaggtgtccgtgtctgccaacgccaatgtcaccgtcaccatccagggctccatagcctttgtcatcctcatccacctctacaaaaagccggcgcccttccagcgacaccacctgggtttctacattgccaacagcgagggcctttccagcaactgccacggactgctgggtcagttcctgaatcaggatgccagactcacagaagaccctgcagggcccagccagaacctcactcaccctctgctccttcaggtgggagaggggcctgaggccgtcctaacagtgaaaggccaccaagtcccagtggtctggaagcaaaggaagatttacaacggggaagagcagatagactgctggtttgccaggaacaatgccgccaaactgattgacggggagtacaaggattacctggcattccatccatttgacacagggatggacacttggccggggaatgtccagggagctctgaagctggcagccttaaagatgcaagtgcatgaaggacagtgatgtggggaggccgtggggcagctcttttcatggcttgtacacgcctcagctcctggcaattagctggactccatgacccacccctggtgcagcatagatccgacgtctgtctgggcgaagggtaggggtgggtaggggcgggaagcctgagtgcaaatgtcatttccctctactgcctcttcctgcctctccccaccctgcccacatccacagaggggagagaagggtcatagctaaatgcaacaaagtctgtatcttgtcccaacctgcttttctgttctgttagcatatcataaagtaagcctttctggtgaaggaaggttgctatgaaactttttttcttggtggaaatggacaagtttaggcactctgctttttgccttacactaatgcttagaaagctgtcttttcagtggtgttgcagcccccagatgtgtggccaacctctgctgcaaaggaatctcttgctgagtccaggccaccaatcaggcaaatagcccatacatttgatcgttgtaaaccatgaagtcttttcttgcaagacgtttttcttctgctgtggtatcttgcccttaaaaattagttttcattaaaaagaaatttgattgaaaatagaaacatctacagctcagatactgatctctttctaatgggctttgtaaaccacttgactttgctaatggctattctccaatttgttccaataagctaagggcttttcatacacaggacaactccatgtggttgattttactggcatgtcttggtgacgaagagttggccaagtgaatgatgcatcttttacttggagctctccagcctttgtcatagttcccagaccttttttccttgtggtcatccaggaggtgatcaattacatgtgcacagtgctaggacgggaggcagagccggctcagagcaggtccaccagcccacctatagcaggaagcgtgtcggtgcttaggaaatctaggacttccagcttccctcatgtcagatagaaaaaaagtcaggaaaccagctcgtggacaggggctttggttccaaaacttggacaaacctgatgccttaaggaaaaggttaagatgagaggggacttccagagtcaatgaacgtcacccttcagcggacggataccgggagcgcttgggcgaaacagcagagaaagaaagactgtggtcggggaagtggaatgcttcgatgcaggccagagttcaaggctctggggctggcctcacaagaggcttcttccacggggcttgacaccagagcagcccccgcgtgaaatgagaaggcatgcttagcactgggaggaaaagctgagttaagaaaattctttatcatgtttgccttccctggggaaacattcaggcagtaaaatgacatccacgtgttcctgtcggacgcagcggcttcgggaacaagttagcgctgggggactatctgggctcgtctctctctgcttcgtgaacccaccacaccagggcctgtctgctgtgctatttatttgccttccgtcttcccaacctcagctgcctgtattcatgccagaggtgcaaaggctgccagccagtgctgctgacagatgctttcagactgtagagctcagagaaagggagcggcagctagaggtagccagggagctggccaggctccccggggccttcctattatgtaaatcccagctggacagacagccctggagccaggtggccctgtcccctgtggagcacttggagcagtgatctgttgttccaggtgtaagtctcgacactgcagaaatgaggacgttattaggaaagaccagttcctactgcctgtgttgctactttaagagctgagaaaaacattccaatgagctatccatagctaacttgcttgctcagaaaaacataagtaacaaagttgagctttcatttttaaaaattatattttactttagaaaaatatcaccttttttcttcctcttctttacgtgtagatcttttttttttttttcaaatggggtcagtacctgaaagcccgaaaccccataccaagcttatagttaggacctttgcatttgataaaaaaaaaatatagtattttctgttgtccagaaaatcttcccagatagggaaactgaggcagagagtgccgtggagtggtttttgccaagtcatacaacatacttaatgcagggctacactgaacctccagaatcattttgtttgctttgaccctgtttcaccatctgggcaatcatttattttccttgagcatttataaaccagggcgagggttgttccaaaatgagtaattgaatgagatgaagaaatatgtcataattagaggagataaatctccttgttatcacaatagttaatgtgtcatgatcactgactaactgggaccttgaacaagtcagcatctctgcctttcaaaatgaaggaacattgttctctatcctcccctgacccccgacggccccatgctaggtgcaccatcttcctccatttgactttttaatgctttacaacttcaggctaaagggaggggatgttgggaggagaaaccatcacaagattccctcggtgccacagctgtgctgaggaggccggggactgggaatcggagtgggcacctctgtgtttctctagggagtaacattcaacatttaattgaatcgtgtgtcctgataggtggattaggaacaggattcattcctttaactttaacttttggctaaacgacatgccttggattgagtgtatatgtcttccccaaattcatatgttgaagcttaaatcctgaatgtgatggttcttggaattgggacctttggaaggttattgggtcttgagggcagagccctcacgaatgggattaaggcccttataagaagagacatggggccaggtgcagtggctcacacctgtaatcccaacattttgggaggccgagaagggtggatcatgaggtcaggagatggagaccatcctggccaacatggtgaaacctcgtctctactaaaaatacaaaaattagctgggcgtggtggtgcgtgcctgtagttccagctacttgggaggctgaggcaggagaatcgcttgaaccaggcagtcggaacttgtagtgagccaagatcacgccactgcactccagctggagtgacagagccaaactccgtcaaaaaaaaacaaaacaaaacaaaaaaaagacatgggagagatggtgtttttcctctccaccacctggggatacgatgagaagatggccacctgcaagccaggaagacggccctcaccagacaccatgtctgctggcaccttgatcttggacctcccagcctccagaactgtgagaaataaatgtgttttgtttaagcta

SEQ ID NO: 893 - protein, 956 aa, Homo sapiens
MLLLLGLCLGLSLCVGSQEEAQSWGHSSEQDGLRVPRQVRLLQRLKTKPLMTEFSVKSTIISRYAFTTVSCRMLNRASEDQDIEFQMQIPAAAFITNFTMLIGDKVYQGEITEREKKSGDRVKEKRNKTTEENGEKGTEIFRASAVIPSKDKAAFFLSYEELLQRRLGKYEHSISVRPQQLSGRLSVDVNILESAGIASLEVLPLHNSRQRGSGRGEDDSGPPPSTVINQNETFANIIFKPTVVQQARIAQNGILGDFIIRYDVNREQSIGDIQVLNGYFVHYFAPKDLPPLPKNVVFVLDSSASMVGTKLRQTKDALFTILHDLRPQDRFSIIGFSNRIKVWKDHLISVTPDSIRDGKVYIHHMSPTGGTDINGALQRAIRLLNKYVAHSGIGDRSVSLIVFLTDGKPTVGETHTLKILNNTREAARGQVCIFTIGIGNDVDFRLLEKLSLENCGLTRRVHEEEDAGSQLIGFYDEIRTPLLSDIRIDYPPSSVVQATKTLFPNYFNGSEIIIAGKLVDRKLDHLHVEVTASNSKKFIILKTDVPVRPQKAGKDVTGSPRPGGDGEGDTNHIERLWSYLTTKELLSSWLQSDDEPEKERLRQRAQALAVSYRFLTPFTSMKLRGPVPRMDGLEEAHGMSAAMGPEPVVQSVRGAGTQPGPLLKKPYQPRIKISKTSVDGDPHFVVDFPLSRLTVCFNIDGQPGDILRLVSDHRDSGVTVNGELIGAPAPPNGHKKQRTYLRTITILINKPERSYLEITPSRVILDGGDRLVLPCNQSVVVGSWGLEVSVSANANVTVTIQGSIAFVILIHLYKKPAPFQRHHLGFYIANSEGLSSNCHGLLGQFLNQDARLTEDPAGPSQNLTHPLLLQVGEGPEAVLTVKGHQVPVVWKQRKIYNGEEQIDCWFARNNAAKLIDGEYKDYLAFHPFDTGMDTWPGNVQGALKLAALKMQVHEGQ

SEQ ID NO: 894 - DNA, 5659 bp, Homo sapiens
gacgtgttcgctttgcgtttgccttctgcgtgattgtaagtttcccgaggcttccccagccatgcggaactatgattctgggcctcccccatctactgtcattaaccaaaatgaaacatttgccaacataatttttaaacctactgtagtacaacaagccaggattgcccagaatggaattttgggagactttatcattagatatgacgtcaatagagaacagagcattggggacatccaggttctaaatggctattttgtgcactactttgctcctaaagaccttcctcctttacccaagaatgtggtattcgtgcttgacagcagtgcttctatggtgggaaccaaactccggcagaccaaggatgccctcttcacaattctccatgacctccgaccccaggaccgtttcagtatcattggattttccaaccggatcaaagtatggaaggaccacttgatatcagtcactccagacagcatcagggatgggaaagtgtacattcaccatatgtcacccactggaggcacagacatcaacggggccctgcagagggccatcaggctcctcaacaagtacgtggcccacagtggcattggagaccggagcgtgtccctcatcgtcttcctgacggatgggaagcccacggtcggggagacgcacaccctcaagatcctcaacaacacccgagaggccgcccgaggccaagtctgcatcttcaccattggcatcggcaacgacgtggacttcaggctgctggagaaactgtcgctggagaactgtggcctcacacggcgcgtgcacgaggaggaggacgcaggctcgcagctcatcgggttctacgatgaaatcaggaccccgctcctctctgacatccgcatcgattatccccccagctcagtggtgcaggccaccaagaccctgttccccaactacttcaacggctcggagatcatcattgcggggaagctggtggacaggaagctggatcacctgcacgtggaggtcaccgccagcaacagtaagaaattcatcatcctgaagacagatgtgcctgtgcggcctcagaaggcagggaaagatgtcacaggaagccccaggcctggaggcgatggagagggggacaccaaccacatcgagcgtctctggagctacctcaccacaaaggagctgctgagctcctggctgcaaagtgacgatgaaccggagaaggagcggctgcggcagcgggcccaggccctggctgtgagctaccgcttcctcactcccttcacctccatgaagctgagggggccggtcccacgcatggatggcctggaggaggcccacggcatgtcggctgccatgggacccgaaccggtggtgcagagcgtgcgaggagctggcacgcagccaggacctttgctcaagaagccataccagccaagaattaaaatctctaaaacatcagtggatggtgatccccactttgttgtggatttccccctgagcagactcaccgtgtgcttcaacattgatgggcagcccggggacatcctcaggctggtctctgatcacagggactctggtgtcacagtgaacggagagttaattggggcacccgcccctccaaatggccacaagaaacagcgcacttacttgcgcactatcaccatcctcatcaacaagccagagagatcttatctcgagatcacaccgagcagagtcatcttggatggtggggacagactggtgctcccctgcaaccagagtgtggtggtggggagctgggggctggaggtgtccgtgtctgccaacgccaatgtcaccgtcaccatccagggctccatagcctttgtcatcctcatccacctctacaaaaagccggcgcccttccagcgacaccacctgggtttctacattgccaacagcgagggcctttccagcaactgccacggactgctgggtcagttcctgaatcaggatgccagactcacagaagaccctgcagggcccagccagaacctcactcaccctctgctccttcaggtgggagaggggcctgaggccgtcctaacagtgaaaggccaccaagtcccagtggtctggaagcaaaggaagatttacaacggggaagagcagatagactgctggtttgccaggaacaatgccgccaaactgattgacggggagtacaaggattacctggcattccatccatttgacacagggatggacacttggccggggaatgtccagggagctctgaagctggcagccttaaagatgcaagtgcatgaaggacagtgatgtggggaggccgtggggcagctcttttcatggcttgtacacgcctcagctcctggcaattagctggactccatgacccacccctggtgcagcatagatccgacgtctgtctgggcgaagggtaggggtgggtaggggcgggaagcctgagtgcaaatgtcatttccctctactgcctcttcctgcctctccccaccctgcccacatccacagaggggagagaagggtcatagctaaatgcaacaaagtctgtatcttgtcccaacctgcttttctgttctgttagcatatcataaagtaagcctttctggtgaaggaaggttgctatgaaactttttttcttggtggaaatggacaagtttaggcactctgctttttgccttacactaatgcttagaaagctgtcttttcagtggtgttgcagcccccagatgtgtggccaacctctgctgcaaaggaatctcttgctgagtccaggccaccaatcaggcaaatagcccatacatttgatcgttgtaaaccatgaagtcttttcttgcaagacgtttttcttctgctgtggtatcttgcccttaaaaattagttttcattaaaaagaaatttgattgaaaatagaaacatctacagctcagatactgatctctttctaatgggctttgtaaaccacttgactttgctaatggctattctccaatttgttccaataagctaagggcttttcatacacaggacaactccatgtggttgattttactggcatgtcttggtgacgaagagttggccaagtgaatgatgcatcttttacttggagctctccagcctttgtcatagttcccagaccttttttccttgtggtcatccaggaggtgatcaattacatgtgcacagtgctaggacgggaggcagagccggctcagagcaggtccaccagcccacctatagcaggaagcgtgtcggtgcttaggaaatctaggacttccagcttccctcatgtcagatagaaaaaaagtcaggaaaccagctcgtggacaggggctttggttccaaaacttggacaaacctgatgccttaaggaaaaggttaagatgagaggggacttccagagtcaatgaacgtcacccttcagcggacggataccgggagcgcttgggcgaaacagcagagaaagaaagactgtggtcggggaagtggaatgcttcgatgcaggccagagttcaaggctctggggctggcctcacaagaggcttcttccacggggcttgacaccagagcagcccccgcgtgaaatgagaaggcatgcttagcactgggaggaaaagctgagttaagaaaattctttatcatgtttgccttccctggggaaacattcaggcagtaaaatgacatccacgtgttcctgtcggacgcagcggcttcgggaacaagttagcgctgggggactatctgggctcgtctctctctgcttcgtgaacccaccacaccagggcctgtctgctgtgctatttatttgccttccgtcttcccaacctcagctgcctgtattcatgccagaggtgcaaaggctgccagccagtgctgctgacagatgctttcagactgtagagctcagagaaagggagcggcagctagaggtagccagggagctggccaggctccccggggccttcctattatgtaaatcccagctggacagacagccctggagccaggtggccctgtcccctgtggagcacttggagcagtgatctgttgttccaggtgtaagtctcgacactgcagaaatgaggacgttattaggaaagaccagttcctactgcctgtgttgctactttaagagctgagaaaaacattccaatgagctatccatagctaacttgcttgctcagaaaaacataagtaacaaagttgagctttcatttttaaaaattatattttactttagaaaaatatcaccttttttcttcctcttctttacgtgtagatcttttttttttttttcaaatggggtcagtacctgaaagcccgaaaccccataccaagcttatagttaggacctttgcatttgataaaaaaaaaatatagtattttctgttgtccagaaaatcttcccagatagggaaactgaggcagagagtgccgtggagtggtttttgccaagtcatacaacatacttaatgcagggctacactgaacctccagaatcattttgtttgctttgaccctgtttcaccatctgggcaatcatttattttccttgagcatttataaaccagggcgagggttgttccaaaatgagtaattgaatgagatgaagaaatatgtcataattagaggagataaatctccttgttatcacaatagttaatgtgtcatgatcactgactaactgggaccttgaacaagtcagcatctctgcctttcaaaatgaaggaacattgttctctatcctcccctgacccccgacggccccatgctaggtgcaccatcttcctccatttgactttttaatgctttacaacttcaggctaaagggaggggatgttgggaggagaaaccatcacaagattccctcggtgccacagctgtgctgaggaggccggggactgggaatcggagtgggcacctctgtgtttctctagggagtaacattcaacatttaattgaatcgtgtgtcctgataggtggattaggaacaggattcattcctttaactttaacttttggctaaacgacatgccttggattgagtgtatatgtcttccccaaattcatatgttgaagcttaaatcctgaatgtgatggttcttggaattgggacctttggaaggttattgggtcttgagggcagagccctcacgaatgggattaaggcccttataagaagagacatggggccaggtgcagtggctcacacctgtaatcccaacattttgggaggccgagaagggtggatcatgaggtcaggagatggagaccatcctggccaacatggtgaaacctcgtctctactaaaaatacaaaaattagctgggcgtggtggtgcgtgcctgtagttccagctacttgggaggctgaggcaggagaatcgcttgaaccaggcagtcggaacttgtagtgagccaagatcacgccactgcactccagctggagtgacagagccaaactccgtcaaaaaaaaacaaaacaaaacaaaaaaaagacatgggagagatggtgtttttcctctccaccacctggggatacgatgagaagatggccacctgcaagccaggaagacggccctcaccagacaccatgtctgctggcaccttgatcttggacctcccagcctccagaactgtgagaaataaatgtgttttgtttaagcta

SEQ ID NO: 895 - protein, 742 aa, Homo sapiens
MRNYDSGPPPSTVINQNETFANIIFKPTVVQQARIAQNGILGDFIIRYDVNREQSIGDIQVLNGYFVHYFAPKDLPPLPKNVVFVLDSSASMVGTKLRQTKDALFTILHDLRPQDRFSIIGFSNRIKVWKDHLISVTPDSIRDGKVYIHHMSPTGGTDINGALQRAIRLLNKYVAHSGIGDRSVSLIVFLTDGKPTVGETHTLKILNNTREAARGQVCIFTIGIGNDVDFRLLEKLSLENCGLTRRVHEEEDAGSQLIGFYDEIRTPLLSDIRIDYPPSSVVQATKTLFPNYFNGSEIIIAGKLVDRKLDHLHVEVTASNSKKFIILKTDVPVRPQKAGKDVTGSPRPGGDGEGDTNHIERLWSYLTTKELLSSWLQSDDEPEKERLRQRAQALAVSYRFLTPFTSMKLRGPVPRMDGLEEAHGMSAAMGPEPVVQSVRGAGTQPGPLLKKPYQPRIKISKTSVDGDPHFVVDFPLSRLTVCFNIDGQPGDILRLVSDHRDSGVTVNGELIGAPAPPNGHKKQRTYLRTITILINKPERSYLEITPSRVILDGGDRLVLPCNQSVVVGSWGLEVSVSANANVTVTIQGSIAFVILIHLYKKPAPFQRHHLGFYIANSEGLSSNCHGLLGQFLNQDARLTEDPAGPSQNLTHPLLLQVGEGPEAVLTVKGHQVPVVWKQRKIYNGEEQIDCWFARNNAAKLIDGEYKDYLAFHPFDTGMDTWPGNVQGALKLAALKMQVHEGQ

SEQ ID NO: 896 - DNA, 4829 bp, Homo sapiens
aatatggcggcggctgcggccgctgcggtgacggttggcggcggccggtgaggcgggcggggccggaggcgcggaggcggggtcccgggcgagccgccctgggaggcgggggccgtttccatagcggcggcaggaggtgtcgcgccggggaacttcctggttcccgggctcggcttcgccgggatcctcttggaagggaaacaatggggcggagggcactgcggtagccgccgccgccgccgcgccgcgccgcgccggatctgctcggccgcccgggaccgccagctctgtccgctgcccacagcctagcagtcgggaccgtactgaggacatgtattcctctgagaaaccttggacagcagattttggtttaatatctgattgggacaacattcagacccatttccagtcatgaattcagaccaggatgtagcactcaaacttgcccaggagcgagctgaaatagttgctaaatatgacagaggacgagaaggtgcagagattgaaccttgggaagatgctgattaccttgtttacaaagtcacagatagatttggctttttacatgaggaggagctcccagatcataatgtggctgtggaacggcaaaagcacctggaaattgaaagaactaccaaatggctgaaaatgctgaaaggatgggaaaaatacaagaacactgaaaagtttcataggcgaatttacaaaggaataccactccagctcagaggtgaagtctgggccctccttcttgagatccctaaaatgaaagaagaaacaagggacctgtatagtaaattaaaacacagagcacggggctgttcacctgacatcagacaaatagacctggatgtcaaccgcacatttcgggaccacattatgtttagagacagatatggtgttaagcaacaatccttattccatgtgcttgctgcctattctatttataacacggaagtcgggtattgtcaggggatgagccagatcacagctttactcctcatgtatatgaacgaggaagatgccttctgggccctggtcaaactcttctcaggccctaaacatgccatgcatggcttttttgtccaaggttttcctaaactcttgaggtttcaagaacatcatgaaaaaatactgaacaaatttctgtccaagcttaagcaacacttggattctcaagaaatctacacaagtttttacacaatgaaatggttttttcagtgtttccttgatcgtactccctttacactaaacctcagaatatgggatatctacatctttgaaggagaacgagttcttactgctatgtcttacaccatcttaaaattacacaaaaaacatctaatgaaattgtccatggaagaacttgtagaattttttcaggagaccctggcaaaggattttttctttgaagatgattttgtgatagagcaacttcagatttctatgacagaactaaagcgggcaaagttagaccttccagaacctggtaaagaggatgaatatccaaagaagcccttggggcagcttccacctgaacttcagtcttggggcgtccatcacttgagcaacggacagaggagcgtgggccggccgagcccgctggccagcggcaggagggagagcggggcgccccacaggaggcacgagcactccccgcacccccagagcaggaccgggacgcccgagagagcacagccgccaagacggaaatcggtggaggaggagagcaaaaagcttaaagatgaggcagattttcaaagaaaactcccatcgggtccacaggacagttccaggcaatataatcacgcagctgccaaccaaaatagcaacgccacttcaaatatcaggaaggagtttgtgcccaaatggaataaaccgtcagacgtctcagctacagagagaactgccaaatacaccatggaaggcaaaggtcgagcagcgcaccccgcgctcgcagttaccgtcccaggtcctgccgaggtgcgggtgtcaaacgtgcggccaaagatgaaggccctggatgctgaggacgggaagcggggctccactgcatcgcagtacgacaacgtgccaggcccggagctggacagcggcgcttccgtggaggaggcgctggaaagggcttactcccagagcccccggcatgccctttaccctcctagcccgagaaagcacgctgagccaagttctagtccatcaaaagtatccaacaagtttacttttaaagtacagcctccaagtcatgcacgatatccgtcccagctagatggggaagcccgagggctagctcatcccccctcctacagcaatccccccgtttaccacggaaactctcccaaacacttccctactgccaacagcagctttgcttctccacagtttagccctgggactcaactgaatccttccaggagacctcatggttctactctttccgtcagtgcttctccggagaaatcttacagccgcccaagcccccttgtactgccgtctagtcgaatagaagtcctccctgttgacactggtgctgggggatattcgggcaattcagggtcaccaaagaatggaaaattgatcattccaccagtggattacttgccagataacagaacatggtcagaagttagttatacatacagacctgagacgcagggacaatcatggacccgagatgctagccgtggcaatttaccaaaatactcagcctttcaactcgcaccctttcaggaccatggcctccctgcagtttctgtagatagtcccgtgagatataaagcttcaccggccgcagaagatgccagtccatctggatatccatattcagggcccccgcctccagcctaccactacaggaatcgggacgggctttccatccaagagtcagtgttgctgtgagatttgacgtgtacttgctaaagacgagagagaaaccacgtgaaacctacattgctatgttcataattgccaaagcagtatttatactattgtaaacaactcgcacatctctcctgtctgttagtagtaagaatacagggaaatgtcttcagccccacgtagatgctgcttaagatgagcgtttcaattgcatcatcactgacctgttagaatttaacccggaaacatcgcaatagcatttagggatgcacgcacagtggtaatttattactcagttccggttatgtttttctccaaaacctgaacatttttactctgttggctcattctattttgactaatgttacaaagtactgaaaaaactgtagaatagatatttttaaggctatatgtagtgtatgtgtcttttaatagatataggcatctgttcatccacatttgaacacagagctaaagaaacgttttttaaaaaactacttttaatccagatccatggaataatatgtaattcttgttttccttgtcttttagtccagtttttctttttccctctcatatatttgtaacctgggtcctaaactgactgaagagtttgtcctgactttattaattgcagtctcacagaatgctcatcattctccttcagctgttgccattttctttcaatctgaaaattaaagacattggagagaaaggctaaccacttaatggtgcttaaaaatcggggcacttaaaataagtttacggccaaaggtgcagcagtgcttatcacatccacatactaagagattggtcttagtgcgtttgtgccctttgttctggtctgactcttgcgaatctcagagcaggagaagttgcagcttactgatccctcagtgctcacagtactcatgtggggcagccacactaactgcattagcagtgtggttacttctttcttctgcctcgactcacatggcttctccccacgaaggtcccagggtggccatttatacaatccatttctgtcctctttatggaatgtagtcgacggatattgctgcacctcatcaggccattacattgtccatgttaaaattataaaaatgatcctagtttttcataggagtctaggattttgatcttttaaaaaatacagtgtgatttcatgcttttgaacatctttttttcattgaaacaaattcaagttcttggcttaaaaaaaaattagtgatgtctttaaaaaatattctgttacactacagataccaaaacactgacaaagatttaggcactccaagagagtatgacttcgtgtttaattggggagcttgttttcaacattgcttatatttgaatagtagaaaacccgacattgatgtttcttcctgttgcaaggtggggctttaaactttcaaggtacaaaagtatgtcttttaaaatggaagtaacgtttgtttagctagtgaatgtgacaatatattttatgtatataatgagtctaatgtaattttgatcaacttggtaatgatgttattaaatagcaaaacaagtgcagtgtattaaagctaaacactacattgaaacgcaaacaaaattctggtgaaataactgggctgttgatgcaggtcaggtggaagctgagaaataaatgtatataaatatgtagctgaggatattaattcccattatataaccataattctgtgacttgtaataaaccaagctgtacaatttagtttataatagcagtatctgagctgctccaaaatatatatatcaacagtggtaaatactgtagatttttatatatatatatatatatatatatatatatgcaaaaaatatatatatacacacaagcactattttcttatgtcatttatgacattttttatctgtatacttttttgatgtgattgttttttaacatgctaaaagtaataagtata

SEQ ID NO: 897 - protein, 828 aa, Homo sapiens
MNSDQDVALKLAQERAEIVAKYDRGREGAEIEPWEDADYLVYKVTDRFGFLHEEELPDHNVAVERQKHLEIERTTKWLKMLKGWEKYKNTEKFHRRIYKGIPLQLRGEVWALLLEIPKMKEETRDLYSKLKHRARGCSPDIRQIDLDVNRTFRDHIMFRDRYGVKQQSLFHVLAAYSIYNTEVGYCQGMSQITALLLMYMNEEDAFWALVKLFSGPKHAMHGFFVQGFPKLLRFQEHHEKILNKFLSKLKQHLDSQEIYTSFYTMKWFFQCFLDRTPFTLNLRIWDIYIFEGERVLTAMSYTILKLHKKHLMKLSMEELVEFFQETLAKDFFFEDDFVIEQLQISMTELKRAKLDLPEPGKEDEYPKKPLGQLPPELQSWGVHHLSNGQRSVGRPSPLASGRRESGAPHRRHEHSPHPQSRTGTPERAQPPRRKSVEEESKKLKDEADFQRKLPSGPQDSSRQYNHAAANQNSNATSNIRKEFVPKWNKPSDVSATERTAKYTMEGKGRAAHPALAVTVPGPAEVRVSNVRPKMKALDAEDGKRGSTASQYDNVPGPELDSGASVEEALERAYSQSPRHALYPPSPRKHAEPSSSPSKVSNKFTFKVQPPSHARYPSQLDGEARGLAHPPSYSNPPVYHGNSPKHFPTANSSFASPQFSPGTQLNPSRRPHGSTLSVSASPEKSYSRPSPLVLPSSRIEVLPVDTGAGGYSGNSGSPKNGKLIIPPVDYLPDNRTWSEVSYTYRPETQGQSWTRDASRGNLPKYSAFQLAPFQDHGLPAVSVDSPVRYKASPAAEDASPSGYPYSGPPPPAYHYRNRDGLSIQESVLL

SEQ ID NO: 898 - DNA, 8034 bp, Homo sapiens
cttgagtgttagagctgagtagttttcccagaatctctaagtcctttttatgctcttttatgaatgaatagaattagtaaaagataaataaattttttcttttggatttcttaaccagtggaaaaaatgttgactttaaaagttcataaaatcaaattttgcttaagaatatgttatttccacttgtgaggccagcctggtagacctctgggatccttttctgttcactcacacaccactgagataaggagtgaagtgtgggctaaatagggctgaggcttgggcaagggcatttctgccagagcaccagagacgtcagcatctcaagggcactgtggtatggaaaaggacgccacatgagtaaattttaaaaatataaatattttaaagggtaaaaatgagggtccctgtatttgaggatataaaagatgaaactgaagaagaaaagataggggaagaagaaaatgaagaagaccaggtcttctataagcctgttattgaagacttaagcatggaattggccagaaaatgcacggaactcattagcgatatccgttataaagaagagtttaaaaagtccaaggataagtgtacatttgtgactgacagtcctatgctaaaccatgtaaaaaatatcggtgcttttatttctgaggcaaaatacaaaggcaccattaaagctgacctttctaattctctttataagcggatgccagccacaattgacagtgtttttgcaggagaagttacacagctccagagtgaggtggcctacaagcagaaacatgatgctgccaaaggattctcagattatgcccacatgaaggagccccctgaggttaaacatgccatggaggtcaataaacaccagagtaatatttcttataggaaagacgtgcaggacacccacacgtacagtgcagaacttgaccgaccagacatcaagatggcaacccagatctctaagatcataagcaatgcagaatacaagaaaggacaaggaataatgaataaagagcccgctgtaattggaagaccagattttgaacatgccgtggaagcttctaaactttctagtcaaattaaatacaaagaaaaattcgataatgaaatgaaggataagaaacatcattacaatcctcttgaaagtgcttcttttaggcagaatcagcttgctgctacactggcgagcaatgtgaagtacaagaaagacattcaaaatatgcatgatccagtttcagatctcccaaatttgttgtttttagaccatgttttgaaagccagcaaaatgctcagcggccgagaatataaaaagctctttgaggaaaacaaaggaatgtatcattttgatgcagatgctgtggaacatctgcaccataaaggcaatgccgtcctccaaagtcaggtgaaatataaagaagaatatgagaaaaataagggaaagccaatgcttgaatttgttgagacaccatcatatcaagcttcaaaggaggctcaaaagatgcaaagtgaaaaagtttacaaagaggattttgagaaggagattaaaggaaggtcatcactggatttagacaagactccagaatttttacatgtaaagtacatcaccaaccttctgagggagaaagaatataaaaaagatttggaaaatgagataaaagggaaaggaatggaacttaattcagaagttcttgatatccaaagagcaaagcgggcctctgaaatggcaagtgagaaagaatacaagaaagacctggagtcaataattaaagggaaaggaatgcaagctggcactgacacccttgaaatgcagcatgccaagaaggctgcagagatagcgagtgagaaagactataaaagagatctggagactgaaattaaagggaaagggatgcaggtgagcacagacactcttgatgtccagagagctaagaaagcatccgagatggccagccagaaacaatacaagaaggacttagaaaatgaaattaaagggaaaggaatgcaagtgagcatggatatcccagatatccttcgagccaagaggacatctgaaatctatagccagagaaagtataaagatgaagcagagaagatgctttctaactattctaccatagcagatactcctgaaattcagagaattaagacaactcaacaaaacattagtgcggtattttataagaaagaagtgggagctggcactgcagtgaaagatagcccagagatcgaacgagtgaagaaaaatcagcagaatattagttcagtgaaatacaaagaagagattaaacatgcaacagccatttctgatcctccagaactaaagagagttaaagaaaaccagaagaacatcagcaatctccagtataaagagcaaaactacaaggccactccggtaagcatgaccccggagatagagagagtgaggcgaaaccaggagcagctgagtgcggtaaaatataagggagaacttcaacggggaactgcaatttctgatccaccagagctgaagagggcaaaagaaaaccagaaaaacatcagcaatgtttattacagaggtcagctgggaagagctaccactttaagtgtaactcctgaaatggaaagagtgaagaagaatcaagaaaatattagctcggtaaaatatacccaggaccataaacagatgaaaggtagaccaagtctgattttagatacacctgctatgagacatgttaaagaagcacaaaatcatatttcaatggtaaaataccatgaagattttgaaaaaacaaaggggagaggctttactcccgtcgtggacgatcctgtgacagagagagtgaggaagaacacccaggtggtcagcgatgctgcctataaaggggtccaccctcacatcgtggagatggacaggagacctggaatcattgttgacctcaaagtttggcgcacagatcctggctccatcttcgaccttgatcccctggaagacaatattcagtctagaagtctccatatgctctctgaaaaggcgagtcactataggcgacactggtctcgatcccattccagcagtactttcggtacaggtctcggagacgacaggtcagaaatctccgagatttaccctagcttttcatgctgcagtgaggtaacaagaccgtctgatgaaggagcacctgttcttcccggagcctatcagcaaagccattcccaaggctatggctacatgcaccagaccagtgtgtcatccatgagatcaatgcagcattcaccaaatctaaggacctaccgagccatgtacgattacagtgcccaggatgaagacgaggtctcctttagagacggcgactacatcgtcaacgtgcagcctattgacgatggctggatgtacggcacagtgcagagaacagggagaacaggaatgctcccagcgaattacattgagtttgttaattaattatttctccctgccctttgagctttattctaatgtatcccaaacctaatctttttaaaagatagaagatacttttaagacaacttggccattattttacaatgatgtatccttcctttgacaattagacacacaggtaccaggaagaaggaatgacctctgggctgaaaacagcagcattttcagtaattcctacaaacaaaaatctttgtgtctggacgcctggtgctgctaattgtgttcatggtttcctttgattggctattgaacccttctgggaaatgtatttttgtagactttaatagagaagttgattgtcccttaaatgtagcgtgtgtttgaaacttcttagctgtcactttggaatcaccccaagccaattctcttaactctgtaatgcagccaataatacaaacccgttttgcttttgagtcatgaggcaatttccaatattagtgaaaattgcccaatataataagtgtaaacagtggcagaaggacagtctggttaaaattatattgactggtggccttagggatctagaaacttctactaaacagagaaatttccttgttccctaggctgactggtatctatttatttctcatttgtaccaaggcatctcctactctccatttatattctatggacccaagtctatgctcagttccacagaatgtcaggaccaaataacttcacagctactctgcaaagggcaaattataatgtcattgatataatttccctagtagcatttaccctgttgcatgtcatgtagattcaagcttctgtaacataggcagctgcactgcgcgttcctattattgaagcaaaaagggtgactgatacctaaaagccctttcttcctctagtcgccagctcatcagaaaaacatactttgaaaagatgcttgagattttcctgctgcatcgcactctagtttggaaggatttacatcttaggaaataacatgtatactctagtaaataagcgatttaggtgttccattgaacagctttgattaacttaatgccaccattgatttcaaagtgaagaaaatgtaacagaagccagtgaagcaatggaagctggagtgtgactggaaaaatactcagcaaacaaagttaccaattccatacagagatgatctggtgtcttcttttggaaaatggtattcaaattctggaatggaaatctagccaccaaaacgggttaatcaaaagacgtccttttccgttttttttgcttttattttctaaatcatttttaagggaatgaaacaggaatgtcatcagagattttttagtacaggcccaagagcctgtactctaagaaagaaatttttgccatgtatgaattttcgaataagtgactttgcaggcttttgctagcccttgctggtgggtctggaaattacatccagagtctgcagtccaggtcaccaagccagcggcacccgtcggcaaccctgtgtttaacggattgtgccgtttactgtgacctgcaacggggtggcattcacttagggtctgacttcacagctatgacaaaaccgaaaaagcaaaactgcgaggaagtgctaagatgtacgggtcttggggatatctgccttatatgttatattcaaggaaattaacgaaacatcctgtgaaacatcgtttaaggaaacgtttactagtccaaaggccaaagctaatttatttccactttagaaaagttagcacatgcttttgaaaatctgtgatttcattttattaggctaaaagggtaaataggctttattacactgaagctgcatctatatgtcactgacataaagttgaaaaaataaatgcaggcaaataactagagacttcttttaagggggtttggctggtttctctcactgaaatggccagtcgtgattaaagtgataaaaccccatatctgttttggtatattgtacacaaacctacaaaaataaactgaacttgcaatatttttgcaataaaatctgtcgttaaaactgaggataaaatacctgctcaattttattttactaagtatatatttacatttcacccaggcaggccattttcttttgtgattataagaaagagtagttgttgattaaattttcagactaaatataggacaggtacaattttggataaatagcagatttataagaaccgcaatgaaaactgacttgaaataatgcttgtaatcaggaaagtaatttcatccaccgatttcaaaaccagattcactgagcataaaagtcaatacatatttgaggaataagtctcctaaaattttaagcttcacgtaataatgtttgcatagcaaaatatttctgcttcaagcctttaggaattaagatctgatcagaatttaactaaagggtagttgttttacaatgaagactaaaactgaacaagatgttgcatgcgcttaggccataatttggtagtgttggcagttgttaataaagcttgtcaggatgttaagcatctcaggagaaatattggaaaattatatgtataaaaccaaagtgctgtttttaaaagcatcatttaaaaaaaaatgacatgcctgaacaacttttccactttccacgtgcttccctcccacctttggtttggcaacaggtatctcgtgcatgaagctgacagctaaagaagattttaaaaattgagttaaagatgactgtgtaaatgtccaagcacagagagcatgcacctgactttctaaagtttgatgtgttctcaagcctgacagaagcacaaggaacagtttgatacacttttaaaaggttctgaaaacaaagctgtatagggatcctctctctcttgagcaaagtatagcaacagaatatattgcttttgttgtaagcttttgtagtacatgtttttactaataattcttgttctctagaaagctttctatttctaacctatggcaaaatgaatccttcatgtcttcttgttattgtttacacacttgcagtgtagcccagtttgaaatatttatttggttatcaactgcccatggaggaggctcttgatgatcccaggtctcctcgacctccatacaccacacaggcatttgtaagcacagtttccacaagcaccttgtaggaatatggataagattagaccagcccctctctgtccactgggtttatttcttgaagaagatgcagatctggtttttccaatgtgccacagtctttccttatcctctccatgctgagcttgacaacactctgggaatgaggaacaagactttttctaaaaagatagtggaagttcaagggatgtacctcgttttcaggttcatccatctccagtggaatgttttcaataaaagatgaagaaaatgtgtgtgatctttaataacacatccctatagaaagtggataaaagatataccaaaactgtaatacagatatatacaaatataggtgcctttttgattactcttgtttgtctagtatgctcttggaaagaaaaccaagcaagcaagttgctgcctattctatagtaatattttattacacatgattgatatttttgtggtagggaagtgggatgctcctcagatattaaaggtgttagctgattgtattttatctctaaagatttagaactttagaaaatgccgacttcttccatctatttctgaaaggttctttgtggatttatatagagttgagctatataaacattaactttagatttgggatttaaaatgcctattgtaagatagaataattgtgaggctggattcactacacaagatgaacttcacttcataaattaattataccttagcgatttgcttctgataatctaaaagtggctagattgtggttgttttggttaaggtgatatggaggtgggagagcttttagttaagtaagaagctatgtaaactgacaaggatgctaaaataaaagtctctgaagtattccatgccttttggaccctttcctcgcaactaactgtcaactgttgatcaaaaaagtcaaggcattgtatgttgcttctgtggttattattctgtgatgcttagactacttgaacccataaacttggaagaatctttgagcaaattttctcagttgtctgtatgacttcagtatattcctgggaatgccataggattttttgtgcttgatacatggtatccagtttgcatagtatcacttctttgtaatccagttgctgttaagaatgatgtactttaaaggaaaagagaaaactgcatcacagtcccattctccagtgtccatgcaatgaattgctgagcatttaggaagcagcaccaagtctattacaggcatggtgtgaaacttgatgtttgacctgtgatcaaaattgaaccattgtacagtttggcttctgtttgcttcaaaatatgtagaattgtggttgatgattaatttgcgagactaactttgagagtgtaacagttttgaagaaaacattgaatgttttacaaatgaaggggcttcacggaatgttacaatgttactaatataatttggcttttgttatgcaaattgttaacaccagctattaaaatatattttagtagaaaaaaaaaaa

SEQ ID NO: 899 - protein, 1014 aa, Homo sapiens
MRVPVFEDIKDETEEEKIGEEENEEDQVFYKPVIEDLSMELARKCTELISDIRYKEEFKKSKDKCTFVTDSPMLNHVKNIGAFISEAKYKGTIKADLSNSLYKRMPATIDSVFAGEVTQLQSEVAYKQKHDAAKGFSDYAHMKEPPEVKHAMEVNKHQSNISYRKDVQDTHTYSAELDRPDIKMATQISKIISNAEYKKGQGIMNKEPAVIGRPDFEHAVEASKLSSQIKYKEKFDNEMKDKKHHYNPLESASFRQNQLAATLASNVKYKKDIQNMHDPVSDLPNLLFLDHVLKASKMLSGREYKKLFEENKGMYHFDADAVEHLHHKGNAVLQSQVKYKEEYEKNKGKPMLEFVETPSYQASKEAQKMQSEKVYKEDFEKEIKGRSSLDLDKTPEFLHVKYITNLLREKEYKKDLENEIKGKGMELNSEVLDIQRAKRASEMASEKEYKKDLESIIKGKGMQAGTDTLEMQHAKKAAEIASEKDYKRDLETEIKGKGMQVSTDTLDVQRAKKASEMASQKQYKKDLENEIKGKGMQVSMDIPDILRAKRTSEIYSQRKYKDEAEKMLSNYSTIADTPEIQRIKTTQQNISAVFYKKEVGAGTAVKDSPEIERVKKNQQNISSVKYKEEIKHATAISDPPELKRVKENQKNISNLQYKEQNYKATPVSMTPEIERVRRNQEQLSAVKYKGELQRGTAISDPPELKRAKENQKNISNVYYRGQLGRATTLSVTPEMERVKKNQENISSVKYTQDHKQMKGRPSLILDTPAMRHVKEAQNHISMVKYHEDFEKTKGRGFTPVVDDPVTERVRKNTQVVSDAAYKGVHPHIVEMDRRPGIIVDLKVWRTDPGSIFDLDPLEDNIQSRSLHMLSEKASHYRRHWSRSHSSSTFGTGLGDDRSEISEIYPSFSCCSEVTRPSDEGAPVLPGAYQQSHSQGYGYMHQTSVSSMRSMQHSPNLRTYRAMYDYSAQDEDEVSFRDGDYIVNVQPIDDGWMYGTVQRTGRTGMLPANYIEFVN

SEQ ID NO: 900 - DNA, 1245 bp, Homo sapiens
cctgcgcggcggcggcggcgaggcgggggagcgagtgagcgcgaggggcgggcgcgagtgactgtgtgagtcacccgtacctggagtgcgagcgacgcagagccagcggcgcggagccggagccggagccgagacccagcgcctgcgagcccgagagcgcggccggccccaggcgccaggccccgtcgccctccccgtgcactcacccgtggcccggcgccgactccctacccggcgcccgccgcccgcagccctcccgcctgccaggaggcggtgcggggctcgccgggggatgtcacagcggctcctgggagccagcagccgccgccgccgccgcccccgggaaccgcgatcatgaacccccagtgcgcccgttgcggaaaagtcgtgtatcccaccgagaaagtcaactgcctggataagtattggcataaaggatgtttccattgtgaggtctgcaagatggcactcaacatgaacaactacaaaggctatgaaaagaagccctattgtaatgcacactacccgaagcagtccttcaccacggtggcagatacacctgaaaatcttcgcctgaagcagcaaagtgaattgcagagtcaggtcaagtacaaaagagattttgaagaaagcaaagggaggggcttcagcatcgtcacggacactcctgagctacagagactgaagaggactcaggagcaaatcagtaatgtaaaataccatgaagattttgaaaaaacaaaggggagaggctttactcccgtcgtggacgatcctgtgacagagagagtgaggaagaacacccaggtggtcagcgatgctgcctataaaggggtccaccctcacatcgtggagatggacaggagacctggaatcattgttgcacctgttcttcccggagcctatcagcaaagccattcccaaggctatggctacatgcaccagaccagtgtgtcatccatgagatcaatgcagcattcaccaaatctaaggacctaccgagccatgtacgattacagtgcccaggatgaagacgaggtctcctttagagacggcgactacatcgtcaacgtgcagcctattgacgatggctggatgtacggcacagtgcagagaacagggagaacaggaatgctcccagcgaattacattgagtttgttaattaattatttctccctgccctttgagctttattctaatgtatcccaaacctaatctttttaaaagatagaagatacttttaa

SEQ ID NO: 901 - protein, 270 aa, Homo sapiens
MNPQCARCGKVVYPTEKVNCLDKYWHKGCFHCEVCKMALNMNNYKGYEKKPYCNAHYPKQSFTTVADTPENLRLKQQSELQSQVKYKRDFEESKGRGFSIVTDTPELQRLKRTQEQISNVKYHEDFEKTKGRGFTPVVDDPVTERVRKNTQVVSDAAYKGVHPHIVEMDRRPGIIVAPVLPGAYQQSHSQGYGYMHQTSVSSMRSMQHSPNLRTYRAMYDYSAQDEDEVSFRDGDYIVNVQPIDDGWMYGTVQRTGRTGMLPANYIEFVN

SEQ ID NO: 902 - DNA, 2913 bp, Homo sapiens
gaatggctggggttggctgaagagcgcacagtggagttttaatgtccgccatgttggccatggcgtattgaagagagcgagcgagagaggagcggagcggcacagcctcccaccctcccggctggtgttagtgcccggacggcgggctctgcgctccgcccctcaagtccccggcagcggttggcgagtgggggccgaacccccggttctccatgatcccgctggccggggccgtttccccagagcggagaggtatctgctgcgcctgagatgagtaaactgtcgtttcgggcgcgggcgctagacgcctcgaagccgctgccggttttccgctgtgaggatctgcccgacctgcacgaatacgcctcgataaacagggccgtgccgcagatgcccaccggaatggagaaggaagaggagtcggaacatcatcttcagcgggctatttcagcacagcaggtgtatggcgagaagagggataatatggttataccggtcccagaggcagaaagtaatattgcttactatgagtctatatatcctggggaatttaagatgccaaagcagctcattcacatacagccttttagtttggatgctgaacagcctgattatgatttggattctgaagatgaagtatttgtgaataaactgaaaaagaaaatggacatctgcccattgcaatttgaggagatgattgaccgcctagaaaaaggcagtggtcagcagccagtcagtctgcaggaagccaaactactgctaaaagaagatgatgaactaattagagaagtttatgaatattggattaaaaagagaaaaaactgtcgagggccatctcttattccatcagtaaaacaagagaagcgagatggttccagcacaaatgatccttatgtggcttttagaaggcgtactgaaaaaatgcagactcgaaaaaatcgcaaaaatgatgaagcctcttacgaaaaaatgcttaagctgcgacgagatctaagtcgagctgttactattctagagatgataaaaagaagagaaaaaagtaaaagagagctattgcacttaacactggaaattatggaaaagaggtataatttgggcgactacaatggagagatcatgtctgaggttatggcacagagacagccaatgaaacctacttatgccatccccatcatccctattactaatagcagtcaatttaaacaccaggaagcaatggatgtgaaggagttcaaagttaataagcaagataaagccgatcttatccgaccgaaacggaaatatgaaaagaagcccaaagtcttaccatcgtctgccgctgctactccccaacagacgagtcctgctgcactgccagtcttcaatgctaaagatctgaatcagtatgactttcccagctcagacgaagaacctctctcccaggttttgtctggctcttcggaagctgaggaagacaatgatcctgatggtccttttgctttccgtaggaaagcaggctgtcagtactatgctcctcacttagaccaaactggcaactggccttggactagtcctaaagatggaggattaggggatgtgcgatatagatactgcttaactactctcaccgtaccccaaaggtgtattggatttgcacgaagacgggttgggcgcggtggaagggtcttactggacagagctcattcagactatgacagtgtgtttcaccatctggatttggaaatgctttcctcaccacaacattctccagtcaatcagtttgccaatacctcagaaacaaatacctcggacaaatctttctctaaagacctcagtcagatactagtcaatatcaaatcatgtagatggcggcattttaggcctcggacaccatccctacatgacagtgacaatgatgaactctcctgtagaaaattatataggagtataaaccgaacaggaacagcacaacctgggacccagacatgcagtacctctacgcaaagtaaaagtagcagtggttcagcacactttgcatttacagccgaacaataccagcaacatcaacagcaactggcactcatgcagaaacagcagcttgcacaaattcagcaacagcaagcaaatagtaattcctccaccaacacatcacagaaccttgcatctaaccagcagaaaagtggctttcgcctgaatatacagggtttagaaagaacactacagggttttgtttctaagactttggattctgctagtgcacagtttgctgcttctgctttggtgacatcagaacaactgatgggattcaagatgaaggatgatgtggtgcttggaatcggggtgaatggcgtccttccagcctcaggagtatacaagggcttacacctcagtagtactacaccaacagcacttgtacatacaagtccatcaacggcaggttcagctttgttacagccttcaaatattacacagacttcaagttcccacagtgcactgagtcatcaagtaactgctgccaattctgcaacaactcaggttctgattgggaacaacattcgattaactgtaccttcatcagttgccactgtaaactctattgccccaataaatgcacgacatatacctaggactttaagtgctgttccatcatctgccttaaagctggccgctgcagcaaactgtcaagtttccaaggtcccatcttcatcctctgtagattcagttccaagggaaaatcatgaatcagaaaagccagcactgaacaacatagcagacaacacagtagcgatggaggtgacgtagcttcctccgagtggaactgcagcctggggacttgattaggtgctatgcatcagtagcattttgaatgcaagggatgatggaaagcagcacatgcgtttctgtggcagctgtggggacttgacagcaatgctc

SEQ ID NO: 903 - protein, 836 aa, Homo sapiens
MSKLSFRARALDASKPLPVFRCEDLPDLHEYASINRAVPQMPTGMEKEEESEHHLQRAISAQQVYGEKRDNMVIPVPEAESNIAYYESIYPGEFKMPKQLIHIQPFSLDAEQPDYDLDSEDEVFVNKLKKKMDICPLQFEEMIDRLEKGSGQQPVSLQEAKLLLKEDDELIREVYEYWIKKRKNCRGPSLIPSVKQEKRDGSSTNDPYVAFRRRTEKMQTRKNRKNDEASYEKMLKLRRDLSRAVTILEMIKRREKSKRELLHLTLEIMEKRYNLGDYNGEIMSEVMAQRQPMKPTYAIPIIPITNSSQFKHQEAMDVKEFKVNKQDKADLIRPKRKYEKKPKVLPSSAAATPQQTSPAALPVFNAKDLNQYDFPSSDEEPLSQVLSGSSEAEEDNDPDGPFAFRRKAGCQYYAPHLDQTGNWPWTSPKDGGLGDVRYRYCLTTLTVPQRCIGFARRRVGRGGRVLLDRAHSDYDSVFHHLDLEMLSSPQHSPVNQFANTSETNTSDKSFSKDLSQILVNIKSCRWRHFRPRTPSLHDSDNDELSCRKLYRSINRTGTAQPGTQTCSTSTQSKSSSGSAHFAFTAEQYQQHQQQLALMQKQQLAQIQQQQANSNSSTNTSQNLASNQQKSGFRLNIQGLERTLQGFVSKTLDSASAQFAASALVTSEQLMGFKMKDDVVLGIGVNGVLPASGVYKGLHLSSTTPTALVHTSPSTAGSALLQPSNITQTSSSHSALSHQVTAANSATTQVLIGNNIRLTVPSSVATVNSIAPINARHIPRTLSAVPSSALKLAAAANCQVSKVPSSSSVDSVPRENHESEKPALNNIADNTVAMEVT

SEQ ID NO: 904 - DNA, 1999 bp, Homo sapiens
agtctgtaggtgactgcagaaggaggaggagctccatctgttctctcttcaggcagttgttgtgtgtctcagcgcttgttgggttcacaacctattaaataagccggctggtcttcaccctcccagacaagtcaactcaggggagtcagcagggcacgggccttggcccgcagccccagctggggccatgcctgggctgtgaagtgggcaggcgagcagcaggcaagaccatctctgcaagtgcagcatagcctcagcctagggcagcgggagtgtgtggcccaagctgtgagcaaaggcacagatggtgacaggagtagaggcaccccatgggaaacatactgacctgttgtgtgtgccccagggccagccctgggttgcaccagcaccagggattggtgtgtcactgtgagtctgagatctatgaggcagcagctggggacctgatagcaggagtgcctgtggctgctgctgtagagcctggtgaggtgacttttgtagctggtgagggcctccacatgcaccacatctgtgaacgggagatgcctgaagatatacctttggagcccaacccttctgaccatccaaaggcaagcacaatattcctgagaaaatctcaaacagatgtgtataaaaaaagaaaaagcaactatgcaaagcatgtatctactgagcattttactcaacaatacagttcatgttcgacaatattccttgatgacagcatagccagccagcctcatcttacaatgacactaaaatctgtgaccttggcactatattatcatatcaagcaaagagatgcacatagatctttgggcatatttgatgaacagttacacccacttacacgaaaagaggttttggaggaatattttaagtatgatcctgaacacaaattgatcttcagatttgttcgtactctgtttaaagccatgaggctaacagctgagtttgcaatcgtaagtttgatttacatagaaagacttgtaagttatgctgatatcgacatttgtccaactaactggaagaggattgtcttgggagccattcttcttgcctccaaggtttggagtgatatggctgtgtggaatgaggactactgcaagctctttaagaacattacagttgaagaaatgaatgagttggaaaggcaattcttgaagctaattaattataataacagcattactaacagtgtttatagcagattctacttcgatcttcgcaccttggcacacaacaacggcctgtattcaccagtttatcttcttgacagagaaagagcttggaagctggaggctttttcaaggatggaacaagacaaagttttctacagtgctgccaagaatgggtctctgagtgcagatgatttaattcatcttcagcgtgctaaggccatcctcttctgaaggaagaaatgaggagtaatttaacatctgaacccctcatcaaaaaagacaggaaaatatcacctctcctgctaaagaactagaaaagttggtattttctaaagaagaaacacctcaattcaagttaactcaaggacaactaagattgcacttcgtagtaaagaatgggaccttgtcagggcaacaacacactcttacactcttctgtcctgtttaatgtaaacagagttataaaaaccacttcaaagtgaagactcctgcccacgtacagatatttgcttaatgtgtgggctgatagctgtgaactatgtaaggcttttaaaacaatagtttaactttttagattttaaagataacttttctgtttcttttatgtttttttcttttccccaatattcctgcatatgcatttggaatcagtgcagtatcactgttaaaacatgggagtctaacaactcctaaagccactaggagcagtcccagcattgtcaggtatggaagggctctttcttcctacttttaccatggaagctacagttactggcgatcatcaagcaaaagctgccaattaacatttgccattcgta

SEQ ID NO: 905 - protein, 360 aa, Homo sapiens
MGNILTCCVCPRASPGLHQHQGLVCHCESEIYEAAAGDLIAGVPVAAAVEPGEVTFVAGEGLHMHHICEREMPEDIPLEPNPSDHPKASTIFLRKSQTDVYKKRKSNYAKHVSTEHFTQQYSSCSTIFLDDSIASQPHLTMTLKSVTLALYYHIKQRDAHRSLGIFDEQLHPLTRKEVLEEYFKYDPEHKLIFRFVRTLFKAMRLTAEFAIVSLIYIERLVSYADIDICPTNWKRIVLGAILLASKVWSDMAVWNEDYCKLFKNITVEEMNELERQFLKLINYNNSITNSVYSRFYFDLRTLAHNNGLYSPVYLLDRERAWKLEAFSRMEQDKVFYSAAKNGSLSADDLIHLQRAKAILF

SEQ ID NO: 906 - DNA, 2283 bp, Homo sapiens
tataaatagttgctccgtgggctttccgcatttcaccctgctccaggcagcgtggtctgtatggctccgccctgggcaggaggagaaagaagagggccaggcaccacgtgcctgcactctccctggatgctggaggctgctccgccgtgggcaggaggagaaggaagagaactgggtgccgcctgcctgcactctctccggatgctggaggctggaggcagtgaggcagcaacagcgcgagggcgaggcgactttggagctgcctcatgcagcgacctcgccttccgctgcgcctcctcccagaacccaagaagcctggaacctgtggcgtccagccctgaaaggaggagacggcaacccagccgcgcttttgcctgcactctccctggatgctggaggctggaggcagtgacgcagcaacagcgcgaggcgactttggagcggcctcatatagcgacctcgccttccgctgcgcgtcctcccagagcccaagaagcccggaacctgtggcatccatctctgaaaggagaagacggcaacccagccgaggcactactgggttggggtctccacgaccgagctggtctcatcaagtggcgtccaacaaggggctcaaacccgggttgaggggttgctggagcgacggagaacgtggaactacactggaggacaccagagtactcttaagcaatcccttggccaaaaccagcaactgatttggataccatcaagacacctgaaatcttgtcatgagccagatactgaggaagagattttgggaagaacccaaggaccccccagttgcagccatgtcaagactgacaataaggaagacatcagtcccagcaagcaacattcatcgggcacagccacccatgtggggccagatcaagaagttgacacagatggcggaagaaaatctgaagaaagcggatgaccagctacaatgagtaatctaatgtctgcagatgtggatcccgaatcctgcgagaagtagcccaccatgacgaagctgcctttgcttttatcgctttgcaaaaacagaaaaggggacatgctgggaacaggccctaagcctgtcataaacaggccttaaactgaccatgaacaggatttctgcacgaatgtgacgtgctcctgatggctatgacgcccactgctagaagttgttagtttactggagcagggtagggaacacctggcccacccggagcggaaaactgctcaaaccacaaacaacagcatgagtggcctgagccttaacaacatgtttttgctgcagataatcggccagagactgtttctctactcctctctaagtatgctttgtttttcgtaaggaatgcttttagctaatctgtaacctatagaaacaatgcttatcactggcttgctgtcaataaacatgtgggtcaaactctgtttgtggctctcagctctcaaggctgttttccccctgattcccactttgcactttatttctgtgtgtttgtcttcattcctctagcaccactgggttggggtctccttgaccaagctggtctcggcacatatgcatgtatgcccaggtcctgaaatcagccttgtggagcctgtgggtaggaaaagtcaaccctctgtgcatgtaggcctggaacctgaccaatactgtattttcctaccacgtttggtttcaaatgtggaaactgcccatacggacctactgcatttgtttttaaaaatcctctgtaagtggacctgcacagttcaggcccagattgttccaggatcaaccctacagtagaaatcaagtatctttttcattgtctcttgggatctgccttttcaccaataaaatatgagggctgttgggagcaggcccccccaaatctggccataaactgtccccaaaactggccataaacaaaatctctgcagcactataacatgttcataatggccataacgcccaagttggaaggttgtggatttacaggaatgagggcaaggaacacctggcctgcccagggtggaaaaccacttaaaggcattcttaagccacaaacaatagcatgagtgatctgtgccttaagaacatgctcctgctgcagttaactagcccaacatattcctttaattcagtccatcccttcgtttcccataagggatacttttagttaatttaatatctatagaaagaatgctaatgactggtttgctgttaataaatacgtgggtaaatctctgtttggggctctcaactctgaaggctgtgagacccctgatttcccacttgacacctct

SEQ ID NO: 907 - DNA, 606 bp, Homo sapiens
ctgcgcatgtgcgcggtgtggctccaggtgaaggatgcccggaggcctcggcaggaccgtgcggaaacgggccttctgcccaaaagatgctgcttctctccttattctttcccctcagaatctcgctgtctccttccaaccacctgtggtcggcatccccgcgttgtcactgcgacgcagaggcgagcgaggtggcgggaagcacccgcggggcggggagggaccctgcgggcgcggactccacaccaagcctctgctcagcgtcaccccgcttgctgtgtcctcgcaggtcgcagcttcatggcctgatgccttcaggaagtattttgaagtcatcgtggctgtggattgggggatttcttgtttccactgacctgtgaggccgcgcacgtggagggaggcaccccgggtcctccggcactgtccggcctcgcctgtgtccctagtagcagtgggcatttccagacggtgcagcttgtggctaaagtgacaggaagatgtaggagctttcagtcttggatgaggattcgaactgaagggcttaggcccagctgtcttggagcaaaacatctgttgtggggtgagaagggaaaggaggggtgaggg

SEQ ID NO: 908 - protein, 112 aa, Homo sapiens [sequence omitted]

SEQ ID NO: 909 - DNA, 667 bp, Homo sapiens
gggctttctgcgcatgtgcgcggtgtggctccagggaacgtaggtcccgcgcctgtgataagtaaggttggattttctcttccctgaggtgaaggatgcccggaggcctcggcaggaccgtgcggaaacgggccttctgcccaaaagatgctgcttctctccttattctttcccctcagaatctcgctgtctccttccaaccacctgtggtcggcatccccgcgttgtcactgcgacgcagaggcgagcgaggtggcgggaagcacccgcggggcggggagggaccctgcgggcgcggactccacaccaagcctctgctcagcgtcaccccgcttgctgtgtcctcgcaggtcgcagcttcatggcctgatgccttcaggaagtattttgaagtcatcgtggctgtggattgggggatttcttgtttccactgacctgtgaggccgcgcacgtggagggaggcaccccgggtcctccggcactgtccggcctcgcctgtgtccctagtagcagtgggcatttccagacggtgcagcttgtggctaaagtgacaggaagatgtaggagctttcagtcttggatgaggattcgaactgaagggcttaggcccagctgtcttggagcaaaacatctgttgtggggtgagaagggaaaggaggggtgaggg

SEQ ID NO: 910 - protein, 112 aa, Homo sapiens [sequence omitted]

SEQ ID NO: 911 - DNA, 5958 bp, Homo sapiens
gggaggcggtcccgggatttcaggggtctaccggctctcttatggcgaatgcaacccgaagagagagtgagctgtatcttcagagttgtctccgtctttccaagaacagaacaaaatgaacaaggtagatcagaagttccaggggtcagtatcatttaaagatgtgactgtgggcttcacccaggaggagtggcagcacctggaccctagtcagagggctctgtatagagatgtgatgctggagaactacagcaaccttgtctcagtggggtattgtgctcacaaaccagaggtgatcttcaggctggaacaaggagaagaaccatggagactggaggaagaattcccaagccagagctttccagaagtctggacagctgatcacctgaaagagaggagccaagaaaatcaatctaaacatttgtgggaagttgtattcatcaataatgaaatgctgactaaggaacaaggtaatgtaataggaataccatttaacatggacgtaagttcttttccttccagaaaaatgttctgtcagtatgactcacgtggaatgagtttcaacactgtttcagaattggttatcagtaagataaactatttaggaaaaaagtctgacgaatttaatgcatgtgggaaattgttactcaatattaagcatgatgaaactcatactcgagagaaaaatgaagttttgaaaaataggaacactctgagtcatcgtgagaacactttgcagcatgagaagattcaaactttagaccacaattttgaatacagtatatgtcaggaaaccctccttgaaaaggcagtattcaatacacggaagagagagaatgcagaagagaataactgtgactataatgaatttgggagaactttctgtgatagttcatccctcttgttccatcagatacctccatcaaaggacagtcactatgaatttagtgattgtgagaagttcttatgtgtgaagtccaccctttctaaacatgatggggtacctgtgaaacactatgattgtggtgaaagtgggaataatttcaggaggaaattgtgtctgtcacagcttcagaaaggtgataaaggagagaaacactttgaatgtaatgaatgtgggaaagctttctgggagaagtcacatctcactcgacatcagagggtgcacacaggagagaaacactttcaatgtaatcaatgtggaaaaactttctgggagaagtcaaacctcactaaacatcagagatcacacacaggggagaaaccttttgaatgcaatgaatgtgggaaagcctttagccataagtcagccctcacattacaccagagaacacatacaggggagaaaccctatcagtgtaatgcatgtgggaaaactttttaccagaaatctgacctcactaaacatcagagaacacacacagggcagaaaccctatgaatgttatgaatgtggaaaatccttctgtatgaattcacaccttacagtacaccagagaactcacacaggtgagaaaccttttgaatgtcttgagtgtgggaaatccttttgtcaaaagtcacatcttacacagcatcagagaactcacataggagataaaccttatgaatgtaatgcatgtgggaaaactttctaccacaagtcagtactcaccaggcatcagataattcatacagggttgaaaccttatgaatgttatgaatgtgggaaaaccttctgcttgaagtcagacctcacaatacatcagagaacgcacacaggggagaaaccctttgcatgtcctgaatgtgggaaattctttagccataagtcaaccctctctcaacattatagaacacacacgggggagaaaccctatgaatgtcatgaatgtggaaaaatcttttacaataaatcatacctaacaaaacataatagaacacatacaggggagaaaccctatgaatgtaatgaatgtggaaaaaccttctgccagaagtcacaactcactcagcatcagagaattcacataggggagaaaccctatgaatgtaatgagtgtggaaaagctttctgccataagtcagctctaattgtacatcagagaacccatacacaagaaaagccttataaatgtaacgaatgtggaaaatctttctgtgtgaagtcaggacttattttacatgagagaaagcacacgggggagaaaccctatgaatgcaatgaatgtgggaaatccttcagtcacaaatcatcactcacagtacatcacagggctcacacaggagagaaatcttgtcagtgtaatgaatgtggaaaaatcttttaccgtaaatcagaccttgctaaacatcagagatcacatacaggggaaaagccctatgaatgtaacacatgcaggaaaaccttctctcaaaagtcaaatctcattgtacatcagagaacacacataggagaaaaaccttatgaatgaattggatattagaaatttccagccacaagtcagcctccataatgcctcagagtcttcacactgtggagaagggcctgttgacatcctgaatgttcaataactatccacaaactcgccttatgttactccaaagtaacagtaggggataaacccatagactacaacaactataggatggcttttgttaggaagtgatattctgttgaatatcagatggttaatactggcataaaacctcacagatttttttgaatttgtgaaagtttttggcaaaactacaaataggattatgttagcatttacactgaggagaaaattgtcaatttaagaaatctaaagtgaaaattttgcttagaaataaaatatgacaagttctgttttgagtttgatgccataatagtttttaaggtatctaacaataatttatagatgtacattgtggaatgtaaagctttaagaattttttaagaagtaataattaaaataacctcacaagaagttgtaatgagtacagagaattcccgtgtacccttcaccaagcttcctctaaggataatatataatcatagtatatggtcaagtccaagaaatcgatgttaccttgctagtagatgcagacttactcagattttgctatggtttgcgtgcactctgtgtgtgtacgtgtatgtgtgtgtgtgtggttataacaaactggtacttttacatttgagtaaccatcaacacaattagtttacagaatggaaaaggagtctgagatctgtactgtttcaggattacaaaggaatcaggatttagcctcaagtagttcccttgttgtattaataaccacaccctttctgcatccctgtccctggcatccacttgactatgaagctttttgtaaagcatagataaattgaataatcagggcaacagcattaagcacatctgtgaattatccctgaagttcataggacttacatatgtacaagtggtatgtgatataaatcgtgtgtttcatatgcataatggtatttaacgtaattgtgaataggaagtaggtatcctaatttagtagtggttacttcatcaggcccatcccaggtgtttgtcgtgtcctgaaacaatttaaatagagacccacagagctaatgtttatccatttaaaagttataaatcaaaataacagattatctgaaaaaaaatctatcctgtacgtgtgaagatctaggcctgcctccatgttactccctttctcttactacctgtggctcatcccatgccatgaactgcctggggtacatatgtgaacactccagccttcagcgtaagtgatagtccaaattttctttaagcagctgctctccaagacagggccctggaaagaggcccacacatacagcccagttgctgcccagggctgttggactgtcatttcattgctcattgtacccagacagggatctgggccttcagagacttttgagaatatgaagaggagggttgaggctggagaagagccagaatcaagctggcatggggcttttattgacagtgtgaagattgtacactacattacatgatcagatcatacaaataatctaagattttacagtctggtgaccctagattacacaagtaatctaagcttccactttggaaaactagaaaaagaagagcaaattaaatccaaagtaacctggaaaaaaattagagtaaaaatcagtgaaattgaaaagagaaaatcaataaaacccaaaactgttctttgaaaaggtgggtaaaattgataaacctctagctagattaagaaaaaacagaagacaaatactgctaataccaaaagtgaaagaggccatcatagctgatcctatggtcaccaaaaggattagaaagaaatatggacaactctgtccataaatttgataacttagctaaaatggatcaattccttgcaagatgcattctctcaaagctcataaaaggtagatctcagtaggcatatatatctattaaataaattgaagcagtaattaataaccttccaagaccaggcgcggtggctaaaaatacaaaaagttagccgggcgtggtggcatgcgtgtatagtccaagctactcaggaggctgaggcagaagaatcacttgaacctgggaggtggaggttgcagtgagccaagattgtgccactgtactccagcctgggtgacagagtgagactccatctcaataaaattaataataataaaaccttccaaaaaaagtgccgggaccaaatggattcactgatgtgcatttttcgagatacttaaggtagaaatgataccaagtctgtactgtctctttcagaaaataaaagcagggataacacttcccaaatcattttgtgaggccaggattaccctaataccaaagccaggcaaaaacattacaagaaaggaaaactacagatcaatatttccagtgaacacagatgcagaaatccttaaaatgttagcaaatcaggaatgcaagccttgttcaacatttgatattcagtgcaatccattgcatgcattagcagttcaaagattaaatatgatcatatcaataggtacagaaaaagcatttgacaaaatccaatatccattcatgataaaacctctcaacacagaaggaatacaggagaacttactcaatttgataaagaactactacaaaaaaccctacatctagcatcatccttgatgtttccaactaaatgctttcctactaagatcaggaacatggcaaggaacaccactgcttttcagcattgtactggaagtgctatctaatgcagtgataccaaaaaaaaaggaaataaaatgcacataaatttggaaggaggaaatacaactgtctttgttctcaaataacatgattgtctttgtagaaaattctaaataacaaaaacctgctgacattaataagcaattatagcagggttgtagaatgtagtcctcaggtatatgataaaaaagaattagacatcaagtcattaaaagacatataggaaccctaaatgcttattgttaagtgaaaaccaatctgaaaaggctttctatgttgtatgattgcaattatatgacattctgggagaggcaaaactatcgagcgagtcaaaggaccagtggttgctgagagttgaggggaaaggagggatggcaggtaggtgatttttaggacagtgaaagtactctgtagggtactgtaatttgtcaaaatgcagagaatggaaaacagtgaacggaaaacacagagtaaaccctagtgtcaactctggacttcagttaataacagtgtaccactattggctcatcaattgtaacaaatgaaccataatgatgcaagatgttaataattggggagcctgtggaggatgggagggttaaaggtttatatgagaattctctgtactttttgctcaatttttctgtaaccctaaagctgctctaaaaaatgaagtgtattaagtaaataaataagtaaataaccaaccaacc

SEQ ID NO: 912 - protein, 778 aa, Homo sapiens
MNKVDQKFQGSVSFKDVTVGFTQEEWQHLDPSQRALYRDVMLENYSNLVSVGYCAHKPEVIFRLEQGEEPWRLEEEFPSQSFPEVWTADHLKERSQENQSKHLWEVVFINNEMLTKEQGNVIGIPFNMDVSSFPSRKMFCQYDSRGMSFNTVSELVISKINYLGKKSDEFNACGKLLLNIKHDETHTREKNEVLKNRNTLSHRENTLQHEKIQTLDHNFEYSICQETLLEKAVFNTRKRENAEENNCDYNEFGRTFCDSSSLLFHQIPPSKDSHYEFSDCEKFLCVKSTLSKHDGVPVKHYDCGESGNNFRRKLCLSQLQKGDKGEKHFECNECGKAFWEKSHLTRHQRVHTGEKHFQCNQCGKTFWEKSNLTKHQRSHTGEKPFECNECGKAFSHKSALTLHQRTHTGEKPYQCNACGKTFYQKSDLTKHQRTHTGQKPYECYECGKSFCMNSHLTVHQRTHTGEKPFECLECGKSFCQKSHLTQHQRTHIGDKPYECNACGKTFYHKSVLTRHQIIHTGLKPYECYECGKTFCLKSDLTIHQRTHTGEKPFACPECGKFFSHKSTLSQHYRTHTGEKPYECHECGKIFYNKSYLTKHNRTHTGEKPYECNECGKTFCQKSQLTQHQRIHIGEKPYECNECGKAFCHKSALIVHQRTHTQEKPYKCNECGKSFCVKSGLILHERKHTGEKPYECNECGKSFSHKSSLTVHHRAHTGEKSCQCNECGKIFYRKSDLAKHQRSHTGEKPYECNTCRKTFSQKSNLIVHQRTHIGEKPYE

SEQ ID NO: 913 - DNA, 2462 bp, Homo sapiens
atgtttttagaactagtgattcctgagctagggctggcccagagcatgaaagccaggggaccaagcctctttgaaaaaagtgaactgatggctgaacctctgcttccagtgaaggatggagaaaatgacttggcccagaagctagcagttctctgtggcagagagatccctgggcccatccggtctactgagagctctggtggatatttgcatgcagacaagggatcatcatgttccccaggtatccagagacctacccatccaacctcaactgttcctggcacgtcctggtccaaagtggcctgaccattgctgtccattttgaacagcctttccagattccaaatggtgattcttcttgcaaccagggggattacttggtgctaggaaatggccctgatatctattctccacccttcggaccctgtggaggaaatgttcatttttgtggcagtcgtgcttcatcgactgtgttcacctcggataatcaaatgtttgttcagtttatttctgattatagtaatgaagggcaaggatttaagatcaaatatgaggcaaagagttaagcctgtgggggcaacatctacatccataaagctgattctgctgggtatgtgacctcccccacccaccctgataattatcccctgcacgctgattgcatttggatcttagcggctccaccggaaacatgcatacggctgcaatttgaagatcaatttgatattgaaataacacccaactgtccttctaactacccctagttgtgggatggagtggattcagatgcaccaatactttccaaattttgtgggacatctttgcccagcagtcagtggtcgtcaggagaggttatgtatttgagatttcattctgacaacagccccactcatgtgggattcaaggccaagtattctatagctcagtgtgggggaagagtaacagggcaaagtggtgttgttgaaagcattggccatctaatgcttccatatagagacaacttattctgtgattggcatctccaggggctctccagacactatctcaccatctcttttgaagattttaaccttcagaattcctctggctgtgaaaaagactttgtggagacctgggactatcatacttctggaaacatcttgggaagatactgtgcaaacaccattcctgacagcatagagacttctagcaatactgccatggtcaggtttgtcatagatggctctctgactgcctcaggattcagactgcgatttgaatccagcatagacgagtgtggtggggatcttcagggctctgctggaacatctacttctcccaactacccgaacctaaatcctcatggccggatctacaagtggagaatcaccgccccagaaggaaggcagatcaccctaacatttagcaacctgaggctggccacgcatccgtcctgcaacagtgagcatgtgatagtattcaatagcattagaagtaacttaccccagctagagaaactgtgtagtagtgtgaatgtaagcagtgagattaaatcttcaggaaacacaatgaaagtcatttttttcacggatggatctaggccatatggaggcttcactgcttcttatacctccggtgaagatgcagataatgtaggatatttatgtggtgggtctcttccaaatactcctgaaggaaactttacttctcctggctatgacggagtcaggaattactcgagaaacctaaactgtgaatggactctcagcaatccaaatcagggaaattcatctatttatattcattttgaagatttttacctagaaagtcaccaagactatcaatttgatgtccttgagtttcgagtgggaagccatcattctgtagaaggcagtgacggaacagtaccagcagaaattgaaggaccagcagaagaccctccatcaccctcctgtatcctgctggagattttggagcatctcagcatctctggggcagctcgcggacatcagggaggggcaggcaacaaagcccacgtagacccttacagcaggaactcgctgagcttcaaggaatatgaaaccgcttcttttagctctcccagaactctccacattgatcccactctggctactagcaccagctggacagtaacgactttcagaggtgaacacaatgtgcttcaacatgccttcctgaaagttcagttagcaactggacagcatctgaattccagttctgcaaagctcttctctgaatacctgaggtaccagcatgatcctggcactgcccctgcctccgctgtcttgtctaattctagctctctggggccactcttgtgagtttctaggttccgagaaccttaatcttttccattgtttcccagccctagacaggtagctgctacctgatgttgtcatcctgtgttagctcagtgttcatttttaccattaaaacacctgctttaaataatcttcatcaaa

SEQ ID NO: 914 - DNA, 2478 bp, Homo sapiens
tggacccaactggcgaggctgctggggttgcagcgggacagttggggcggccccgcaggcccaggtgaacaaaaattgtttgctggcccccaggatactaactagacctttggcctgactcacaggacactaaggctccttttctgaagaagccttttaccagtctcatttaggggatgggaacaacatgtcttcacctagggactttagagcagagcctgtaaacgattatgagggaaatgactctgaagcagaagacttgaatttcagggagactttgccttcatcaagtcaggaaaacacacctagatcaaaggtttttgaaaataaagttaattcagagaaggtaaaactttctcttcggaatttcccacataatgattatgaggatgtttttgaagagccttcagaaagtggcagtgatcccagcatgtggacagccagaggccccttcagaagagacaggtggagcagtgaggatgaggaggctgcagggccatcacaggctctctcccctctactttctgatacgcgcaaaattgtttctgaaggagaactagatcagttggctcagattcggccattaatattcaattttcatgagcagacagccatcaaggattgtttgaaaatccttgaggaaaaaacagcagcgtatgatatcatgcaggaatttatggctttagaacttaagaatctgcctggtgagttcaactctgggaatcaaccaagcaacagagaaaaaaatagataccgagatattcttccatttcaacatcatggatatagtggcccaaatgagagaacaacgttctggcatggttcaaacgaaggagcagtatcacttttgttacgatattgtgcttgaagttcttcggaaacttctgactttggattaagaaagacttctgttgcctctcacttgaaattaccaagtgggtttgcacctcctcataaagaacatgtttgcactgtgctgaagggctttgctatgcatacaatctgctttcttggtttatcagtttattttctttctaaaagctccctgaagggcaatatcatttggcttggggtgatcagtgtttacttattgatcttgctagacaatatcaaaataacttcccacattttccagtgaaacagatgttacataaaacgattgcagcttggctatttggttgaagggattacagagcccaataaaggatttaaaatatattcattaagattttatttggaaaggtggctggagagagctgaggatttccaggactttgtaagttcttattctgggagaacataaggccaataatcatgacctcttccaggcatttttaagacagatgtctattcatgttctttagctagagcctgtactttttgctggcatttgaataacccagtttaaaaagagtccagttagggtggactaactttggacacaaattggcttccatttcctacattttcatactgctgccttcctacagctgctagaccaagacctgttggtctgggaagcatttcatggatagggagagctcctctcggtgaacagtccaaaactaaaatagatgtttatatagaaagcccaagaggagacttttgccatgcctgagttctttcctatcccaccctaacacttaacatattacttagtctgctttgttaaaagcaagtattacctttaacttgcctcttactctttgccctttagctaactaataaagtttgatataggcattattatataattctgagtcattcatggtatctctcatgtttgatgtatttttcaaactaagatctatgatagttttttttccagagttccattaaatcatttatttcctttactttctcacctctgttgaaacatttagaaactggatttgggaacccaattttggaaaaccagattcatagtcatgaaaatggaaacttccatattctgtttttgaaaagatgtggccattattacagtaattttattataggactttgcctcgtacaattaatagtgatattttggacaaggagttctggtgacaagctatacctaattataagctataaaacaatagatatgagtgtttgtacagtttaactcaatggagatcagaatattctatgtattgagaaaatgtttaatatcaatctataaatcttgaatttctaagaggcttattttgttcttttggctgaatgagtatatttgaattggttgaataattaataattctcattgtaaaaataattatatgccaaaaatatatttgatgttaaatcaaatagatgattctgtttacattgttcatatgaataataatctgtgttaatttcattttgataattggcctttaatatttgtatctctaattttattttctctctgttactgtaaaataatagctataatgtataacaattttcttcagaagaattctatgctattattaaaataaaatatttactgtg

SEQ ID NO: 915 - protein, 226 aa, Homo sapiens
MSSPRDFRAEPVNDYEGNDSEAEDLNFRETLPSSSQENTPRSKVFENKVNSEKVKLSLRNFPHNDYEDVFEEPSESGSDPSMWTARGPFRRDRWSSEDEEAAGPSQALSPLLSDTRKIVSEGELDQLAQIRPLIFNFHEQTAIKDCLKILEEKTAAYDIMQEFMALELKNLPGEFNSGNQPSNREKNRYRDILPFQHHGYSGPNERTTFWHGSNEGAVSLLLRYCA

SEQ ID NO: 916 - DNA, 7115 bp, Homo sapiens
aaaaaagcagatttgtaaatgggcaatggatttgaatagacatttagccatagaaggcatccagttggtgaaaaggcatatggaaaggtgctcagcatcactgattatcaggaaaatgaaaatgaaaaccgccacgagtggtttagaccatagcggcatgcatgaaagttttcagacctccagttgttgggagtggctgaggagattggggagcttctgtctgagttggaagagtggagtctcaacaagaaccagtgtattctggacatgtgtgcgccctgtagtgttcatggctggatgccttgtctacctgtgccttacagagtgacaccattgtggtgtggtcgatcagaggggcaggaggctttcagagggagtgggaagtggtggggcttggtttgtttgcccatggatgacagcaaaagtgagttggcttcccaagaacttttaccagtagcctgttttgctacaattctagacccagactggggtcccaaggcatcatagcccacagcttcttagcaagtgcatgttcagttggatcccccagctcagcctgggtcatccccacattctgcctcttgggccatacatagctcagctctgtactgagccatcatcccatggtgagcaagaccccattcttggtcttcagtctctttccctgcagcatgcaatcaaggtggtggctggaaggggccaaggagccacatgtcacagtgccctgctgcctgaacaaggaccagaggcctgtggaacacatggctctcagatttctcccatttgatgactcatcagctgcccccacatggctttctagctcacagcagatctagccttctctgagcagtgaagatgggatgttttatggtcattttccctggtgtgcagagctcaagtggagttcttcagcacaccctacaccatcccctcactaacacccccacctgtccagtcttacctgccttcatatcaaaagcactcagttaacccagagggcttcagccctgccctgcctgactttctaggaagcccctctctccacccaccctaatcagacactgtctgaaagttccccctcatcattttaaaaggaagagaaatttttctgacacagaggttctggtgaagtggccagctcccacatcacagggtgatggcggtttggactggaccaggatcagacagtgctgtcctggggctggccatctgataaggggctccagaaagggcagtgatggacccctgggaggctttctgctctcctgatcacaggtttttggtgagaggacctattggccactagggtgtctgcgggtgtgtgtatgtgtgtgtgtgtgtgtgtgtgtgtgtgtgtgtgtgatgtgtgtttacttggagtgacttctttcagcatgaagcccactgttttgctgaatgtatctcactgtttcctgaaactcagtacattcagctggcttaagggtcctggggcctcgctgtgtcatatttgcacaagcctagtgtctgtgcagactgtacactggagttcagttgtaagacccttttgaacccttattctgttcctgtaatagaaaagccatttcactcaatggaatagaaacccagatctaatggagagatgttctaatctgccatacactggggcagtggctagtgatttggactttgtggcacagatggaaatttccaggttctctaggtggtaggcagaggcctccctttttaagaaactccccactccacccctgccaatgaggacgttgcttagaggtatttctatcagtgttgagtagaagagatcatttcttggtgttgaatttcaggtaaggatgccagcttctgcatatcagggtgatgatgtttgggctgcgacaggtctagacagcagtctgaaagggggctcaaggaagtagctgtgaaaggcccctgggatgttttctgctcccctttctgcaaatcccctggagggagatcctgttagtcactacaggatgtgtgtgtgtgtgtgtgtgtgtgtgtgtgttcatcacttgttgcttgggggtgggaagagacaacaacaacctacagaatccagagttctcagttcatctcccatcctagtccaatcatggcctaacatccttagctaccgatcgcagaggagactgcgcatttgtgttcatgtggccttggatgttggcagattcagattggtgccccaggcatctgtgcctgtaactgcagtttcagcgggctcaggaccaggctaaagggcctccaagcttcctccagtttcctggtgcatgcatgtgcaatatgctcccctggcctgggtctttcctgctgcttcttgccagttgggtcagaactagcttattaaccagtttttcttctgagctttaatcgaactggctccaaccagttggaggcttgaaaagggctacgtgctagttatagatttttaaagatatattattattttagagtagttttgagtgtacagcaaaatggagtacagagtccagagatctcatatgccctcaattcctgtatactctcgggtcactccaccaacaacctcctacaccagagccactttgaaacattagaaaatatatttgagcattcagaaatgtataaactaggcagccccagactgcaagcagctcagaggtcccacagagaggcttagggagggtgggggaagaattttatatggtgaatgtggaagaaaaagaaaatacttgattgggtaaagtggagcagtggcctcatttggaacattacagtggaaggtctctagttagatgttagttggtggtttctgattggttaagcttaagtttccttttattatttacactgagtcaagttttggtttatttaaggaggaattgagtgcacggcagccacctcagcctcatggccacctgtttattggattattttaacagagaagatcctttaaaaaatatctgttaccctggctggagtgcagtgacgtgatcacggctcactgcagccacaaccttccagctcaggtgatcctcccacctcagtgctccccaccctgagtagctgggactacaggcatgtgccaccacaccaccatgctaggctaatggtttgtatttgtttaagagatgcagtttccctaagttgcttaggcttcttttgaactcttagactcaaataatctgcctgcattggtctccccaagtgctggaattacaggccatctaaatcttttatctcagatttgccttgtggcaaaaggtggggtactttttctgacatgatgaggcagagaaagatgaggtgggtgcatcctgtgcatatgattttctcaggtgatgggaatatggtgggctcttgcctaatgggatatattttctctttgaatgatttggcaagatatcagatgagagaagttgaataaatgttagaagaacatagaaaaaataggttatacacgttgggtttctgaagaaatgatgtcattggagaaacaaaacttttattgatttctggaaacatttagggccaatttttttgtgtaagtaatttgaatttatgatgatatctctgaccactttttgatattttttctggttcaggtgagtggtgtcattgagcaaacacaaagtcgggctcatccaaggatgagattttgccagagaaaggacgagcagcaagtcagggagcttaaggtaattatgagaaagtgactatctaaaattgcttaggtagaaggagacagattggatttttgtgtgtttggtatttgggataagagggatgtgggtgtgtacttgacatgggttgtttattctcgctctctctcttttttttttttttgagagggagtctcactctgtcacccaggctggagtgctgtggcacagtcttggctcactgcaacctctgcctcccgagttcaagggattctcctgcctcagcctcccgagtagctgggattacaggtgcctgccaccatgcccggctaatttttgtgattattttttttagtggagacgaggtttcactatgtaagtgaagctggtctcgaactcctgacctcagatgatccacccgcctcagcctcccaaagtgctgggattacaggtgtgagccaccgcgcctggcctgtttattctcttaagagagaaaatgaggggattaatggactgtagttctggacaaggtggaaaactcttaaagtggaagtattggggcgaatgctctgacaggctaggatggtgcagtcagtcccttcacccagaaatcagtagaatgttagcagttcagactcaaaccttgtgaaaaacaggtggtggaaaggaaatccctcacagcaactggcaccataatcaagacaatgtttgcagaataaatggagttacctgctttcagccccaggtcatagctattgtctgccctgctgatatgtgataataatttgtgatcatgttgtcttaaaatggggtcactcatctccagtagaattaagtccacagtgaagttgtccccccatccccaaagagataaacatatatgaatgaactcacgtgataacaactactgctgcctgggatcatgagagacctgaactgaactgataggaagtgaaaggtggctgagataatgagaatagacccatctgcagaggatcataaaaccagcaaagacaatatcttgtctaagatgccttcacaaactttgtccatgagaactcttaaggatttcaccagacctgttggctgctgctgtgatctctgcccaagaggagcctctgaccaacatccaaagggcttctggacccactggactcctctggagcgtcagcctcgagtttgaccagcagcaggggtcggtgtgtccctctgaatctgagatctatgaggcaggagctgaggacaggatggcaggagcgcccatggctgctgctgtacagcctgctgaggtgactgttgaagttggtgaggacctccacatgcaccaggttcgtgaccgggagatgcctgaagctttggagtttaacctttctgccaatccagaggcaagcacaatattccagaggaactctcaaacagatgctttggagtttaacccttctgccaatccagaggcaagcacaatattccagaggaactctcaaacagatgttgtagaaataagaagaagcaactgtacaaaccatgtatctactgtgcgtttcagtcaacaatacagcttgtgttcgacaatattccttgatgacagcacagccatccagcattatcttacaatgacaataatatctgtgaccttggagatacctcatcatatcacacaaagagatgcagatagatctttgagcatacctgatgaacagttacactcatttgcggtttccaccgtgcacattatgaagaaaagaaatggaggtgggagtttaaataactattcctcctccattccaccgactcccagcaccagccaggaggaccctcagttcagtgttcctcccactgccaacacacccacgcccgtttgcaagcggtccatgcgctggtccaacctgtttacatctgagaaagggagtgacccagacaaagagaggaaagccccggagaatcatgctgacaccatcgggagcggcagagccatccccattaaacagggcatgctcttaaagcgaagtgggaaatggctgaagacatggaaaaagaaatacgtcaccctgtgttccaatggcgtgctcacctattattcaagcttaggtgattatatgaagaatattcataaaaaagagattgaccttcagacatctaccatcaaagtcccaggaaagtggccatccctagccacatcggcctgcgcacccatctccagctctaaaagcaatggcctatccaaggacatggacatcgggctgggtgactccatatgcttcagccccagtatctccagcaccaccagccccaagctcaacccacccccctcccctcatgccaataaaaagaaacacctaaagaagaaaagcaccaacaactttatgattgtgtctgccactggccaaacgtggcactttgaagccacgacgtatgaggagcgggatgcatgggtccaagccatccagagccagagcgaggccatggccctgcagtcgatccaaaacatgcgtgggaacgcccactgtgtggactgtgagacccagaatcctaagtgggccagtttgaacttgggagtcctcatgtgtattgaatgctcaggtatccaccgcagtcttggcacccgcctttcccgtgtgcgatctctggagctggatgactggccagttgagctcaggaaggttatgtcatctattggcaatgacctagccaacagcatctgggaagggagcagccaggggcagacaaaaccctcagaaaagtccacgagggaagagaaagaacggtggatccgttccaaatatgaggagaagctctttctggccccactaccctgcactgagctgtccctgggccagcagctgctgcgggccaccgctgatgaggacctgcagacagccatcctgctgctggcacatggctcccgtgaggaggtgaacgagacctgtggggagggagacggctgcacggcgctccatctggcctgccgcaaggggaatgtggtcctggcgcagctcctgatctggtacggggtggacgtcatggcccgagatgcccacgggaacacagcgctgacctacgcccggcaggcctccagccaggagtgcatcaacgtgcttctgcagtacggctgccccgacgagtgcgtgtagtatctgttttatttgactgcagtctccttggtgcaaaaacaaaatgggaaaaataaggataactcagaatttcaaaaggaaatcacaaattcagctagtaatagcattttcagtacttttcgtaaactaagtaaatacacaaaatgttgatttttctgaccataagacatattttatgtccttttgccgaggtggatgtgttagtctcaggccctcctggccacattgcccaagtcacacaggcttctgtattatgtatttagataaaatgtgtgaaaatatatttgaaaaaaagttcataaatatgcattgatttttgtacaca

SEQ ID NO: 917 - protein, 622 aa, Homo sapiens
MAAAVQPAEVTVEVGEDLHMHQVRDREMPEALEFNLSANPEASTIFQRNSQTDALEFNPSANPEASTIFQRNSQTDVVEIRRSNCTNHVSTVRFSQQYSLCSTIFLDDSTAIQHYLTMTIISVTLEIPHHITQRDADRSLSIPDEQLHSFAVSTVHIMKKRNGGGSLNNYSSSIPPTPSTSQEDPQFSVPPTANTPTPVCKRSMRWSNLFTSEKGSDPDKERKAPENHADTIGSGRAIPIKQGMLLKRSGKWLKTWKKKYVTLCSNGVLTYYSSLGDYMKNIHKKEIDLQTSTIKVPGKWPSLATSACAPISSSKSNGLSKDMDIGLGDSICFSPSISSTTSPKLNPPPSPHANKKKHLKKKSTNNFMIVSATGQTWHFEATTYEERDAWVQAIQSQSEAMALQSIQNMRGNAHCVDCETQNPKWASLNLGVLMCIECSGIHRSLGTRLSRVRSLELDDWPVELRKVMSSIGNDLANSIWEGSSQGQTKPSEKSTREEKERWIRSKYEEKLFLAPLPCTELSLGQQLLRATADEDLQTAILLLAHGSREEVNETCGEGDGCTALHLACRKGNVVLAQLLIWYGVDVMARDAHGNTALTYARQASSQECINVLLQYGCPDECV

SEQ ID NO: 918 - DNA, 3293 bp, Homo sapiens
agtggagacgaggtttcactatgtaagtgaagctggtctcgaactcctgacctcagatgatccacccgcctcagcctcccaaagtgctgggattacaggtgtgagccaccgcgcctggcctgtttattctcttaagagagaaaatgaggggattaatggactgtagttctggacaaggtggaaaactcttaaagtggaagtattggggcgaatgctctgacaggctaggatggtgcagtcagtcccttcacccagaaatcagtagaatgttagcagttcagactcaaaccttgtgaaaaacaggtggtggaaaggaaatccctcacagcaactggcaccataatcaagacaatgtttgcagaataaatggagttacctgctttcagccccaggtcatagctattgtctgccctgctgatatgtgataataatttgtgatcatgttgtcttaaaatggggtcactcatctccagtagaattaagtccacagtgaagttgtccccccatccccaaagagataaacatatatgaatgaactcacgtgataacaactactgctgcctgggatcatgagagacctgaactgaactgataggaagtgaaaggtggctgagataatgagaatagacccatctgcagaggatcataaaaccagcaaagacaatatcttgtctaagatgccttcacaaactttgtccatgagaactcttaaggatttcaccagacctgttggctgctgctgtgatctctgcccaagaggagcctctgaccaacatccaaagggcttctggacccactggactcctctggagttgctccttcacatgttcccactctctgtgcggccaccatgtaagtcggacctgcccttctgccatgattgactaaaatctcaggaagctggtgatgaatgaaaaccttagtcccactggcactgcacgaggggccaggagagcagcagcatcataagccacaggcgtcagcctcgagtttgaccagcagcaggggtcggtgtgtccctctgaatctgagatctatgaggcaggagctgaggacaggatggcaggagcgcccatggctgctgctgtacagcctgctgaggtgactgttgaagttggtgaggacctccacatgcaccaggttcgtgaccgggagatgcctgaagctttggagtttaacctttctgccaatccagaggcaagcacaatattccagaggaactctcaaacagatgctttggagtttaacccttctgccaatccagaggcaagcacaatattccagaggaactctcaaacagatggtatctactgtgcgtttcagtcaacaatacagcttgtgttcgacaatattccttgatgacagcacagccatccagcattatcttacaatgacaataatatctgtgaccttggagatacctcatcatatcacacaaagagatgcagatagatctttgagcatacctgatgaacagttacactcatttgcggtttccaccgtgcacattatgaagaaaagaaatggaggtgggagtttaaataactattcctcctccattccaccgactcccagcaccagccaggaggaccctcagttcagtgttcctcccactgccaacacacccacgcccgtttgcaagcggtccatgcgctggtccaacctgtttacatctgagaaagggagtgacccagacaaagagaggaaagccccggagaatcatgctgacaccatcgggagcggcagagccatccccattaaacagggcatgctcttaaagcgaagtgggaaatggctgaagacatggaaaaagaaatacgtcaccctgtgttccaatggcgtgctcacctattattcaagcttaggtgattatatgaagaatattcataaaaaagagattgaccttcagacatctaccatcaaagtcccaggaaagtggccatccctagccacatcggcctgcgcacccatctccagctctaaaagcaatggcctatccaaggacatggacatcgggctgggtgactccatatgcttcagccccagtatctccagcaccaccagccccaagctcaacccacccccctcccctcatgccaataaaaagaaacacctaaagaagaaaagcaccaacaactttatgattgtgtctgccactggccaaacgtggcactttgaagccacgacgtatgaggagcgggatgcatgggtccaagccatccagagccagatcctggccagcctgcagtcatgcgagagcagtaaaagcaagtcccagctgaccagccagagcgaggccatggccctgcagtcgatccaaaacatgcgtgggaacgcccactgtgtggactgtgagacccagaatcctaagtgggccagtttgaacttgggagtcctcatgtgtattgaatgctcaggtatccaccgcagtcttggcacccgcctttcccgtgtgcgatctctggagctggatgactggccagttgagctcaggaaggttatgtcatctattggcaatgacctagccaacagcatctgggaagggagcagccaggggcagacaaaaccctcagaaaagtccacgagggaagagaaagaacggtggatccgttccaaatatgaggagaagctctttctggccccactaccctgcactgagctgtccctgggccagcagctgctgcgggccaccgctgatgaggacctgcagacagccatcctgctgctggcacatggctcccgtgaggaggtgaacgagacctgtggggagggagacggctgcacggcgctccatctggcctgccgcaaggggaatgtggtcctggcgcagctcctgatctggtacggggtggacgtcatggcccgagatgcccacgggaacacagcgctgacctacgcccggcaggcctccagccaggagtgcatcaacgtgcttctgcagtacggctgccccgacgagtgcgtgtagtatctgttttatttgactgcagtctccttggtgcaaaaacaaaatgggaaaaataaggataactcagaatttcaaaaggaaatcacaaattcagctagtaatagcattttcagtacttttcgtaaactaagtaaatacacaaaatgttgatttttctgaccataagacatattttatgtccttttgccgaggtggatgtgttagtctcaggccctcctggccacattgcccaagtcacacaggcttctgtattatgtatttagataaaatgtgtgaaaatatatttgaaaaaaagttcataaatatgcattgatttttgtacaca

SEQ ID NO: 919 - protein, 578 aa, Homo sapiens
MLWSLTLLPIQRQAQYSRGTLKQMVSTVRFSQQYSLCSTIFLDDSTAIQHYLTMTIISVTLEIPHHITQRDADRSLSIPDEQLHSFAVSTVHIMKKRNGGGSLNNYSSSIPPTPSTSQEDPQFSVPPTANTPTPVCKRSMRWSNLFTSEKGSDPDKERKAPENHADTIGSGRAIPIKQGMLLKRSGKWLKTWKKKYVTLCSNGVLTYYSSLGDYMKNIHKKEIDLQTSTIKVPGKWPSLATSACAPISSSKSNGLSKDMDIGLGDSICFSPSISSTTSPKLNPPPSPHANKKKHLKKKSTNNFMIVSATGQTWHFEATTYEERDAWVQAIQSQILASLQSCESSKSKSQLTSQSEAMALQSIQNMRGNAHCVDCETQNPKWASLNLGVLMCIECSGIHRSLGTRLSRVRSLELDDWPVELRKVMSSIGNDLANSIWEGSSQGQTKPSEKSTREEKERWIRSKYEEKLFLAPLPCTELSLGQQLLRATADEDLQTAILLLAHGSREEVNETCGEGDGCTALHLACRKGNVVLAQLLIWYGVDVMARDAHGNTALTYARQASSQECINVLLQYGCPDECV

SEQ ID NO: 920 - DNA, 4456 bp, Homo sapiens
aaaataataataataataataataataataatctacaatgtcatttcccatccaagcttgacttctacctttactttctgatatggttttgccatgtccccacccaaatctcatcatgaattataatccccataatcctgatgtgtcgagggaggggcctagggggaggtgattggatcatgggggcagttatcctcatgctgttcttgtgatattcagtaagtcctcatgagatcttatagggttttgttttgttttttgggatggagtcttgctctgttgtccaggcaggagtgccatggcatgatcttggctcactgcagtctctgcctcttgagttccattgattctcctgcctcagcctcctgagtagctgggattacaggcatgcaccaccacacccagctaatttttgtatttttagtagagacaggatttcactacattagctaggctggtctcaaactcctgacctcagttgatccacctgccttggcctcccaaagtactagggttacaagtgtgagccaccgtgcccagctgagatctgatggttttatacatgtttgacagttgctccttcacatgttcccactctctgtgcggccaccatgtaagtcggacctgcccttctgccatgattgtaagtttcctgaaggacttccccctctgccatgattgttaagtttcctgaggcctccccagccatgtgaaactgagtcaattaaacctctttcctttaaaaattacccaacctcaggtgtttctttatatcagtgtgaaaacagactgctatactttctgatactcatgcttaagcaattggggaattcagactacctgggatcaaactatggccccacccttagcagtcatgtgaccttggggaggttacttaccttctccatctcaacaacttctgtaaaatctgtaacatgagattgtttctgagggttaaatgagcatagcacagtggggacactgtcaggcacacactacttgccagatgtcgagtattcatctttattgaaataggactgtggtaagccactttatggctctcgattttgtatgagaaaatcatgcttagtgccttgttagtaaaagaaagaaaacctgaaagtccctgccatggaaggaagaaatagcggggagaaaagggagttggtaagtttcagcatttcagagcttggaggtgccagttaggtttctattttatggagaaggaggtggaggcaggatgggtcctaaggtgtcattcaaaacacacagccataactctttattgagagtagagctagggccccagggattgctgtggtcaagttgcggacaaaaatgaccactcgttggaagacaggagaggagtgtttagttacaaaagcagtcaacaattcaggtgtatctatattcagacagcaaataaaagttgttcaacttggttgctaatgggacccactctactgaggctttgtatagaactcatagaggaagctggcttcaaggaatgaactaccctgtgcttttcttaggactaaaatctcaggaagctggtgatgaatgaaaaccttagtcccactggcactgcacgaggggccaggagagcagcagcatcataagccacagggtggggcagccaaggcaggggcattctgagctgttggggaggggtggcaggcagggtggggcactgtgaggtgtcggggagggcattgtgaagtggggggtggggcattgtgtgccacatgcctgggctcccacctggggccagtgggcttcagtctgtaggtgactacagaaggagaaggagctccgtctgttctctcttcaggcagttgttgtgtctctcagcgcttgttgggttcacaacctattaaataagccggctggtcttcaccctcccagacaagtcaactcaggggaggcagcagggtgcgggccttggcccgcaaccctagccggggccggggccggggccggggccagggctggtgcccggggccgcgctgtgaggtgggcaggcgaggagcgggaagaccatctctgcaagtgcagcatagcctcggcctaggacagcgggagtgcgtggccaaagctgtgagcagaggcacaggtggtggcagacagtagaggcgccccatggggaacatactgacctgtcgtgtgcaccctagcgtcagcctcgagtttgaccagcagcaggggtcggtgtgtccctctgaatctgagatctatgaggcaggagctgaggacaggatggcaggagcgcccatggctgctgctgtacagcctgctgaggtgactgttgaagttggtgaggacctccacatgcaccaggttcgtgaccgggagatgcctgaagctttggagtttaacccttctgccaatccagaggcaagcacaatattccagaggaactctcaaacagatgttgtagaaataagaagaagcaactgtacaaaccatgtatctactgtgcgtttcagtcaacaatacagcttgtgttcgacaatattccttgatgacagcacagccatccagcattatcttacaatgacaataatatctgtgaccttggagatacctcatcatatcacacaaagagatgcagatagatctttgagcatacctgatgaacagttacactcatttgcggtttccaccgtgcacattatgaagaaaagaaatggaggtgggagtttaaataactattcctcctccattccaccgactcccagcaccagccaggaggaccctcagttcagtgttcctcccactgccaacacacccacgcccgtttgcaagcggtccatgcgctggtccaacctgtttacatctgagaaagggagtgacccagacaaagagaggaaagccccggagaatcatgctgacaccatcgggagcggcagagccatccccattaaacagggcatgctcttaaagcgaagtgggaaatggctgaagacatggaaaaagaaatacgtcaccctgtgttccaatggcgtgctcacctattattcaagcttaggtgattatatgaagaatattcataaaaaagagattgaccttcagacatctaccatcaaagtcccaggaaagtggccatccctagccacatcggcctgcgcacccatctccagctctaaaagcaatggcctatccaaggacatggacatcgggctgggtgactccatatgcttcagccccagtatctccagcaccaccagccccaagctcaacccacccccctcccctcatgccaataaaaagaaacacctaaagaagaaaagcaccaacaactttatgattgtgtctgccactggccaaacgtggcactttgaagccacgacgtatgaggagcgggatgcatgggtccaagccatccagagccagatcctggccagcctgcagtcatgcgagagcagtaaaagcaagtcccagctgaccagccagagcgaggccatggccctgcagtcgatccaaaacatgcgtgggaacgcccactgtgtggactgtgagacccagaatcctaagtgggccagtttgaacttgggagtcctcatgtgtattgaatgctcaggtatccaccgcagtcttggcacccgcctttcccgtgtgcgatctctggagctggatgactggccagttgagctcaggaaggttatgtcatctattggcaatgacctagccaacagcatctgggaagggagcagccaggggcagacaaaaccctcagaaaagtccacgagggaagagaaagaacggtggatccgttccaaatatgaggagaagctctttctggccccactaccctgcactgagctgtccctgggccagcagctgctgcgggccaccgctgatgaggacctgcagacagccatcctgctgctggcacatggctcccgtgaggaggtgaacgagacctgtggggagggagacggctgcacggcgctccatctggcctgccgcaaggggaatgtggtcctggcgcagctcctgatctggtacggggtggacgtcatggcccgagatgcccacgggaacacagcgctgacctacgcccggcaggcctccagccaggagtgcatcaacgtgcttctgcagtacggctgccccgacgagtgcgtgtagtatctgttttatttgactgcagtctccttggtgcaaaaacaaaatgggaaaaataaggataactcagaatttcaaaaggaaatcacaaattcagctagtaatagcattttcagtacttttcgtaaactaagtaaatacacaaaatgttgatttttctgaccataagacatattttatgtccttttgccgaggtggatgtgttagtctcaggccctcctggccacattgcccaagtcacacaggcttctgtattatgtatttagataaaatgtgtgaaaatatatttgaaaaaaagttcataaatatgcattgatttttgtacaca

SEQ ID NO: 921 - protein, 663 aa, Homo sapiens
MGNILTCRVHPSVSLEFDQQQGSVCPSESEIYEAGAEDRMAGAPMAAAVQPAEVTVEVGEDLHMHQVRDREMPEALEFNPSANPEASTIFQRNSQTDVVEIRRSNCTNHVSTVRFSQQYSLCSTIFLDDSTAIQHYLTMTIISVTLEIPHHITQRDADRSLSIPDEQLHSFAVSTVHIMKKRNGGGSLNNYSSSIPPTPSTSQEDPQFSVPPTANTPTPVCKRSMRWSNLFTSEKGSDPDKERKAPENHADTIGSGRAIPIKQGMLLKRSGKWLKTWKKKYVTLCSNGVLTYYSSLGDYMKNIHKKEIDLQTSTIKVPGKWPSLATSACAPISSSKSNGLSKDMDIGLGDSICFSPSISSTTSPKLNPPPSPHANKKKHLKKKSTNNFMIVSATGQTWHFEATTYEERDAWVQAIQSQILASLQSCESSKSKSQLTSQSEAMALQSIQNMRGNAHCVDCETQNPKWASLNLGVLMCIECSGIHRSLGTRLSRVRSLELDDWPVELRKVMSSIGNDLANSIWEGSSQGQTKPSEKSTREEKERWIRSKYEEKLFLAPLPCTELSLGQQLLRATADEDLQTAILLLAHGSREEVNETCGEGDGCTALHLACRKGNVVLAQLLIWYGVDVMARDAHGNTALTYARQASSQECINVLLQYGCPDECV

SEQ ID NO: 922 - DNA, 4525 bp, Homo sapiens
aaaataataataataataataataataataatctacaatgtcatttcccatccaagcttgacttctacctttactttctgatatggttttgccatgtccccacccaaatctcatcatgaattataatccccataatcctgatgtgtcgagggaggggcctagggggaggtgattggatcatgggggcagttatcctcatgctgttcttgtgatattcagtaagtcctcatgagatcttatagggttttgttttgttttttgggatggagtcttgctctgttgtccaggcaggagtgccatggcatgatcttggctcactgcagtctctgcctcttgagttccattgattctcctgcctcagcctcctgagtagctgggattacaggcatgcaccaccacacccagctaatttttgtatttttagtagagacaggatttcactacattagctaggctggtctcaaactcctgacctcagttgatccacctgccttggcctcccaaagtactagggttacaagtgtgagccaccgtgcccagctgagatctgatggttttatacatgtttgacagttgctccttcacatgttcccactctctgtgcggccaccatgtaagtcggacctgcccttctgccatgattgtaagtttcctgaaggacttccccctctgccatgattgttaagtttcctgaggcctccccagccatgtgaaactgagtcaattaaacctctttcctttaaaaattacccaacctcaggtgtttctttatatcagtgtgaaaacagactgctatactttctgatactcatgcttaagcaattggggaattcagactacctgggatcaaactatggccccacccttagcagtcatgtgaccttggggaggttacttaccttctccatctcaacaacttctgtaaaatctgtaacatgagattgtttctgagggttaaatgagcatagcacagtggggacactgtcaggcacacactacttgccagatgtcgagtattcatctttattgaaataggactgtggtaagccactttatggctctcgattttgtatgagaaaatcatgcttagtgccttgttagtaaaagaaagaaaacctgaaagtccctgccatggaaggaagaaatagcggggagaaaagggagttggtaagtttcagcatttcagagcttggaggtgccagttaggtttctattttatggagaaggaggtggaggcaggatgggtcctaaggtgtcattcaaaacacacagccataactctttattgagagtagagctagggccccagggattgctgtggtcaagttgcggacaaaaatgaccactcgttggaagacaggagaggagtgtttagttacaaaagcagtcaacaattcaggtgtatctatattcagacagcaaataaaagttgttcaacttggttgctaatgggacccactctactgaggctttgtatagaactcatagaggaagctggcttcaaggaatgaactaccctgtgcttttcttaggactaaaatctcaggaagctggtgatgaatgaaaaccttagtcccactggcactgcacgaggggccaggagagcagcagcatcataagccacagggtggggcagccaaggcaggggcattctgagctgttggggaggggtggcaggcagggtggggcactgtgaggtgtcggggagggcattgtgaagtggggggtggggcattgtgtgccacatgcctgggctcccacctggggccagtgggcttcagtctgtaggtgactacagaaggagaaggagctccgtctgttctctcttcaggcagttgttgtgtctctcagcgcttgttgggttcacaacctattaaataagccggctggtcttcaccctcccagacaagtcaactcaggggaggcagcagggtgcgggccttggcccgcaaccctagccggggccggggccggggccggggccagggctggtgcccggggccgcgctgtgaggtgggcaggcgaggagcgggaagaccatctctgcaagtgcagcatagcctcggcctaggacagcgggagtgcgtggccaaagctgtgagcagaggcacaggtggtggcagacagtagaggcgccccatggggaacatactgacctgtcgtgtgcaccctagcgtcagcctcgagtttgaccagcagcaggggtcggtgtgtccctctgaatctgagatctatgaggcaggagctgaggacaggatggcaggagcgcccatggctgctgctgtacagcctgctgaggtgactgttgaagttggtgaggacctccacatgcaccaggttcgtgaccgggagatgcctgaagctttggagtttaacctttctgccaatccagaggcaagcacaatattccagaggaactctcaaacagatgctttggagtttaacccttctgccaatccagaggcaagcacaatattccagaggaactctcaaacagatgttgtagaaataagaagaagcaactgtacaaaccatgtatctactgtgcgtttcagtcaacaatacagcttgtgttcgacaatattccttgatgacagcacagccatccagcattatcttacaatgacaataatcagtgtgaccttggagatacctcatcatatcacacaaagagatgcagatagatctttgagcatacctgatgaacagttacactcatttgcggtttccaccgtgcacattatgaagaaaagaaatggaggtgggagtttaaataactattcctcctccattccaccgactcccagcaccagccaggaggaccctcagttcagtgttcctcccactgccaacacacccacgcccgtttgcaagcggtccatgcgctggtccaacctgtttacatctgagaaagggagtgacccagacaaagagaggaaagccccggagaatcatgctgacaccatcgggagcggcagagccatccccattaaacagggcatgctcttaaagcgaagtgggaaatggctgaagacatggaaaaagaaatacgtcaccctgtgttccaatggcgtgctcacctattattcaagcttaggtgattatatgaagaatattcataaaaaagagattgaccttcagacatctaccatcaaagtcccaggaaagtggccatccctagccacatcggcctgcgcacccatctccagctctaaaagcaatggcctatccaaggacatggacatcgggctgggtgactccatatgcttcagccccagtatctccagcaccaccagccccaagctcaacccacccccctcccctcatgccaataaaaagaaacacctaaagaagaaaagcaccaacaactttatgattgtgtctgccactggccaaacgtggcactttgaagccacgacgtatgaggagcgggatgcatgggtccaagccatccagagccagatcctggccagcctgcagtcatgcgagagcagtaaaagcaagtcccagctgaccagccagagcgaggccatggccctgcagtcgatccaaaacatgcgtgggaacgcccactgtgtggactgtgagacccagaatcctaagtgggccagtttgaacttgggagtcctcatgtgtattgaatgctcaggtatccaccgcagtcttggcacccgcctttcccgtgtgcgatctctggagctggatgactggccagttgagctcaggaaggttatgtcatctattggcaatgacctagccaacagcatctgggaagggagcagccaggggcagacaaaaccctcagaaaagtccacgagggaagagaaagaacggtggatccgttccaaatatgaggagaagctctttctggccccactaccctgcactgagctgtccctgggccagcagctgctgcgggccaccgctgatgaggacctgcagacagccatcctgctgctggcacatggctcccgtgaggaggtgaacgagacctgtggggagggagacggctgcacggcgctccatctggcctgccgcaaggggaatgtggtcctggcgcagctcctgatctggtacggggtggacgtcatggcccgagatgcccacgggaacacagcgctgacctacgcccggcaggcctccagccaggagtgcatcaacgtgcttctgcagtacggctgccccgacgagtgcgtgtagtatctgttttatttgactgcagtctccttggtgcaaaaacaaaatgggaaaaataaggataactcagaatttcaaaaggaaatcacaaattcagctagtaatagcattttcagtacttttcgtaaactaagtaaatacacaaaatgttgatttttctgaccataagacatattttatgtccttttgccgaggtggatgtgttagtctcaggccctcctggccacattgcccaagtcacacaggcttctgtattatgtatttagataaaatgtgtgaaaatatatttgaaaaaaagttcataaatatgcattgatttttgtacaca

SEQ ID NO: 923 - protein, 686 aa, Homo sapiens
MGNILTCRVHPSVSLEFDQQQGSVCPSESEIYEAGAEDRMAGAPMAAAVQPAEVTVEVGEDLHMHQVRDREMPEALEFNLSANPEASTIFQRNSQTDALEFNPSANPEASTIFQRNSQTDVVEIRRSNCTNHVSTVRFSQQYSLCSTIFLDDSTAIQHYLTMTIISVTLEIPHHITQRDADRSLSIPDEQLHSFAVSTVHIMKKRNGGGSLNNYSSSIPPTPSTSQEDPQFSVPPTANTPTPVCKRSMRWSNLFTSEKGSDPDKERKAPENHADTIGSGRAIPIKQGMLLKRSGKWLKTWKKKYVTLCSNGVLTYYSSLGDYMKNIHKKEIDLQTSTIKVPGKWPSLATSACAPISSSKSNGLSKDMDIGLGDSICFSPSISSTTSPKLNPPPSPHANKKKHLKKKSTNNFMIVSATGQTWHFEATTYEERDAWVQAIQSQILASLQSCESSKSKSQLTSQSEAMALQSIQNMRGNAHCVDCETQNPKWASLNLGVLMCIECSGIHRSLGTRLSRVRSLELDDWPVELRKVMSSIGNDLANSIWEGSSQGQTKPSEKSTREEKERWIRSKYEEKLFLAPLPCTELSLGQQLLRATADEDLQTAILLLAHGSREEVNETCGEGDGCTALHLACRKGNVVLAQLLIWYGVDVMARDAHGNTALTYARQASSQECINVLLQYGCPDECV

SEQ ID NO: 924 - DNA, 2052 bp, Homo sapiens
tttttttacgggagggagctaattggattttaagtctagatctttgttttcaattcctcaacatattctataaataagaccaaattatagtagaaggagagtaaataagctattatctttttaaagtggtgaagagcactgattaaatatatattagagccccagcccccgccccagctgcgcgggcccccgcctggcccatggactgcacagccgagcgggcgccttgagcgcggtgcgggtcctcggagcacccccgaggtgagcgcaagcaaggtccggcatcatgtgctaggttattcccagtgcgaggccacacttgggccgtcggagcagcccctcctcacttcaggggtcaccctccccaagacccattgccccatcatggccggggaccggctccccaggaaggtgatggacgccaagaagctggccagcctgctgcggggcgggcctgggggggcctggtcatcgacagtcactccttcctggagtacaacagctggcatgtgctcagctccgtcaacatctgctgctccaagctggtgaagtggcggttgcagaagggcaaggtgaccattgtggagttcatccagccggctgcacgcagccaggtggaggccactgagccacaggacgtggtggtctatgaccagagcacgcggccgcagacagcttcctctccatcctgctgagcaagctggatggctgcttccacagcgtggccggctgcttccacagcatggccatcatcacggggggcttcgccaccttctcctcctgcttccccgacctctgcgagggcgagcctgctgccctgctacccatgagcctctcccagtcctgcctgctcgtgcccagcgtgggcctgaccctcatcctgcctcacctctacctgggctcgcaggaagacgtcctgaacaaggatctgatgacgcagaatggaataagctacgtcctctatgccagcaactcctgccccaagcctgacttcatctaccagagccacttcttgcaggtccccatcaacgacaactactgtgaaaagctgctgccctggctggacaagtccatcgagttcatcgataaagccaagctgtccagctgccaagtcatcgtccaccatctggccggcatctcctgctgtgccactatcgccatcgcctacatcatgaagaccatgggcatgtcctccgaagacgcctacaggtttgtgaaggaccagcgcccgtccatctcgcccaacttcaacttcctgggccagctgctggagtaccagagcagcccgaagctgctggccgccgtgcagggcgacgcgggcaccccctcaggaatgcaggagcctccccccagccctgcggccggggccccactgccatggctgccaccacctacctcagagaccgctgccaccaggagtgcggctgccagggagggcggcccgagcgcgggcaggaagcccccggcgccccccacggccaccagcacgctgcagcagggcctgcgcagcctgcgcctctcctcggaccacctgcaggacaccagccgcctcaagccctccttctctctggacatcaagtcggcctacgcccccagcaggcggcccggcggcccgggcccagcgaccccggcgaggccccgaagctctctgaaagctggacagccagctacgcggctgccgggccctggccagccggccagccccggagcctggacgccaccgctcgactccctggagcgtcctcggtgcttcagccccgagggcgtgcaagggccgggcagggtgctgtttgcgcccttcggccgggcgggcgccccggaacccaacggctgcagcgacctgccacggcgggaggcagcaacggctgagcccgggacgcgcggaccagctggtcagacgagctggccccggattcgcacttcaagtgctgcagctgccagatggagttcgaggagggcatggtggaggggcgcgcgcgcagcgaggagctggccgccctgggcaagcaggggagcttctcgggcagcgtggaggtcatcgagatgtcctga

SEQ ID NO: 925 - DNA, 702 bp, Homo sapiens
agaggtcaattagctgctttcgggcggccttaggcgacaggagactcctggacccagcacctgcccactgtgcctgtccacctgtggctacagcagctgagaccccagtgggctaagattggacaggggccaccagggacccagcaagtccttcagctctatttttgaaacatgaatccttcactcctcctggctgcctttttcctgggaattgcctcagctgctctaacacgtgaccacagtttagacgcacaatggaccaagtggaaggcaaagcacaagagattatatggcatgaatgaagaaggatggaggagagcagtgtgagagaacatgaagatgactgagcagcacaatcaggaatacagccaagggaaacacagcttcacaatggccatgaacgcctttggagacatgaccactgaagaattcaggcaggtgatgaatggttttcaataccagaagcacaggaaggggaaacagttccaggaacgcctgcttcttgagatccccacatctgtggactggagagagaaaggctacgtgactcctgtgaaggatcagttcacgaaagctcggcagcctctgcaaatgtcagcagtgtttcctggggcgggggaacagggaggggccccaggcctggcctgcaacttgcgactgaaggtggcctcttattgcttagaaacgcgtgtttcggtttaa

SEQ ID NO: 926 - protein, 122 aa, Homo sapiens
MKMTEQHNQEYSQGKHSFTMAMNAFGDMTTEEFRQVMNGFQYQKHRKGKQFQERLLLEIPTSVDWREKGYVTPVKDQFTKARQPLQMSAVFPGAGEQGGAPGLACNLRLKVASYCLETRVSV

SEQ ID NO: 927 - DNA, 1651 bp, Homo sapiens
atgagtggaggatctcaagtccacattttttggggtgctccagttgcttcactgaaaatgacagtatcagaagacacagcttctttaatgtctgttgctgacccctggaaaaaaattcagcttttatacagtcaacattctttatatctgaaggatgaaaaacagcacaaaaatcttgaaaactatgaagtcccagattctattggttctccagatctttgtggtcatttcttagcaaactgtatgaatagacatgttcatgtgaaagatgactttgtacattctgtttctgaaacacagaatatagaatcccagaagattcactcctctagactgagtgacataactagctctaatatgcaaatatgtggatttaaaagcacagttccgcatttaaccgaagaagaaaagtatcaaagcttctcagtgaaaataaaattagagatgaacagcctaaacatcagccagatatatgtggtcagaactttaacacaaatttgtttcagttgggccataaatgtgcagctgtgttggatttggtttgtagtactgaaaaaattaatatagggcctgaagtggtacaaagagagtgtgtgccaacagaatatcatgaaatacaaaaccagtgtttgggattattttcctcgaactcagtagataagtcaaggtctgaagcagcagttaagaaggtctcagaccttaaaatatcaactgataaagaatttctcagtataattacctccagccaggttgctttttttagctcaaaagaaagataaaaggcggagtcctgtaaataaagggaatgtaaacatggagactgaaccaaaggcaagttacggggagataagaatacctgaagagaattcgattcagcttgatggttttacagaagcatatgaaagtggacaaaaccaagcatattcccttgaactttttagtcctgtttgtcctaaaacagaaaatagccgcattcacataaactctgataaaggtcttgaagaacatacaggatctcaagaacttttcagttctgaagatgaactgccaccaaatgagatacatattgagttgtgtagctcaggaatactgtgttcccaactaaataccttccacaaaagtgctattaaaagaagctgtacctctgaagataaagtgggccagtctgaagctctatctggagtccttcaagtagctaagaaaatgaagttgatttctaatggaggagattctgctgtagaaatggatcggagaaatgtgtctgaatttaagagtattaaaaaaacatcattaataaaaaactgtgattctaaaagccagaagtataattgtttagtcatggtgctatctccatgccatgtgaaggaaataaacaaaattcggaccaaattctggctctaaagtgcctttagcaacagttacagtaagtgatcaatcagaaactaagaagaaggtttttctgtggaggactgcagcattttgggcatttacagtgtttcttggagatataattttactcacggatgttgttattcatgaggaccaatggattggtgagacagtactacaatcaacatttagcagtcagttattaaatcttgggagttattcatctattcagcctgaagaatgtaaggcacattttaaatga

SEQ ID NO: 928 - DNA, 362 bp, Homo sapiens
tcagcatcctagttcgccactgtctgctgccacacgatgctgggaggcctggggaagctggctgccgagggcctggcccaccgcaccgagaaggccaccgagggagccattcatgccgtggaggaagtggtgaaggaggtggtgggacatgccaaggagactggagagaaagccattgctgaagccataaagaaagcccaggagtcaggggacaaaaagatgaaggaaatcaccgagacagtgaccaacacagtcacaaatgccatcacccatgcagcagaaagtctggacaaacttggacagtgagtgcacctgctaccacggcccttccccagtctcaataaaaagccatgacatgtgta

SEQ ID NO: 929 - protein, 89 aa, Homo sapiens
MLGGLGKLAAEGLAHRTEKATEGAIHAVEEVVKEVVGHAKETGEKAIAEAIKKAQESGDKKMKEITETVTNTVTNAITHAAESLDKLGQ

SEQ ID NO: 930 - DNA, 362 bp, Homo sapiens; identical to SEQ ID NO: 928

SEQ ID NO: 931 - protein, 89 aa, Homo sapiens; identical to SEQ ID NO: 929

SEQ ID NO: 932 - DNA, 362 bp, Homo sapiens; identical to SEQ ID NO: 928

SEQ ID NO: 933 - protein, 89 aa, Homo sapiens; identical to SEQ ID NO: 929

SEQ ID NO: 934 - DNA, 1884 bp, Homo sapiens
tgttaagcttatgaacacctaatcttattgctcagtggagaatacaatctaaacgaacaggtgaatacagaagacagtgccagtcggagggtggcattaacaccagtgtgccatatggtggtatctatgtgaaatccattgttcctggaggaccagctgccaaggaagggcagatcctacagggtgaccgactcctgcaggtggatggagtgattctgtgcggcctcacccacaagcaggctgtgcagtgcctgacgggtcctgggcaggttgcaagactggtcttagagagaagagtccccaggagtacacagcagtgtccttctgctaatgacagcatgggagatgaacgcacggctgtttccttggtaacagccttgcctggcaggccttcgagctgtgtctcagtgacagatggtcctaagtttgaagtcaaactaaaaaagaatgccaatggtttgggattcagtttcgtgcagatggagaaagagagctgcagccatctcaaaagtgatcttgtgaggattaagaggctctttccggggcagccagctgaggagaatggggccattgcagctggtgacattatcctggccgtgaatggaaggtccacggaaggcctcatcttccaggaggtgctgcatttactgagaggggccccacaggaagtcacgctcctcctttgccgaccccctccaggtgcgctgcctgagctggagcaggaatggcagacacctgaactctcagctgacaaagaattcaccagggcaacatgtactgactcatgtaccagccccatcctggatcaagaggacagctggagggacagtgcctccccagatgcaggggaaggcctgggtctcaggccagagtcttcccaaaaggccatcagagaggcacaatggggccaaaacagagagagaccttgggccagttccttgacacattctcctgagtcccaccctcatttatgcaaacttcaccaagaaagggatgaatcaacattggcgacctctttggaaaaggatgtgaggcaaaactgctattcagtttgtgatatcatgagacttggaagatattccttctcatctcctctaaccagactttcgacagatattttctgagcaccttctctgcatgtctgcagtgctgtgtaaaatgccctacctttgcatggactattctttctaatcaagaggcgtgtgtggcgaacttggggcagcccctggaagtcttgttctttgaccattacgtctgcggctgcatcaccagataatgagcttcaccactcgtctgcctcctgtgtccttccgcggggagtaaatgtcacttcagcttgccgcatctctaaataggcaaattttcagtgctcagaaaaggacctgatctttgcacaaagtgctttgatggttgcctgcttgagtcactcccaatcccttcctgaagccctttctttataattcttctgttgaaatagccatcatattcacagtactaatcacagcatctcacatttactaaaaacttaccccataccaggaacccagagttgggggggctgtgtcagaattatgtaatttacgtgtcccaataatcctagacgcttcttgaccatctagttttgtcaaatgagaaaactgaggttccaaagaagtcaataaacttgtccaaagtctgaccgactctgcttgccatgtgacgagtctgtcttagaactgggtcattgccctgcttgcaatgctgtgccctctggcaagcccccccatccccccggtctcctgagctcggtaaggtgctccagctgcttctatcatagcacttcctacatggactgtaacatttctttactgctccaacttctcattaaattgggggctcctcaaa

SEQ ID NO: 935 - protein, 261 aa, Homo sapiens
MGDERTAVSLVTALPGRPSSCVSVTDGPKFEVKLKKNANGLGFSFVQMEKESCSHLKSDLVRIKRLFPGQPAEENGAIAAGDIILAVNGRSTEGLIFQEVLHLLRGAPQEVTLLLCRPPPGALPELEQEWQTPELSADKEFTRATCTDSCTSPILDQEDSWRDSASPDAGEGLGLRPESSQKAIREAQWGQNRERPWASSLTHSPESHPHLCKLHQERDESTLATSLEKDVRQNCYSVCDIMRLGRYSFSSPLTRLSTDIF

SEQ ID NO: 936 - DNA, 4797 bp, Homo sapiens
agtgctggtggcagggagctccgcggacagacttgcaagagacccctgctccttgttggaaagttgtcccatgatgaaggcctagacctggtcacggagacttttggatgcagcctttaacgaaggacgcaggcatgagcctgtcctctgtgacgctggccagcgccctacaggtcaggggtgaagctctgtctgaggaggaaatctggtccctcctgttcctggccgctgagcagctcctggaagacctccgcaacgattcctcggactatgtggtttgcccctggtcagccctgctttctgcagctggaagcctttctttccaaggccgtgtttctcatatagaggctgctcctttcaaggcccctgaactgctacagggacagagtgaggatgagcagcctgatgcatctcagatgcatgtctattctttaggaatgaccctctactggtcagcagggtttcatgttccgccacatcagcccctgcagctctgcgagcccctgcactccatcctgctgaccatgtgtgaagaccagcctcacaggcggtgcacgttgcagtcggttctggaagcttgtcgggttcatgagaaagaagtgtctgtctacccagcccctgctggtctccacatcagaaggctggttggcttggttctgggtaccatttctgaggtggagaaaagagttgtggaggaaagctcctctgtgcagcagaacagaagctacctgctcaggaagaggctgcgtgggacaagcagcgagagcccagcggcacaggccccggagtgtctgcatccttgcagagtttcagaaagaagcacggagacccagagctcaccagagccccattggagcaccttgacacacagtcactgcagcctccttgttaaccgcgctcttccaggagcagatccccaggaccagcaggcgggccggaggctcagctctggatctgtgcactcggcagcagacagctcatggccaacaactccttctcagaggggttttctgcaaagaaggagcaagttttccaggccagagttcatcctgttggctggagaggccccgatgacactacatctgccgggatcggttgtgaccaaaaaagggaaatcctatttggctctcagggacctctgtgtggtcctgctgaacgggcagcacctggaggtaaaatgtgatgttgaatcaacagtgggagctgtcttcaatgccgtgacatcctttgccaacctcgaggaactcacctactttggcttggcgtatatgaaaagcaaagagttctttttcctggacagtgaaaccagattgtgcaaaatagctcctgaaggctggagagagcagcctcagaagacctccatgaataccttcacactcttcctgaggataaagttctttgtcagccactatgggctgctccagcacagcctgacaaggcaccagttttacctgcagcttcggaaagatatcctggaggagaggctgtactgcaatgaagagatactgctgcagctgggggtccttgccttgcaggctgagtttggcaattaccctaaggagcaggtggagagtaagccatactttcacgttgaagattacatcccagcgagtctgatcgagaggatgaccgctctacgggtccaggttgaagtctcagagatgcaccggctcagctctgcactgtggggagaggatgctgagctgaagttcttgagggtcactcagcagctcccagaatacggtgtgctggttcaccaagtattctcagagaagaggaggccagaagaggagatggccctggggatctgtgccaagggtgtcatagtctatgaagtgaaaaacaacagcagaattgcaatgttacggtttcagtggagagaaaccgggaagatttctacttatcaaaaaaagttcaccatcacaagcagtgtcactgggaagaagcacacatttgtcacagattcagccaagaccagtaaatacttactggacctctgctcagcccagcatgggtttaatgcacagatgggctctgggcagccttcccatgttttatttgaccatgataagtttgtgcaaatggccaatttgagtcctgcacaccaggcccggtctaagcctctcatttggattcagagattgtcatgctcagaaaacgagttgtttgtatccaggcttcagggtgctgcaggaggcctgctgagtacatcaatggataacttcaacgtggacggcagcaaggaggctggagcagaaggcatcgggcgcagcccctgcactggccgggagcagctgaagagtgcctgtgtgatccagaagccaatgacctgggactctctctctggaccacctgttcagagcatgcatgcaggctcaaagaataataggaggaagagctttatagctgaaccgggccgagaaattgtacgtgtgacactgaaacgtgacccacatcgtggttttgggtttgtcattaatgagggagagtattcaggccaagctgaccctggcatttttatatcttctattatacctggaggaccagcagaaaaagcaaaaacgatcaaaccaggagggcagatactagccctgaatcacatcagtctggagggcttcacattcaacatggctgttaggatgatccagaattcccctgacaacatagaattaattatttctcagtcaaaaggtgttggtggaaataacccagatgaagaaaagaatagcacagccaattctggggtctcctctacagacatcctgagcttcgggtaccagggaagtttgttgtcacacacacaagaccaggacagaaatactgaagaactagacatggctggggtgcagagcttagtgcccaggctgagacatcagctttcctttctgccgttaaagggtgctggttcttcttgtcctccatcacctccagaaatcagtgctggtgaaatctactttgtggaactggttaaagaagatgggacacttggattcagtgtaactggtggcattaacaccagtgtgccatatggtggtatctatgtgaaatccattgttcctggaggaccagctgccaaggaagggcagatcctacagggtgaccgactcctgcaggtggatggagtgattctgtgcggcctcacccacaagcaggctgtgcagtgcctgacgggtcctgggcaggttgcaagactggtcttagagagaagagtccccaggagtacacagcagtgtccttctgctaatgacagcatgggagatgaacgcacggctgtttccttggtaacagccttgcctggcaggccttcgagctgtgtctcagtgacagatggtcctaagtttgaagtcaaactaaaaaagaatgccaatggtttgggattcagtttcgtgcagatggagaaagagagctgcagccatctcaaaagtgatcttgtgaggattaagaggctctttccggggcagccagctgaggagaatggggccattgcagctggtgacattatcctggccgtgaatggaaggtccacggaaggcctcatcttccaggaggtgctgcatttactgagaggggccccacaggaagtcacgctcctcctttgccgaccccctccaggtgcgctgcctgagctggagcaggaatggcagacacctgaactctcagctgacaaagaattcaccagggcaacatgtactgactcatgtaccagccccatcctggatcaagaggacagctggagggacagtgcctccccagatgcaggggaaggcctgggtctcaggccagagtcttcccaaaaggccatcagagaggcacaatggggccaaaacagagagagaccttgggccagttccttgacacattctcctgagtcccaccctcatttatgcaaacttcaccaagaaagggatgaatcaacattggcgacctctttggaaaaggatgtgaggcaaaactgctattcagtttgtgatatcatgagacttggaagatattccttctcatctcctctaaccagactttcgacagatattttctgagcaccttctctgcatgtctgcagtgctgtgtaaaatgccctacctttgcatggactattctttctaatcaagaggcgtgtgtggcgaacttggggcagcccctggaagtcttgttctttgaccattacgtctgcggctgcatcaccagataatgagcttcaccactcgtctgcctcctgtgtccttccgcggggagtaaatgtcacttcagcttgccgcatctctaaataggcaaattttcagtgctcagaaaaggacctgatctttgcacaaagtgctttgatggttgcctgcttgagtcactcccaatcccttcctgaagccctttctttataattcttctgttgaaatagccatcatattcacagtactaatcacagcatctcacatttactaaaaacttaccccataccaggaacccagagttgggggggctgtgtcagaattatgtaatttacgtgtcccaataatcctagacgcttcttgaccatctagttttgtcaaatgagaaaactgaggttccaaagaagtcaataaacttgtccaaagtctgaccgactctgcttgccatgtgacgagtctgtcttagaactgggtcattgccctgcttgcaatgctgtgccctctggcaagcccccccatccccccggtctcctgagctcggtaaggtgctccagctgcttctatcatagcacttcctacatggactgtaacatttctttactgctccaacttctcattaaattgggggctcctcaaa

SEQ ID NO: 937 - protein, 1309 aa, Homo sapiens
MQPLTKDAGMSLSSVTLASALQVRGEALSEEEIWSLLFLAAEQLLEDLRNDSSDYVVCPWSALLSAAGSLSFQGRVSHIEAAPFKAPELLQGQSEDEQPDASQMHVYSLGMTLYWSAGFHVPPHQPLQLCEPLHSILLTMCEDQPHRRCTLQSVLEACRVHEKEVSVYPAPAGLHIRRLVGLVLGTISEVEKRVVEESSSVQQNRSYLLRKRLRGTSSESPAAQAPECLHPCRVSERSTETQSSPEPHWSTLTHSHCSLLVNRALPGADPQDQQAGRRLSSGSVHSAADSSWPTTPSQRGFLQRRSKFSRPEFILLAGEAPMTLHLPGSVVTKKGKSYLALRDLCVVLLNGQHLEVKCDVESTVGAVFNAVTSFANLEELTYFGLAYMKSKEFFFLDSETRLCKIAPEGWREQPQKTSMNTFTLFLRIKFFVSHYGLLQHSLTRHQFYLQLRKDILEERLYCNEEILLQLGVLALQAEFGNYPKEQVESKPYFHVEDYIPASLIERMTALRVQVEVSEMHRLSSALWGEDAELKFLRVTQQLPEYGVLVHQVFSEKRRPEEEMALGICAKGVIVYEVKNNSRIAMLRFQWRETGKISTYQKKFTITSSVTGKKHTFVTDSAKTSKYLLDLCSAQHGFNAQMGSGQPSHVLFDHDKFVQMANLSPAHQARSKPLIWIQRLSCSENELFVSRLQGAAGGLLSTSMDNFNVDGSKEAGAEGIGRSPCTGREQLKSACVIQKPMTWDSLSGPPVQSMHAGSKNNRRKSFIAEPGREIVRVTLKRDPHRGFGFVINEGEYSGQADPGIFISSIIPGGPAEKAKTIKPGGQILALNHISLEGFTFNMAVRMIQNSPDNIELIISQSKGVGGNNPDEEKNSTANSGVSSTDILSFGYQGSLLSHTQDQDRNTEELDMAGVQSLVPRLRHQLSFLPLKGAGSSCPPSPPEISAGEIYFVELVKEDGTLGFSVTGGINTSVPYGGIYVKSIVPGGPAAKEGQILQGDRLLQVDGVILCGLTHKQAVQCLTGPGQVARLVLERRVPRSTQQCPSANDSMGDERTAVSLVTALPGRPSSCVSVTDGPKFEVKLKKNANGLGFSFVQMEKESCSHLKSDLVRIKRLFPGQPAEENGAIAAGDIILAVNGRSTEGLIFQEVLHLLRGAPQEVTLLLCRPPPGALPELEQEWQTPELSADKEFTRATCTDSCTSPILDQEDSWRDSASPDAGEGLGLRPESSQKAIREAQWGQNRERPWASSLTHSPESHPHLCKLHQERDESTLATSLEKDVRQNCYSVCDIMRLGRYSFSSPLTRLSTDIF

SEQ ID NO: 938 - DNA, 4731 bp, Homo sapiens
agtgctggtggcagggagctccgcggacagacttgcaagagacccctgctccttgttggaaagttgtcccatgatgaaggcctagacctggtcacggagacttttggatgcagcctttaacgaaggacgcaggcatgagcctgtcctctgtgacgctggccagcgccctacaggtcaggggtgaagctctgtctgaggaggaaatctggtccctcctgttcctggccgctgagcagctcctggaagacctccgcaacgattcctcggactatgtggtttgcccctggtcagccctgctttctgcagctggaagcctttctttccaaggccgtgtttctcatatagaggctgctcctttcaaggcccctgaactgctacagggacagagtgaggatgagcagcctgatgcatctcagcccctgcagctctgcgagcccctgcactccatcctgctgaccatgtgtgaagaccagcctcacaggcggtgcacgttgcagtcggttctggaagcttgtcgggttcatgagaaagaagtgtctgtctacccagcccctgctggtctccacatcagaaggctggttggcttggttctgggtaccatttctgaggtggagaaaagagttgtggaggaaagctcctctgtgcagcagaacagaagctacctgctcaggaagaggctgcgtgggacaagcagcgagagcccagcggcacaggccccggagtgtctgcatccttgcagagtttcagaaagaagcacggagacccagagctcaccagagccccattggagcaccttgacacacagtcactgcagcctccttgttaaccgcgctcttccaggagcagatccccaggaccagcaggcgggccggaggctcagctctggatctgtgcactcggcagcagacagctcatggccaacaactccttctcagaggggttttctgcaaagaaggagcaagttttccaggccagagttcatcctgttggctggagaggccccgatgacactacatctgccgggatcggttgtgaccaaaaaagggaaatcctatttggctctcagggacctctgtgtggtcctgctgaacgggcagcacctggaggtaaaatgtgatgttgaatcaacagtgggagctgtcttcaatgccgtgacatcctttgccaacctcgaggaactcacctactttggcttggcgtatatgaaaagcaaagagttctttttcctggacagtgaaaccagattgtgcaaaatagctcctgaaggctggagagagcagcctcagaagacctccatgaataccttcacactcttcctgaggataaagttctttgtcagccactatgggctgctccagcacagcctgacaaggcaccagttttacctgcagcttcggaaagatatcctggaggagaggctgtactgcaatgaagagatactgctgcagctgggggtccttgccttgcaggctgagtttggcaattaccctaaggagcaggtggagagtaagccatactttcacgttgaagattacatcccagcgagtctgatcgagaggatgaccgctctacgggtccaggttgaagtctcagagatgcaccggctcagctctgcactgtggggagaggatgctgagctgaagttcttgagggtcactcagcagctcccagaatacggtgtgctggttcaccaagtattctcagagaagaggaggccagaagaggagatggccctggggatctgtgccaagggtgtcatagtctatgaagtgaaaaacaacagcagaattgcaatgttacggtttcagtggagagaaaccgggaagatttctacttatcaaaaaaagttcaccatcacaagcagtgtcactgggaagaagcacacatttgtcacagattcagccaagaccagtaaatacttactggacctctgctcagcccagcatgggtttaatgcacagatgggctctgggcagccttcccatgttttatttgaccatgataagtttgtgcaaatggccaatttgagtcctgcacaccaggcccggtctaagcctctcatttggattcagagattgtcatgctcagaaaacgagttgtttgtatccaggcttcagggtgctgcaggaggcctgctgagtacatcaatggataacttcaacgtggacggcagcaaggaggctggagcagaaggcatcgggcgcagcccctgcactggccgggagcagctgaagagtgcctgtgtgatccagaagccaatgacctgggactctctctctggaccacctgttcagagcatgcatgcaggctcaaagaataataggaggaagagctttatagctgaaccgggccgagaaattgtacgtgtgacactgaaacgtgacccacatcgtggttttgggtttgtcattaatgagggagagtattcaggccaagctgaccctggcatttttatatcttctattatacctggaggaccagcagaaaaagcaaaaacgatcaaaccaggagggcagatactagccctgaatcacatcagtctggagggcttcacattcaacatggctgttaggatgatccagaattcccctgacaacatagaattaattatttctcagtcaaaaggtgttggtggaaataacccagatgaagaaaagaatagcacagccaattctggggtctcctctacagacatcctgagcttcgggtaccagggaagtttgttgtcacacacacaagaccaggacagaaatactgaagaactagacatggctggggtgcagagcttagtgcccaggctgagacatcagctttcctttctgccgttaaagggtgctggttcttcttgtcctccatcacctccagaaatcagtgctggtgaaatctactttgtggaactggttaaagaagatgggacacttggattcagtgtaactggtggcattaacaccagtgtgccatatggtggtatctatgtgaaatccattgttcctggaggaccagctgccaaggaagggcagatcctacagggtgaccgactcctgcaggtggatggagtgattctgtgcggcctcacccacaagcaggctgtgcagtgcctgacgggtcctgggcaggttgcaagactggtcttagagagaagagtccccaggagtacacagcagtgtccttctgctaatgacagcatgggagatgaacgcacggctgtttccttggtaacagccttgcctggcaggccttcgagctgtgtctcagtgacagatggtcctaagtttgaagtcaaactaaaaaagaatgccaatggtttgggattcagtttcgtgcagatggagaaagagagctgcagccatctcaaaagtgatcttgtgaggattaagaggctctttccggggcagccagctgaggagaatggggccattgcagctggtgacattatcctggccgtgaatggaaggtccacggaaggcctcatcttccaggaggtgctgcatttactgagaggggccccacaggaagtcacgctcctcctttgccgaccccctccaggtgcgctgcctgagctggagcaggaatggcagacacctgaactctcagctgacaaagaattcaccagggcaacatgtactgactcatgtaccagccccatcctggatcaagaggacagctggagggacagtgcctccccagatgcaggggaaggcctgggtctcaggccagagtcttcccaaaaggccatcagagaggcacaatggggccaaaacagagagagaccttgggccagttccttgacacattctcctgagtcccaccctcatttatgcaaacttcaccaagaaagggatgaatcaacattggcgacctctttggaaaaggatgtgaggcaaaactgctattcagtttgtgatatcatgagacttggaagatattccttctcatctcctctaaccagactttcgacagatattttctgagcaccttctctgcatgtctgcagtgctgtgtaaaatgccctacctttgcatggactattctttctaatcaagaggcgtgtgtggcgaacttggggcagcccctggaagtcttgttctttgaccattacgtctgcggctgcatcaccagataatgagcttcaccactcgtctgcctcctgtgtccttccgcggggagtaaatgtcacttcagcttgccgcatctctaaataggcaaattttcagtgctcagaaaaggacctgatctttgcacaaagtgctttgatggttgcctgcttgagtcactcccaatcccttcctgaagccctttctttataattcttctgttgaaatagccatcatattcacagtactaatcacagcatctcacatttactaaaaacttaccccataccaggaacccagagttgggggggctgtgtcagaattatgtaatttacgtgtcccaataatcctagacgcttcttgaccatctagttttgtcaaatgagaaaactgaggttccaaagaagtcaataaacttgtccaaagtctgaccgactctgcttgccatgtgacgagtctgtcttagaactgggtcattgccctgcttgcaatgctgtgccctctggcaagcccccccatccccccggtctcctgagctcggtaaggtgctccagctgcttctatcatagcacttcctacatggactgtaacatttctttactgctccaacttctcattaaattgggggctcctcaaa

SEQ ID NO: 939 - protein, 1287 aa, Homo sapiens
MQPLTKDAGMSLSSVTLASALQVRGEALSEEEIWSLLFLAAEQLLEDLRNDSSDYVVCPWSALLSAAGSLSFQGRVSHIEAAPFKAPELLQGQSEDEQPDASQPLQLCEPLHSILLTMCEDQPHRRCTLQSVLEACRVHEKEVSVYPAPAGLHIRRLVGLVLGTISEVEKRVVEESSSVQQNRSYLLRKRLRGTSSESPAAQAPECLHPCRVSERSTETQSSPEPHWSTLTHSHCSLLVNRALPGADPQDQQAGRRLSSGSVHSAADSSWPTTPSQRGFLQRRSKFSRPEFILLAGEAPMTLHLPGSVVTKKGKSYLALRDLCVVLLNGQHLEVKCDVESTVGAVFNAVTSFANLEELTYFGLAYMKSKEFFFLDSETRLCKIAPEGWREQPQKTSMNTFTLFLRIKFFVSHYGLLQHSLTRHQFYLQLRKDILEERLYCNEEILLQLGVLALQAEFGNYPKEQVESKPYFHVEDYIPASLIERMTALRVQVEVSEMHRLSSALWGEDAELKFLRVTQQLPEYGVLVHQVFSEKRRPEEEMALGICAKGVIVYEVKNNSRIAMLRFQWRETGKISTYQKKFTITSSVTGKKHTFVTDSAKTSKYLLDLCSAQHGFNAQMGSGQPSHVLFDHDKFVQMANLSPAHQARSKPLIWIQRLSCSENELFVSRLQGAAGGLLSTSMDNFNVDGSKEAGAEGIGRSPCTGREQLKSACVIQKPMTWDSLSGPPVQSMHAGSKNNRRKSFIAEPGREIVRVTLKRDPHRGFGFVINEGEYSGQADPGIFISSIIPGGPAEKAKTIKPGGQILALNHISLEGFTFNMAVRMIQNSPDNIELIISQSKGVGGNNPDEEKNSTANSGVSSTDILSFGYQGSLLSHTQDQDRNTEELDMAGVQSLVPRLRHQLSFLPLKGAGSSCPPSPPEISAGEIYFVELVKEDGTLGFSVTGGINTSVPYGGIYVKSIVPGGPAAKEGQILQGDRLLQVDGVILCGLTHKQAVQCLTGPGQVARLVLERRVPRSTQQCPSANDSMGDERTAVSLVTALPGRPSSCVSVTDGPKFEVKLKKNANGLGFSFVQMEKESCSHLKSDLVRIKRLFPGQPAEENGAIAAGDIILAVNGRSTEGLIFQEVLHLLRGAPQEVTLLLCRPPPGALPELEQEWQTPELSADKEFTRATCTDSCTSPILDQEDSWRDSASPDAGEGLGLRPESSQKAIREAQWGQNRERPWASSLTHSPESHPHLCKLHQERDESTLATSLEKDVRQNCYSVCDIMRLGRYSFSSPLTRLSTDIF

SEQ ID NO: 940 - DNA, 2449 bp, Homo sapiens
gcggactgcgccgggcggcggcggggagatgcggctgctggcactggcggcggccgcgctgctggcgcgggctccggctccggaggtctgtgcggccctcaatgtcactgtgtccccggggcccgtggttgactacctggagggggagaatgccactctcctctgccacgtctcccagaaaaggcggaaggacagcttgctggccgtgcgctggttctttgcacactcctccgactcccaggaggccttgatggtgaagatgaccaagctccgggtggtgcagtactatgggaatttcagccgcagcgccaaacggcggaggctgcgcctgctggaggagcagcggggggcgctctacaggctctccgtcttgacactgcagccctccgatcaagggcattacgtctgcagagtccaggaaatcagcaggcacaggaacaagtggacggcctggtccaatggctcctcagccacggaaatgagagtcatttccctcaaagcttctgaagagtcatcctttgagaaaacaaaagagacttgggcattttttgaagatctctatgtgtatgctgtcctcgtgtgctgcgtggggatcctcagcattctgctcttcatgctggtcatcgtctggcagtctgtgtttaacaagcggaaatccagagtgagacattatttggtgaaatgccctcagaacagctcaggggagactgtcactagcgtgaccagcttggccccactacagcccaagaagggcaggaggcagaaggagaagcctgacattcctccagcagtccctgccaaagctccgatagcccccacgttccataaaccgaagctgctgaaaccacagagaaaagtcacgctgccaaagattgctgaggaaaacttaacctatgccgagctggagctgatcaaaccccaccgggctgccaaaggcgcccccaccagcactgtctacgcccagatcctcttcgaggagaacaagctgtagtacagcgtccacctccaaggttctatttaatacctgccacccagtgatttatgaagccttggagacaaagcccttatgtctgtattttcactcatgccttctgagtggtggggagccccttttcagcagcattctgggtgcctttgaagaggtacaagcctgctctccccaaaagaatcggggccacagctcttgacagatctccggggacaagatgcgcctgggtttgagccctgagcgtaaggattctgatcctgagagcagccaaggagattttctgctgagccaaaccccttcacatttttctcctctttccccaggttttctttaaaatcgtttttaaatcttaattttactctctactcttcctgcatccacgatacaagctcacagtatatagctagaggaaatgccattatggacccaactgtaagatggcacatatgttggttttccaaggatcagatggcattgccagggccacagccaactgctgatcgccagcaccacctgagatggcatctcttgttttaaatagatgcactaaccctgaagattaaggccaaaggggcagactgactagagaagtataaggtctgtctctgaatgccatggtgcccacctatgagaccctgaggccgcaggacaagaagaacaccattctagagggcttccagccctttcacaaggtggacctgtactgatagagaaacacactctctaagaagtgcttactcacccttttccaaaggagcacaggtgttggccatcagaagacacactggagcgcatgggcctcttcactgtgtgccaagctcagtcacctctgattcagcccctgagggtgtctgctgccaggtgccctcagggtaggagagtgggaagtacacgccaagctggaaagtgtgttctgaagaccctcctcttgccaagtgccttgcccattgcaaccttgtgtgtgaattctaatgggtttgaatgggggtcagggtgcatggggaagttgctctgtggacctttgggacacaggaatcttggacttactggcaggggatccattctgaaagcaccatcctgtcaactgtgttattgaggacatttcttgatgtgagtatagtctgggtggctatttactgcccactatagaaattgtttgactatgtagtggaccatgtatatatgataaattatctattttaaacacagctggggtatgagttgtgccctctatatagctgtgtgaacttggctaaatttcttatcccctaatgacctcagactccatgtttgtgtaaagacgacttaacttcccatagaattcttgagggtaaaatgggataatgaatcttgccagttctagaaactgtaaattgctacacaaatgctctgtgttgacattcatgctaaagccagtctgcattttcaaaatgaaaatttcttcaccaaaaaaaaaaaaaa

SEQ ID NO: 941 - protein, 320 aa, Homo sapiens
MRLLALAAAALLARAPAPEVCAALNVTVSPGPVVDYLEGENATLLCHVSQKRRKDSLLAVRWFFAHSSDSQEALMVKMTKLRVVQYYGNFSRSAKRRRLRLLEEQRGALYRLSVLTLQPSDQGHYVCRVQEISRHRNKWTAWSNGSSATEMRVISLKASEESSFEKTKETWAFFEDLYVYAVLVCCVGILSILLFMLVIVWQSVFNKRKSRVRHYLVKCPQNSSGETVTSVTSLAPLQPKKGRRQKEKPDIPPAVPAKAPIAPTFHKPKLLKPQRKVTLPKIAEENLTYAELELIKPHRAAKGAPTSTVYAQILFEENKL

SEQ ID NO: 942 - DNA, 2170 bp, Homo sapiens
acagcgccgggcggcggcggggagatgcggctgctggcactggcggcggccgcgctgctggcgcgggctccggctccggaggtctgtgcggccctcaatgtcactgtgtccccggggcccgtggttgactacctggagggggagaatgccactctcctctgccacgtctcccagaaaaggcggaaggacagcttgctggccgtgcgctggttctttgcacactccttcgactcccaggaggccttgatggtgaagatgaccaagctccgggtggtgcagtactatgggaatttcagccgcagcgccaaacggcggaggctgcgcctgctggaggagcagcggggggcgctctacaggctctccgtcttgacactgcagccctccgatcaagggcattacgtctgcagagtccaggaaatcagcaggcacaggaacaagtggacggcctggtccaatggctcctcagccacggaaatgagaggagtctccagccatccagtggagaggggagcttttcttgggatttcccttgtaatactacctcactctttgcccttcaccgcagacttaaccatggcctccttcctgcagagttcttgatgtgagataaaattgcttgtctttcactggaaactcccagaaagaaaggctggtgcctggtctctcctcatttccctgtcatgaacacctcgcccagcacatggagggtgacttgcgatgatatatttaaaaaataactcccagttctgagaagagccataggagtgttggctcttattatctgtcctgatttccatatgttggttgttttctattgcaaaagtaatatagtgtaatatagttcaattatagaaaacatggaaaaatactgaaagggtttaaagaagaaaataaaaatgacttaccatatctctactcaacttaacatttcagtgcaaatccttcctgtcattttatgcaaattaaaatttaaaacctaatttcaatcttactgtaaagagtgttctgtgactcgcttttctgatattactaaatagtgtgcacattttcccttgttaaatatgcctcaaaaacataatgttaatgatggaataatgttccatcatgcaggtggacctcaatttagcttcctgcttattgttactggacatttgaagctgctgtaaatctttgtcaataaatctccatgaatatccctgaccttagcataaaatcctggaaataagattgccgggtccaaagatctacccaaattaaaaatggacacaatttcaagaagtgaattgacctctaaaatagtttacaaatttatattaccaccagcattgaaaatgccttttccccacggattggtctacataagagtgttggttaattttatgtgttgacttgactaggctaaacgatgcccagatagcaggtaaaacattatttctgggtgtgttcgttctgtttctctgggatcccagactaacacaatcatatactttttgaggatgatgatgataacaatgaatgcctgcaacagtgcctggtacacagttgatcctcaatagatacttgatgaatgaataaaatgttctttgtcaagtgtcattagcaactgttgctgtggatgactttgaagtaggcgtgacttggtggatgtagtcaccctctctgggatgccttacctctctttcccttgacctatttcaatcatacatattttttggggctccacatccagctttcatcttccatcaatgccttctttgggcatgccagcccatggagtgctctcccactggcaacatcttgtagcttctgtttttagcactgtagacacaacattatgtggtcatgccgttgtttttcaagctgctgtggcacagtgatgatgtcaaaaatattatacataaaagagttggccaggcatggtggcttacgcctgtaatcccagcactttgggaggccgaggtgggtggatcacgaagtcaagagttcaagaccagcctggccaacatggtgaaaccccatctctacaaaaatacaaaaattagccaggtgtggtggtgtgcacctgtaatcccagctactcgggaggctgagatgaagaattgcttaaacccaggaggcaaaggctgcagtgagccaagatcccgccactgcactccagcactccgctctc

SEQ ID NO: 943 - protein, 191 aa, Homo sapiens
MRLLALAAAALLARAPAPEVCAALNVTVSPGPVVDYLEGENATLLCHVSQKRRKDSLLAVRWFFAHSFDSQEALMVKMTKLRVVQYYGNFSRSAKRRRLRLLEEQRGALYRLSVLTLQPSDQGHYVCRVQEISRHRNKWTAWSNGSSATEMRGVSSHPVERGAFLGISLVILPHSLPFTADLTMASFLQSS

SEQ ID NO: 944 - DNA, 1425 bp, Homo sapiens
atggggagctcagtgtccactctggctggggccagctggaggccttcagtacagccccagccaactctcactgaacagctggagcaccgacaccctgggcactcatttcaaatcatgaaatgctacttcacagatcacaggggagaacagtcacccaccgatgggaccaccctcagcttgaccagccctgagtccactgaggagagtgtggaagtgttctggccagggactatacagagagaagggtcgtccccacggccggggcctgccattccccgggaggagggcctctacttcgctgccagggaccgggggatgcgggactggagcagctccccatcctcagagtcctccgagtaccagtcctactcccagtaccagtcgtgctgctcctgcatgtgcgatgaggacaatgctgctccgcagagtgtgtgtgccttctacacgcacgtgcagactgtgcggggtgtggctgtggcctgggagacggaggccggcttcgagccggtcaccaggaagccccgcatccatgaagcccagttcatcaagaggcagaggtggaacggctcctccttcgaaatggcttccaacaccgatatgcgctgggacctggaagcctgcaagagcaactgcagccccgagcccgaggacatagacctgctggagtgctgcctgcaggagctgcgggagccgccggactggctggtcaccaccaactacggggtgcgctgcgtggcctgctgcagggtcttgccctccctggacgctctgctggagcacgcccagcatggcatccgggagggcttcagctgtcagatcttttttgaggagatgctggagagaaggcgggctcagggccaagcacatgaccaacagctggaggaggagcagagtccttcagacaacagcgaatgttcccggccccagggtgaggtgctctcagcacagcagcaggagaagcagtgagccagaggggagatacccaaccctgccctcacctccagggcctgggactgctccttccccagccagcagtatcagagccactagggcagggagagaggaccagggtcagggggaaggaaaggcatggagtgtagagcaaggagggccaggagactggaaggaacccccttcctgccctaggcacagcatctccaccagagtccatttcaaaacccaaacgagagggctttgagtgtttctgatggcaggcacaacatctgaaacccacaaacgcatggccagagggatttctatttttgccggtggatcaggcaggtccacacttgctaagtatatgtgggtcacaggacagccaactgcaaattactctccagccctatttttttcactattacaaatctgtcatatgccctagttctatgtcttatgttattgggattaaacttgaataacacaaaa

SEQ ID NO: 945 - protein, 321 aa, Homo sapiens
MGSSVSTLAGASWRPSVQPQPTLTEQLEHRHPGHSFQIMKCYFTDHRGEQSPTDGTTLSLTSPESTEESVEVFWPGTIQREGSSPRPGPAIPREEGLYFAARDRGMRDWSSSPSSESSEYQSYSQYQSCCSCMCDEDNAAPQSVCAFYTHVQTVRGVAVAWETEAGFEPVTRKPRIHEAQFIKRQRWNGSSFEMASNTDMRWDLEACKSNCSPEPEDIDLLECCLQELREPPDWLVTTNYGVRCVACCRVLPSLDALLEHAQHGIREGFSCQIFFEEMLERRRAQGQAHDQQLEEEQSPSDNSECSRPQGEVLSAQQQEKQ

SEQ ID NO: 946 - DNA, 1050 bp, Homo sapiens
atgcacgtgacccaggatcccaggatcccacaggatcccagcactggccacatcctgtgtatgttcttggagagccatggtgggagctctagggaaaggggtcttctctctctctatgtccaaaatgggctggccacaggccacgctggacacagccctcaggagccattcctgtcttctactgggccagctttcctgcagcatggcacagctctgacttggagggctggttccatatctgttcacccagtcacctttaaaattaagtcctgggcacaaatcattagtctggcaagttacatcactgtgccacttccatccggacagaaggaacccaggtcaaggctgacaggaggagcaggagccgtcaatgagagcagacctcagaagccaacggaggtgagaagagcaccatccacagccccatcctctgaatgctgtgggaagaagtccacaaaataccaccccttggagtcagtcagtagtagagcccttgctgctggctgcaaataccccatcagaacatgtttggggtgattcttggacctggtttcaatttcttttctgccagtcagcagttgtgcttgactcacaatttgttgccatctcttgaattaaactcaggaaacaggataaagatcagaaccacattgtaaaagcttccttatggttcattttttgctgagataaataatgagcagctctgatccatgtctctggagagctcagagcacactaccaggagctcctagccacagggtgagcacaggtggctggtgttctcttgatgaggaaagacagcagtgtccaatctaccctgccttacacggagccccaggtgctctcccggactgtgttgctacctaaagcacatggcaattgcatgatgctaaccagagcagcccctcactcattagaaacatctgctttgcattatttacacaggcaaagttttcctttttactgagcctacccagttcaaacttaagtgggatttgccagctatctggctaattttatgagcaataataaagattggtgaacacttgg

SEQ ID NO: 947 - protein, 178 aa, Homo sapiens
MHVTQDPRIPQDPSTGHILCMFLESHGGSSRERGLLSLYVQNGLATGHAGHSPQEPFLSSTGPAFLQHGTALTWRAGSISVHPVTFKIKSWAQIISLASYITVPLPSGQKEPRSRLTGGAGAVNESRPQKPTEVRRAPSTAPSSECCGKKSTKYHPLESVSSRALAAGCKYPIRTCLG

SEQ ID NO: 948 - DNA, 7021 bp, Homo sapiens
caacgtgctgagctaatagcgacagatagagggcagacagattcctgctagcagcttagtgttagttgcttgtggtaactaaggcaggtggcatacatctcagaacgtggagaatgatggtatgctttctgagttaacatgttgaactgttttgcttttctaaaaattttcctagtaacattttcttgatgatatgagagtggatatcaatgcctcacagaaacaagaggtggaacatgtgaatgaatcgtcttggaactagattatgagcactggttctttttaaagggatgtgcaagaggcagccttggcaagaaaacttgctgcataatcttacatggactaaagatgaaactttaaaccgcaaatcagctttgagtgaactttgacagaagatgtttcgacagttttatctctggacatgtttagcttcagggatcatcctgggctctctctttgaaatctgcttgggccagtatgatgatgattgcaaactagctaggggaggaccaccagctaccatagttgctattgatgaagaaagtcggaatggtacaattctggtggacaacatgctgatcaaagggactgctggaggaccagaccccaccatagaactttctttaaaggataatgtggattactgggtgttgatggatcctgttaagcaaatgcttttcctgaacagcaccggaagagttctggatagagatccaccgatgaacatacactccattgtggtgcaggtccagtgcatcaacaaaaaagtgggcactattatctaccatgaagtgcgaatagtggtgagagacaggaatgacaactcacccactttcaagcatgaaagctactatgccacagtgaatgagctcactccagttggtaccacaatattcacaggattttcaggagacaatggagctacagatatagatgatggaccaaatggacagatagagtatgttattcagtataatccagatgatccgacatccaatgacacctttgaaattcccctaatgttgactggaaatatagtgttaaggaagaggctcaactatgaagataagactcgctactttgtcataatccaagctaatgaccgtgcccaaaatctgaatgagaggcgaaccaccaccaccactctcacagtggatgttctggatggagatgacttgggtccaatgtttcttccttgtgtccttgtgccaaacactcgtgattgccgtccactcacttatcaagctgccatacctgagttgagaactccggaagaactgaaccccattattgttacgccaccaatccaagccattgatcaggaccggaatattcaaccgccatcagataggccaggaatcctctattccatccttgttgggactcctgaggattacccacgatttttccatatgcatcctaggacagcagaacttagtctcctggagccagtaaacagagactttcaccagaaatttgatttggttattaaggctgaacaagacaatggtcatcctcttcctgcctttgccggtctacacattgaaatactggatgaaaacaatcaaagtccatattttacaatgcccagttatcaaggctatatcctggaatctgccccagtgggagcaaccatttcggacagtctcaatttgacttcacctttaagaatagtagctctggacaaggacatagaagatacaaaagacccagagcttcacctttttctgaatgactacacctcagtcttcaccgtcacacagactggtattactcgctacctcaccttacttcaaccagtggacagggaagaacagcaaacttacaccttttcgataacagcatttgatggtgtacaagaaagtgagccagtcatcgtcaatattcaagtgatggatgcaaatgataacacgccaaccttccctgaaatatcctatgatgtgtatgtttatacagacatgagacctggggacagtgtcatacagctcactgcagtcgacgcagacgaagggtcaaatggggagatcacatatgaaatccttgttggggctcagggagacttcatcatcaataaaacaacagggcttatcaccatcgctccaggggtggaaatgatagtcgggcggacttacgcactcacggtccaagcagcggataatgctcctcctgcagagcgaaggaactccatctgcactgtgtatattgaagtgcttccaccaaataatcaaagccctcctcgcttcccacagctgatgtatagccttgaaattagtgaagccatgagggttggtgctgttttattaaatctacaggcaactgatcgagagggagactcaataacatatgccattgagaatggagatcctcagagagtttttaatctttcagaaaccacggggattctaaccttagggaaagcactggacagggaaagcactgatcgctacattctgatcatcacagcttcagatggcaggccagatgggacctcaactgccacagtaaacatagtggtgacagatgtcaatgacaatgctccagtgtttgatccttatctgccaagaaatttatctgtggtggaagaagaagccaatgcctttgtgggtcaagtaaaagcaacagaccctgatgctggaataaatggtcaagtgcactacagtttgggtaactttaataatctttttcgtatcacatccaatgggagcatttacacagcagtgaagcttaacagagaagtcagggactactatgaacttgttgttgtggcaacagatggagcagtacaccctcgtcattcaactctaaccttggccatcaaggttttggacattgatgataacagtcctgtgttcaccaattcaacatacactgtccttgttgaagagaatttgccagctgggactaccatccttcaaatagaggccaaagatgtcgaccttggagcaaatgtgtcttaccggataagaagcccagaagtgaagcacttttttgcactacatccatttacaggagaactatcgcttttaaggagtttagattatgaggcatttccagaccaagaagcaagtatcacttttctggtagaggcctttgatatttatggaacaatgccacctggtattgctactgtcacagtgattgtaaaggatatgaatgattatcctcctgtctttagtaaacgaatatacaaagggatggtggctccggatgcagtcaagggtacacctatcacaacagtttatgctgaagatgcagaccctcctggattacctgcaagtcgtgtgaggtatagagtagatgatgtacagtttccttaccctgccagtatttttgaagtggaagaagattctggaagagtaataacacgagtcaatcttaatgaagaacctacaacaatttttaagttggtggtggttgcttttgatgatggggagcctgtgatgtccagcagtgccacagtgaagattcttgtcttacatcctggtgagatcccacgcttcacacaggaggaatatagacctcctccagtaagtgaacttgccaccaaagggaccatggttggtgtaatttctgctgctgccattaatcaaagtattgtgtactccattgtttcaggaaatgaagaagatacatttggaattaataacatcacaggtgttatctatgtgaatggacctctggattatgagaccaggacaagctatgtacttcgagtccaagctgattccctggaagtggtccttgccaatctccgagttccttcaaaaagcaatacagctaaagtatacattgagattcaggatgaaaataatcatcccccagtgtttcagaaaaaattctacatcggaggtgtatctgaagatgcaagaatgtttacttctgtactcagagtgaaggctactgataaagatactggcaattatagtgtcatggcctacagactcataataccaccaattaaagagggaaaagaaggatttgtagtggaaacatatacagggcttatcaaaactgctatgctcttccataatatgaggagatcctacttcaagtttcaagttattgcaactgacgactatgggaagggactgagcggcaaagccgatgtactcgtctccgtggtcaatcagctggatatgcaagtcattgtttccaatgtgcctcctactctagtggaaaaaaagatagaagatcttacagagatcttggatcgctatgttcaggaacaaattcctggtgccaaggtcgtagtggagtccattggagctcgccggcatggagatgccttttccctagaagattacaccaaatgtgacttgactgtctatgcaattgacccccaaaccaacagagccatcgatagaaatgagctttttaaatttttggatggcaaactacttgatatcaataaagactttcagccgtattatggggaaggaggacgcattctggagatccggactccagaggcagtgaccagcattaaaaagagaggagaaagtctaggatacacagaaggggccttgttggctctggccttcatcatcatcctctgctgcattcctgccatcttggtggttttggtcagctacagacagtttaaagtacgtcaagctgagtgtacaaagactgcacgaattcaggccgcattacccgcggctaaaccagcagtgccggctcctgcaccagtggcagcgcccccgccgccgccgccgcctccgccaggtgcgcatctctatgaagaacttggagacagctcaattcttttccttctctaccattttcaacaaagcaggggaaataactcagtctcagaagacaggaaacatcaacaagttgtgatgcccttttcttccaatactattgaggctcacaagtcagctcatgtagacggatcacttaagagcaacaaactgaagtctgcaagaaaattcacatttctatctgatgaggatgacttaagtgcccataatcccctttataaggaaaacataagtcaagtatcaacaaattcagacatttcacagagaacagattttgtagacccattttcacccaaaatacaagccaagagtaagtctctgaggggcccaagagaaaagattcagaggctgtggagtcagtcagtcagcttacccaggaggctgatgaggaaagttccaaatagaccagagatcatagatctgcagcagtggcaaggcaccaggcagaaagctgaaaatgaaaacactggaatctgtacaaacaaaagaggtagcagcaatccattgcttacaactgaagaggcaaatttgacagagaaagaggaaataaggcaaggtgaaacactgatgatagaaggaacagaacagttgaaatctctctcttcagactcttcattttgctttcccaggcctcacttctcattctccactttgccaactgtttcaagaactgtggaactcaaatcagaacctaatgtcatcagttctcctgctgagtgttccttggaactttctccttcaaggccttgtgttttacattcttcactctctaggagagagacacctatttgtatgttacctattgaaaccgaaagaaatatttttgaaaattttgcccatccaccaaacatctctccttctgcctgtccccttccccctcctcctcctatttctcctccttctcctcctcctgctcctgctcctcttgctcctcctcctgacatttctcctttttctcttttttgtcctcctccctctcctccttctatccctcttcctcttcctcctcctacattttttccactttccgtttcaacgtctggtcccccaacaccacctcttctacctccatttccaactcctcttcctccaccacctccttctattccttgccctccacctccttcagcttcatttctgtccacagagtgtgtctgtataacaggtgttaaatgcacgaccaacttgatgcctgccgagaaaattaagtcctctatgacacagctatcaacaacgacagtgtgtaaaacagaccctcagagagaaccaaaaggcatcctcagacacgttaaaaacttagcagaacttgaaaaatcagtagctaacatgtacagtcaaatagaaaaaaactatctacgcacaaatgtttcagaacttcaaactatgtgcccttcagaagtaacaaatatggaaatcacatctgaacaaaacaaggggagtttgaacaatattgtcgagggaactgaaaaacaatctcacagtcaatctacttcactgtaatgttgcttttcttattttagtcgggcaaacctcttgttgatcatagtcttcaagttgaacatcaaatttgaacgtcaaagaagactctattattttaccccaaattcaatgaaatgcagttttttttctcgtttttaatttaaaaagatattaacctcatcactactaactcactcatataatagatttaccttactttttaaaaactacaaagtagcataatttgttctacatttatttgaaaagtaagtaattttaatctcttttttagtgggaatatgtgggcatgaaaattagatacccaacttaaaccaaaggcatgtctatcatgtggatgcagtaacatttacatttagtttttgatcgtagttttatatgaatgttccaagaaaaaagcagactgttacaaataagttaaaactgatatgattgataggttctgttttttcttgaagcctatgtatttggtaagaagaaatactaccgaagtaaaatataatgtacctagattgtaggagatgacagacataaggtatttcaaaataaatctcaggtgctataacatgtagtcatctgttttctgataagaacatcttttactctgacttgcttttatcttagtagtatgcttatggatttagtagtatgcttatggatttgataaatcttatactttttcagttgctgtcttattctctttatttctcattgtgctttcccttcccttctttataatgaaaataaatcttgagtcgttg

SEQ ID NO: 949 - protein, 1955 aa, Homo sapiens
MFRQFYLWTCLASGIILGSLFEICLGQYDDDCKLARGGPPATIVAIDEESRNGTILVDNMLIKGTAGGPDPTIELSLKDNVDYWVLMDPVKQMLFLNSTGRVLDRDPPMNIHSIVVQVQCINKKVGTIIYHEVRIVVRDRNDNSPTFKHESYYATVNELTPVGTTIFTGFSGDNGATDIDDGPNGQIEYVIQYNPDDPTSNDTFEIPLMLTGNIVLRKRLNYEDKTRYFVIIQANDRAQNLNERRTTTTTLTVDVLDGDDLGPMFLPCVLVPNTRDCRPLTYQAAIPELRTPEELNPIIVTPPIQAIDQDRNIQPPSDRPGILYSILVGTPEDYPRFFHMHPRTAELSLLEPVNRDFHQKFDLVIKAEQDNGHPLPAFAGLHIEILDENNQSPYFTMPSYQGYILESAPVGATISDSLNLTSPLRIVALDKDIEDTKDPELHLFLNDYTSVFTVTQTGITRYLTLLQPVDREEQQTYTFSITAFDGVQESEPVIVNIQVMDANDNTPTFPEISYDVYVYTDMRPGDSVIQLTAVDADEGSNGEITYEILVGAQGDFIINKTTGLITIAPGVEMIVGRTYALTVQAADNAPPAERRNSICTVYIEVLPPNNQSPPRFPQLMYSLEISEAMRVGAVLLNLQATDREGDSITYAIENGDPQRVFNLSETTGILTLGKALDRESTDRYILIITASDGRPDGTSTATVNIVVTDVNDNAPVFDPYLPRNLSVVEEEANAFVGQVKATDPDAGINGQVHYSLGNFNNLFRITSNGSIYTAVKLNREVRDYYELVVVATDGAVHPRHSTLTLAIKVLDIDDNSPVFTNSTYTVLVEENLPAGTTILQIEAKDVDLGANVSYRIRSPEVKHFFALHPFTGELSLLRSLDYEAFPDQEASITFLVEAFDIYGTMPPGIATVTVIVKDMNDYPPVFSKRIYKGMVAPDAVKGTPITTVYAEDADPPGLPASRVRYRVDDVQFPYPASIFEVEEDSGRVITRVNLNEEPTTIFKLVVVAFDDGEPVMSSSATVKILVLHPGEIPRFTQEEYRPPPVSELATKGTMVGVISAAAINQSIVYSIVSGNEEDTFGINNITGVIYVNGPLDYETRTSYVLRVQADSLEVVLANLRVPSKSNTAKVYIEIQDENNHPPVFQKKFYIGGVSEDARMFTSVLRVKATDKDTGNYSVMAYRLIIPPIKEGKEGFVVETYTGLIKTAMLFHNMRRSYFKFQVIATDDYGKGLSGKADVLVSVVNQLDMQVIVSNVPPTLVEKKIEDLTEILDRYVQEQIPGAKVVVESIGARRHGDAFSLEDYTKCDLTVYAIDPQTNRAIDRNELFKFLDGKLLDINKDFQPYYGEGGRILEIRTPEAVTSIKKRGESLGYTEGALLALAFIIILCCIPAILVVLVSYRQFKVRQAECTKTARIQAALPAAKPAVPAPAPVAAPPPPPPPPPGAHLYEELGDSSILFLLYHFQQSRGNNSVSEDRKHQQVVMPFSSNTIEAHKSAHVDGSLKSNKLKSARKFTFLSDEDDLSAHNPLYKENISQVSTNSDISQRTDFVDPFSPKIQAKSKSLRGPREKIQRLWSQSVSLPRRLMRKVPNRPEIIDLQQWQGTRQKAENENTGICTNKRGSSNPLLTTEEANLTEKEEIRQGETLMIEGTEQLKSLSSDSSFCFPRPHFSFSTLPTVSRTVELKSEPNVISSPAECSLELSPSRPCVLHSSLSRRETPICMLPIETERNIFENFAHPPNISPSACPLPPPPPISPPSPPPAPAPLAPPPDISPFSLFCPPPSPPSIPLPLPPPTFFPLSVSTSGPPTPPLLPPFPTPLPPPPPSIPCPPPPSASFLSTECVCITGVKCTTNLMPAEKIKSSMTQLSTTTVCKTDPQREPKGILRHVKNLAELEKSVANMYSQIEKNYLRTNVSELQTMCPSEVTNMEITSEQNKGSLNNIVEGTEKQSHSQSTSL

SEQ ID NO: 950 - DNA, 2308 bp, Homo sapiens
gggggaccgaccgccgcgcagcccaggccgccgcgcgcacacaccgggcccggctcctgagggcgccagcgcggccccggggagcgcgaggagccggcgaagcgcgcggcctgccgttggcggcctggtccgcagcgccctgcgcccacccgccccggacgtggggcccaagcccccgtgaagatggtgtcctggatgatctccagagccgtggtgctggtgtttggaatgctttatcctgcatattattcatacaaagctgtgaaaacaaaaaacgtgaaggaatatgttcgatggatgatgtactggattgtttttgctctctatactgtgattgaaacagtagccgatcaaacagttgcttggtttcccctgtactatgagctgaagattgcttttgtcatatggctgctttctccctataccaaaggagcaagtttaatatatagaaaattccttcatccacttctttcttcaaaggaaagggagattgatgattatattgtacaagcaaaggaacgaggctatgaaaccatggtaaactttggacggcaaggtttaaaccttgcagctactgctgctgttactgcagcagtaaagagccaaggagcaataactgaacgtttaagaagcttcagtatgcatgatttaacaactatccaaggtgatgagcctgtgggacaaagaccataccaacctctaccagaagcaaaaaagaaaagtaaaccagcccccagtgaatcagcaggttatggaattccactgaaagacggagatgagaaaacagatgaagaagcagaggggccatattcagataatgagatgttaacacacaaagggcttcgaagatcgcaaagcatgaaatctgtgaaaaccaccaaaggccgcaaagaggtgcggtacgggtcactaaaatacaaagtgaagaaacgaccacaagtgtatttttagtcatctacacgtcaaatatcccaagacagattatgctaaatacatcgacttcatcttctaacatgatatattcaggatttacacattaaaatgattatttaaattgtggcagtgatggggtttactttcatgaatttaaattgtttttatttctgtaacaattgcttccaaatattgactactaaaggcagttctgcaagatgtactaaatatgtatattagaaattatagaaaatcatgttgtccgttttcaaattcatcaacagcctagagtgcctgagatataagatgaaacacaaatccacagtatacttgaaaggagcctttttacggttcaggataaatcagcctttgtgatgtactgtgtttacctccttttgtgttgtatctggtaattaaataggcctcagattcagcagtgacataacaaggacataatgtaagataataaagtaggttttatatattctttaaatttttacttatataatactttctagtttttccaccatcagctgaaagtttttgaaacaaatatttgaaaaccaggtatccacacatagcacttttattcctgactagttttgcacacttgaaaattgtttacttattttacaactgttttactgatgctatctttattgtttttgccgtattctgacatgtcaaatctatgccttgaattatatcatctcttttcctgtgggtttcatttgttaaattcattggattttaataatataaaagtatagctaattgttcagttttaactatttttaattatcttcttaacaaataagaagttgctttaaacattaaccaattttctatatttagctatacagagtaattgaacttaacatgtttttgtcaacaccaattacattttcagcttttaaaaatggtagcttttgtgaaatagaatcagtgaccagtatagcacttagatcccttctaactcatataatttttctcagccaatccattcacaagcttggcattgacatgtgctgctagtttataaactggcattgacgaaaatcatttgaatctcttctggctgagataatttgccaatgcaaaatacagttgtcattaatcctgcacattggaaattattagaaacatattactttttaactttaaatctcaaagagattttgagttattgaattcttaaggctttcttagcttgaactgataactatgcattatgaaccctaagtcaatatatttttggtggttttagtgatcagtaatcaaatttgtacttattatgcttgttcaggtaatttacttgactgttctatttgtttgtccaaaagataaaatgatgagagagaaaaaaaaaaaaaaa

SEQ ID NO: 951 - protein, 255 aa, Homo sapiens
MVSWMISRAVVLVFGMLYPAYYSYKAVKTKNVKEYVRWMMYWIVFALYTVIETVADQTVAWFPLYYELKIAFVIWLLSPYTKGASLIYRKFLHPLLSSKEREIDDYIVQAKERGYETMVNFGRQGLNLAATAAVTAAVKSQGAITERLRSFSMHDLTTIQGDEPVGQRPYQPLPEAKKKSKPAPSESAGYGIPLKDGDEKTDEEAEGPYSDNEMLTHKGLRRSQSMKSVKTTKGRKEVRYGSLKYKVKKRPQVYF

SEQ ID NO: 952 - DNA, 2181 bp, Homo sapiens
cctcatgttagcgagtggccctcggctcgtctcgcagatcggccaagtacgcggaggccgcgcggtttcaccattaatactcctgaaggacaatagctcatcaagccccaccgaaagccccggacccgtcgcggagcctgggctggcgggggatgaggctgagcaactcctcctagaggtggttatgtggagaaggagcaatcccttctccctcctcctcctccccccgctactatccgcggcccagagaactgccgcttgccgccattgacacgcacagatagaacccaaagaaaggcaaagagtcctgcccggcaccggcgccgcgtgggccaaacctgcgcccgtggaggggcgcgcagagggcaccgggcgccgggagcaggcggcgcagcaccagcattgtgttagtgccgggaggccactgtgtcagcaagctgagagggaaactgaagcaagatgtcgggccggagtgggaagaagaaaatgtccaagctgtcccgttcagctagggcaggtgtcatctttccagtggggaggctgatgcgttatctgaagaaagggacgttcaagtaccggatcagcgtgggcgcccctgtctacatggcggcagtcattgagtacctggcagcggaaattctagaattggccggcaatgccgcgagggacaacaagaaggcccggatagccccgagacacatcttgctggcagttgccaatgacgaggagctcaaccagctgctaaaaggagtgaccatcgccagtggaggcgtcctgcccagaattcaccccgaactgctggccaaaaagcgagggaccaaaggcaagtcggaaacgatcctctccccacccccagagaaaagaggcaggaaggccacgtcaggcaagaagggggggaagaaatccaaggctgccaaaccacggacgtccaaaaagtccaaaccaaaggacagcgataaagaaggaacttcaaattccacctctgaagatgggccaggggatggattcaccattctgtcttctaagagccttgttctgggacagaagctgtccttaacccagagtgacatcagccatattggctccatgagagtggagggcattgtccacccaaccacagccgaaattgacctcaaagaagatataggtaaagccttggaaaaggctgggggaaaagagttcttggaaacggtaaaggagcttcgcaaatcccaaggccctttggaagtcgccgaagccgccgtcagccaatccagtggactcgcagccaaatttgtcatccactgtcacatccctcagtggggctccgacaaatgtgaagaacagcttgaagagaccatcaaaaactgcctgtcagcggcggaggacaagaagctaaagtccgtcgcgttcccgcctttccccagcggcagaaactgctttcccaaacagactgcggcccaggtgaccctcaaagccatctcagcccactttgatgactcgagcgcgtcctcgctgaagaacgtgtacttcctgctcttcgacagcgagagcatcggcatctacgtgcaggagatggccaagctcgacgccaagtagccgccgcactttccagcagggatcggaggacgacccgagtcccaagagtggggttttgctttttaaaaggagagaggaggggtgatggcaggggagtggagggtggccgggcaggtcctgccggcgcagggagccctctgcccttcacactctcctccaaaagagcctccatctgtaaggaagcaggtctccgcgaggggtttctttccatgtgttttcctcctgttgttttagaacttttttaaaaaaacagacctcgttttagatttatagcattgacttttacacacattcacacaagaaaaaaatcctttcaaaattcttaaatcttctgttcctcctttttccaagggaagagggcaaaaagtggcctgggctctgttggtgtgcgtgttccgtggcggagagaagaaaatgggaaagacatctcactggtgcttttctcttttgttttagtgccccccgcccccatccctataatatctgtaactactcctaaaaaggttttgattcaggcttttttttggtttcattttgtttttttaagaaaaagaaaatgaaaggaaaaaaataaaagatccagtgtctttcttacaacataaa

SEQ ID NO: 953 - protein, 372 aa, Homo sapiens
MSGRSGKKKMSKLSRSARAGVIFPVGRLMRYLKKGTFKYRISVGAPVYMAAVIEYLAAEILELAGNAARDNKKARIAPRHILLAVANDEELNQLLKGVTIASGGVLPRIHPELLAKKRGTKGKSETILSPPPEKRGRKATSGKKGGKKSKAAKPRTSKKSKPKDSDKEGTSNSTSEDGPGDGFTILSSKSLVLGQKLSLTQSDISHIGSMRVEGIVHPTTAEIDLKEDIGKALEKAGGKEFLETVKELRKSQGPLEVAEAAVSQSSGLAAKFVIHCHIPQWGSDKCEEQLEETIKNCLSAAEDKKLKSVAFPPFPSGRNCFPKQTAAQVTLKAISAHFDDSSASSLKNVYFLLFDSESIGIYVQEMAKLDAK

SEQ ID NO: 954 - DNA, 3240 bp, Homo sapiens
ggccgttcggagaccagccccagcgtgccaggaccgtttccggggcctggccggggcgttgccgcggggtcggggaccagcacgagtgctgagtcacgccccgcccgggagcgcctcgggtcagtaactcgggaagacgaccaagcgggagcgggagcgggagcgggagccggagcgagagcgcgcgggcgcggccgacagtgcctgatttgagatggggtcccaggtctcggtggaatcgggagctctgcacgtggtgattgtgggtgggggctttggcgggatcgcagcagccagccagctgcaggccctgaacgtccccttcatgctggtggacatgaaggactccttccaccacaatgtggctgctctccgagcctccgtggagacagggttcgccaaaaagacattcatttcttactcggtgactttcaaggacaacttccggcaggggctagtagtggggatagacctgaagaaccagatggtgctgctgcagggtggcgaggccctgcccttctctcatcttatcctggccacgggcagcactgggcccttcccgggcaagtttaatgaggtttccagccagcaggccgctatccaggcctatgaggacatggtgaggcaggtccagcgctcacggttcatcgtggtggtgggaggaggctcggctggagtggagatggcagcagagattaaaacagaatatcctgagaaagaggtcactctcattcactcccaagtggccctggctgacaaggagctcctgccctccgtccggcaggaagtgaaggagatcctcctccggaagggcgtgcagctgctgctgagtgagcgggtgagcaatctggaggagctgcctctcaatgagtatcgagagtacatcaaagtgcagacggacaaaggcacagaggtggccaccaacctggtgattctctgcaccggcatcaagatcaacagctccgcctaccgcaaagcgtttgagagcagactagccagcagtggtgctctgagagtgaacgagcacctccaggtggagggccacagcaacgtctacgccattggtgactgtgccgacgtgaggacgcccaagatggcctatcttgccggcctccacgccaacatcgccgtggccaacatcgtcaactctgtgaagcagcggcctctccaggcctacaagccgggtgcactgacgttcctcctgtccatggggagaaatgacggtgtgggccaaatcagtggcttctatgtgggccggctcatggttcggctgaccaagagccgggacctgttcgtctctacgagctggaaaaccatgaggcagtctccaccttgatggagaggccaggcgggagaactaccgcagcaggtgggcgtacggactgcttggcgcatggcacccgcctggcaagtgctagaactaatgctattcttctggaataagatgccaatgatgtggtggctagaaatgcaacttgtataaaacaaaaatgggagagagagaggtattaaacaaataccccccttagaggatactttctgggtttggaaggtgtgcttgctgtggtactgggtgagcggctcatgtgtgctggctgcatggtgctggggaggccacagccagcccttcctctgcacctgcctcctctgggatgtgcatgtgtgtgtacgtgcttgtggtcatgacgcgtgccatttagagctctcagagcagggcagattgctgggctctggtggccagtgtctgtctgtgagggcaggaaggagagctgcacattgagaacaaaggagggacctgaggtggagagaggcccagcaccccaaatctctgccatcacacggtcggggagcccatacattctgcaacaaccagggacttcacaggagccttgttttcaatttgctaacaggtgcataatccctgtgctccttaagcctcatggccttcctacatttccactttatttgtttgtttgtttatttatttttgagacagtctcgccctgtcacccaggctggagtgcagtggcacgatctcagctcactgcaacctacgccttctgggttcacgtgattctcttgccttagcctcccaagtagctgggactacaggcacgtgccaccatgcctggctaatttttgtattttttaaatagagacggggtttcactgtgttggccaggctggtctcgaacacctgacctcaggtgatccattcgtcttggcctctcgaagtgctgggattccaggcgtgagccactgcggccagcacatttccacttttagatcctactccataccacaggtttcatttaagaagaaagagctagataaatgtgctcttctggttaccccaccctgacagagtgcatttttacacggctagcaggggttgagactgcagcctggcctgccagccattggaggtgtttaaggaagggcagataatgtgactctttgcggggtgccatctgcttacccattagcgagcagagggggtttctgcgggtgacccccagcatatttctaggttacttatgggcagatttgtaagtgacaaaactccagctgatgctgggaatggggagagggcccttgagggactttgtggttttgtgcttctggtttcctggccaaccccagggtcacttgtctggaggcccagctgggcactaatgtctgccaccgactatgttacagtgtataaatgattcctctatttgggagagatcttccaatccagaggagcccctcttggactgcctgggttaaatctgcatagcagaagtggttgatgagttcatctgaagaaattcaggccccacctccccaccctgcccctccctgctcccttttgatggtggcctctgggtactcgggcagagtccttgggacaccagcctctctggggttctcaggccatcccgttggggctgtcgcccaggcctaagtgagtcgtgtgcctctattggaggatggctgttcccctggtggttgcatccaagtatctgtctttctttatggaccacgaagggaagcccaccttcctggaggcaggaccttcggcctaagaaacacaggccctggtgctatctgacctggggtccagcgaggtgggaatcccagtgtgtgagcgacaggccttcttctattgacttacaatattctagaaggacctacgtgtggggacacagttttccaaactgaggaaaatgttgcaataaaagaatatgttgtaag

SEQ ID NO: 955 - protein, 373 aa, Homo sapiens
MGSQVSVESGALHVVIVGGGFGGIAAASQLQALNVPFMLVDMKDSFHHNVAALRASVETGFAKKTFISYSVTFKDNFRQGLVVGIDLKNQMVLLQGGEALPFSHLILATGSTGPFPGKFNEVSSQQAAIQAYEDMVRQVQRSRFIVVVGGGSAGVEMAAEIKTEYPEKEVTLIHSQVALADKELLPSVRQEVKEILLRKGVQLLLSERVSNLEELPLNEYREYIKVQTDKGTEVATNLVILCTGIKINSSAYRKAFESRLASSGALRVNEHLQVEGHSNVYAIGDCADVRTPKMAYLAGLHANIAVANIVNSVKQRPLQAYKPGALTFLLSMGRNDGVGQISGFYVGRLMVRLTKSRDLFVSTSWKTMRQSPP

SEQ ID NO: 956 - DNA, 896 bp, Homo sapiens
gttgaagaaagaggatctggctgaaagacccgcaactttcacttgttgagaacctttagccagcgccggcgtgcatgtgttttagttttattctttttcccttgcccccaaagccgtggagtacctgctgttgctctcatgcctcttgccaacagtggcatctgctcagtgtagccatcaagaatttgaatgtcaatatctttgccttgaaatgaatggaaaagtatttgtcactcagcggcaatcattcttcaaataaaaggtcactggaaggactgagcgcattcaggagcctggaggaactcatcttggacaacaatcagctgggggacgaccttgtgttgccagggttacccagactgcataccttaaccctcaacaagaaccgaatcactgatttggagaacctgctggatcacttggcagaagtgacaccagctctggagtacctcagtctgctgggcaacgtggcctgtcccaacgagctggtcagcttggaaaaggatgaggaagactacaagagatacagatgctttgttctgtacaagctgcccaacttgaaatttctggatgcccagaaagtaaccagacaagaacgagaggaggcgttggtcagaggagtcttcatgaaggtggtgaagcccaaggcttctagtgaggacgttgccagctccccggagcgccactacacgcccttgccttctgcttccagggaactcaccagtcaccaaggtgtcctggggaagtgtcgctacgtttactatgggaaaaactcagagggcaacaggtttatccgagatgaccagctctgaagccaacttctgtataccttcacccatttcatgaaaataaaatcaaaagggaaatcaaaaataaagaaaacgctaaagaaaaaa

SEQ ID NO: 957 - protein, 198 aa, Homo sapiens
MEKYLSLSGNHSSNKRSLEGLSAFRSLEELILDNNQLGDDLVLPGLPRLHTLTLNKNRITDLENLLDHLAEVTPALEYLSLLGNVACPNELVSLEKDEEDYKRYRCFVLYKLPNLKFLDAQKVTRQEREEALVRGVFMKVVKPKASSEDVASSPERHYTPLPSASRELTSHQGVLGKCRYVYYGKNSEGNRFIRDDQL

SEQ ID NO: 958 - DNA, 796 bp, Homo sapiens
atgtggaaaagtggatttgaaagctatggcagctccttgtactggggatccagcagctacatgcagtccccaggggcctttggattgctgacaccttctcaggtgtcgagcccagcacattgtaccctgtactatatctaagctgctttctgccactttgattgacgaagtgtttaaaattgggaatgttgagatttcacaggtcactattgtgggggatcatccaacatacagagaaggctccaacaaatattgtttacaaaatagatgacatgacaactgcacctgtggatgttcgccagtgggttgacacagatgacaccagcagtgaaaacactgtcattcctccagaaaaatatgtcattgtggcaggcgatttgagacctcttcaggacaaaaagagcctggtaccctttaaaatcatgcccctggaggatatgaatgagttcaccgtacatattctggaagtgatcaatgtacacatgatactaagcaaagctaacaggcagccctcagcagggagagcacctatcagcaatccaggaatgagtgaagcagggaaatttggtgggaataacttcatgccagcaaaggacctactgtggcccaaaaccaggtgttgaatttgattaagcgttgcccaagaccgaaagaattgaactttcaggatctcaagaaccagctcaaccacatgtctgtatcctcaatcaagcaagctgtggattttctgagcaatgaggggcacatctattcttctgtagatgattatcattttaaatccacagatgcagaataa

SEQ ID NO: 959 - DNA, 2091 bp, Homo sapiens
atgagtgaaggggcagccgctgcctcgccacctggtgccgcttcggcagccgccgcctcggccgaggagggcaccgcggcggctgcggcggcggcagcggcgggcgggggcccggacggcggcggcgaaggggcggccgagcccccccgggagttacgctgtagcgactgcatcgtgtggaaccggcagcagacgtggctgtgcgtggtacctctgttcatcggcttcatcggcctggggctcagcctcatgcttctcaaatggatcgtggtgggctccgtcaaggagtacgtgcccaccgacctagtggactccaaggggatgggccaggaccccttcttcctctccaagcccagctctttccccaaggccatggagaccaccaccactaccacttccaccacgtcccccgccaccccctccgccgggggtgccgcctcctccaggacgcccaaccggattagcactcgcctgaccaccatcacgcgggcgcccactcgcttccccgggcaccgggtgcccatccgggccagcccgcgctccaccacagcacggaacactgcggcccctgcgacggtcccgtccaccacggccccgttcttcagtagcagcacgctgggctcccgacccccggtgccaggaactccaagtacccaggcaatgccctcctggcctactgcggcatacgctacctcctcctaccttcacgattctactccctcctggaccctgtctccctttcaggatgctgcctcctcttcttcctcttcttcctcctccgctaccaccaccacaccagaaactagcaccagccccaaatttcatacgacgacatattccacagagcgatccgagcacttcaaaccctgccgagacaaggaccttgcatactgtctcaatgatggcgagtgctttgtgatcgaaaccctgaccggatcccataaacactgtcggtgcaaagaaggctaccaaggagtccgttgtgatcaatttctgccgaaaactgattccatcttatcggatccaacagaccacttggggattgaattcatggagagtgaagaagtttatcaaaggcaggtgctgtcaatttcatgtatcatctttggaattgtcatcgtgggcatgttctgtgcagcattctacttcaaaagcaagaaacaagctaaacaaatccaagagcagctgaaagtgccacaaaatggtaaaagctacagtctcaaagcatccagcacaatggcaaagtcagagaacttggtgaagagccatgtccagctgcaaaattattcaaaggtggaaaggcatcctgtgactgcattggagaaaatgatggagtcaagttttgtcggcccccagtcattccctgaggtcccttctcctgacagaggaagccagtctgtcaaacaccacaggagtctatcctcttgctgcagcccagggcaaagaagtggcatgctccataggaatgccttcagaaggacacccccgtcaccccgaagtaggctaggtggaattgtgggaccagcatatcagcaactcgaagaatcaaggatcccagaccaggatacgataccttgccaagggtattcatccagtggtttaaaaacccaacgaaatacatcaataaatatgcaactgccttcaagagagacaaacccctattttaatagcttggagcaaaaggacctggtgggctattcatccacaagggccagttctgtgcccatcatcccttcagtgggtttagaggaaacctgcctgcaaatgccagggatttctgaagtcaaaagcatcaaatggtgcaaaaactcctattcagctgacgttgtcaatgtgagtattccagtcagcgattgtcttatagcagaacaacaagaagtgaaaatattgctagaaactgtccaggagcagatccgaattctgactgatgccagacggtcagaagactacgaactggccagcgtagaaaccgaggacagtgcaagcgaaaacacagcctttctccccctgagtcccacagccaaatcagaacgagaggcgcaatttgtcttaagaaatgaaatacaaagagactctgcattgaccaagtga

SEQ ID NO: 960 - protein, 696 aa, Homo sapiens
MSEGAAAASPPGAASAAAASAEEGTAAAAAAAAAGGGPDGGGEGAAEPPRELRCSDCIVWNRQQTWLCVVPLFIGFIGLGLSLMLLKWIVVGSVKEYVPTDLVDSKGMGQDPFFLSKPSSFPKAMETTTTTTSTTSPATPSAGGAASSRTPNRISTRLTTITRAPTRFPGHRVPIRASPRSTTARNTAAPATVPSTTAPFFSSSTLGSRPPVPGTPSTQAMPSWPTAAYATSSYLHDSTPSWTLSPFQDAASSSSSSSSSATTTTPETSTSPKFHTTTYSTERSEHFKPCRDKDLAYCLNDGECFVIETLTGSHKHCRCKEGYQGVRCDQFLPKTDSILSDPTDHLGIEFMESEEVYQRQVLSISCIIFGIVIVGMFCAAFYFKSKKQAKQIQEQLKVPQNGKSYSLKASSTMAKSENLVKSHVQLQNYSKVERHPVTALEKMMESSFVGPQSFPEVPSPDRGSQSVKHHRSLSSCCSPGQRSGMLHRNAFRRTPPSPRSRLGGIVGPAYQQLEESRIPDQDTIPCQGYSSSGLKTQRNTSINMQLPSRETNPYFNSLEQKDLVGYSSTRASSVPIIPSVGLEETCLQMPGISEVKSIKWCKNSYSADVVNVSIPVSDCLIAEQQEVKILLETVQEQIRILTDARRSEDYELASVETEDSASENTAFLPLSPTAKSEREAQFVLRNEIQRDSALTK

SEQ ID NO: 961 - DNA, 2847 bp, Homo sapiens
gatgtaagagtcatctgtaaaagctgtgctgttttggcagcctgggaggctaaggtttagtctaggcgactaaggtttagtccgggctgtattcacacccaaaacaactaaaaaagcggaggagtctttgagtcaatccctgaagctccggctaagaggaaactcgcccacgctccagggcagcgacgccggctccacctcagccacggctgtctcaagcttctcggggttttccgccggctccacccgagccacaagtctacaggactcctcggagctttccgccgggacgcaagacccaccgccagaggttggtacctcctagagaacagcgaagcgcatcccgagggccgccggccggaagcgccctccagacccgccccctgccctccggagccggaagctgggcatctgcagctggctcggcgcactccactgaccgtcccgacgatgctacgcgcgcccggctgcctcctccggacctccgtagcgcctgccgcggccctggctgcggcgctgctctcgtcgcttgcgcgctgctctcttctagagccgagggacccggtggcctcgtcgctcagcccctatttcggcaccaagactcgctacgaggatgtcaaccccgtgctattgtcgggccccgaggctccgtggcgggaccctgagctgctggaggggacctgcaccccggtgcagctggtcgccctcattcgccacggcacccgctaccccacggtcaaacagatccgcaagctgaggcagctgcacgggttgctgcaggcccgcgggtccagggatggcggggctagtagtaccggcagccgcgacctgggtgcagcgctggccgactggcctttgtggtacgcggactggatggacgggcagctagtagagaagggacggcaggatatgcgacagctggcgctgcgtctggcctcgctcttcccggcccttttcagccgtgagaactacggccgcctgcggctcatcaccagttccaagcaccgctgcatggatagcagcgccgccttcctgcaggggctgtggcagcactaccaccctggcttgccgccgccggacgtcgcagatatggagtttggacctccaacagttaatgataaactaatgagattttttgatcactgtgagaagtttttaactgaagtagaaaaaaatgctacagctctttatcacgtggaagccttcaaaactggaccagaaatgcagaacattttaaaaaaagttgcagctactttgcaagtgccagtaaatgatttaaatgcagatttaattcaagtagcctttttcacctgttcatttgacctggcaattaaaggtgttaaatctccttggtgtgatgtttttgacatagatgatgcaaaggtattagaatatttaaatgatctgaaacaatattggaaaagaggatatgggtatactattaacagtcgatccagctgcaccttgtttcaggatatctttcagcacttggacaaagcagttgaacagaaacaaaggtctcagccaatttcttctccagtcatcctccagtttggtcatgcagagactcttcttccactgctttctctcatgggctacttcaaagacaaggaacccctaacagcgtacaattacaaaaaacaaatgcatcggaagttccgaagtggtctcattgtaccttatgcctcgaacctgatatttgtgctttaccactgtgaaaatgctaagactcctaaagaacaattccgagtgcagatgttattaaatgaaaaggtgttacctttggcttactcacaagaaactgtttcattttatgaagatctgaagaaccactacaaggacatccttcagagttgtcaaaccagtgaagaatgtgaattagcaagggctaacagtacatctgatgaactatgagtaactgaagaacatttttaattctttaggaatctgcaatgagtgattacatgcttgtaataggtaggcaattccttgattacaggaagcttttatattacttgagtatttctgtcttttcacagaaaaacattgggtttctctctgggtttggacatgaaatgtaagaaaagatttttcactggagcagctctcttaaggagaaacaaatctatttagagaaacagctggccctgcaaatgtttacagaaatgaaattcttcctacttatataagaaatctcacactgagatagaattgtgatttcataataacacttgaaaagtgctggagtaacaaaatatctcagttggaccatccttaacttgattgaactgtctaggaactttacagattgttctgcagttctctcttcttttcctcaggtaggacagctctagcattttcttaatcaggaatattgtggtaagctgggagtatcactctggaagaaagtaacatctccagatgagaatttgaaacaagaaacagagtgttgtaaaaggacaccttcactgaagcaagtcggaaagtacaatgaaaataaatatttttggtatttatttatgaaatatttgaacattttttcaataattcctttttacttctaggaagtctcaaaagaccatcttaaattattatatgtttggacaattagcaacaagtcagatagttagaatcgaagtttttcaaatccattgcttagctaactttttcattctgtcacttggcttcgatttttatattttcctattatatgaaatgtatcttttggttgtttgatttttctttctttctttgtaaatagttctgagttctgtcaaatgccgtgaaagtatttgctataataaagaaaattcttgtgactttactaccaggacttttctcttcccc

SEQ ID NO: 962 - protein, 487 aa, Homo sapiens
MLRAPGCLLRTSVAPAAALAAALLSSLARCSLLEPRDPVASSLSPYFGTKTRYEDVNPVLLSGPEAPWRDPELLEGTCTPVQLVALIRHGTRYPTVKQIRKLRQLHGLLQARGSRDGGASSTGSRDLGAALADWPLWYADWMDGQLVEKGRQDMRQLALRLASLFPALFSRENYGRLRLITSSKHRCMDSSAAFLQGLWQHYHPGLPPPDVADMEFGPPTVNDKLMRFFDHCEKFLTEVEKNATALYHVEAFKTGPEMQNILKKVAATLQVPVNDLNADLIQVAFFTCSFDLAIKGVKSPWCDVFDIDDAKVLEYLNDLKQYWKRGYGYTINSRSSCTLFQDIFQHLDKAVEQKQRSQPISSPVILQFGHAETLLPLLSLMGYFKDKEPLTAYNYKKQMHRKFRSGLIVPYASNLIFVLYHCENAKTPKEQFRVQMLLNEKVLPLAYSQETVSFYEDLKNHYKDILQSCQTSEECELARANSTSDEL

SEQ ID NO: 963 - DNA, 2980 bp, Homo sapiens
ctttggaagtcctatgagggaccatttacggtttcctcagtaatttccaccaggatgaatttccttctcatcactctgcctcaggtagtgctctgaaggtcgtcctttctgaacaaacgcagcaaagcaagccacaccatgggtgagatcaaccaagttgccgtggagaaatacctggaggagaaccctcagtttgccaaggagtactttgacaggaagttgcgggtggaggtgctgggagaaatcttcaagaacagccaggtgccagtccagtccagcatgtccttctctgagctgacccaggtggaggagtcagccctgtgcttggagctgctgtggaccgtgcaggaggaggggggcaccccagagcagggggttcacagggccctgcagaggctggcccacctgctccaggctgaccgctgcagcatgttcctgtgccggtcccggaacggcatacctgaggtggcctctaggttgctggatgtcacccccacctccaagtttgaggacaacctggtgggccctgacaaagaagttgtgtttccattggacattgggatagtgggttgggctgctcacacgaagaaaactcataatgtcccagatgtgaaaaagaacagccatttttctgacttcatggacaagcaaactgggtatgtcactaagaacctgctggcaaccccgatcgtggtgggcaaggaggttcttgctgtgatcatggcagttaacaaagtaaatgcatctgaattttccaaacaggatgaagaggtcttttccaaatacctcaactttgtgtctatcatcctaaggcttcatcacaccagctacatgtacaatattgaatcccgaagaagccagatccttatgtggtcagccaataaagtatttgaagaactcacagatgttgagcgacagtttcacaaagcgctctacacggttagatcatatctgaactgtgaacgatactccattggactgctggacatgaccaaggagaaggaattctacgatgaatggccaatcaagcttggagaagtagagccttataaaggtccaaagacacctgatggcagggaagtcaacttttataaaatcattgattacattttacatggaaaagaagagatcaaagtgattccgacgcctcctgcagaccactggacactcattagtgggttgccaacatatgttgctgaaaatggatttatctgtaacatgatgaatgcccctgcggatgaatacttcacatttcagaaaggacctgtagacgaaactggttgggtcattaagaatgttttgtccctgcctattgtcaacaagaaagaagatattgtgggagtggctacattttacaacaggaaggatggaaaacctttcgatgagcatgatgaatacattaccgagactctcacacaatttcttggatggtctcttttaaatactgacacctacgataagatgaataagctagaaaacagaaaggacattgctcaggaaatgctcatgaaccaaaccaaagccactcctgaagaaattaagtccattttgaaatttcaagagaagttaaatgttgatgtaattgacgactgtgaagaaaaacaacttgttgcaattttgaaagaggacttgccagacccacgctcagcagaactgtacgaattccgcttcagtgacttcccccttacagagcacggattgattaaatgtggaatacgactgttttttgaaataaatgtggtggagaaattcaaagtacctgtagaggttcttaccagatggatgtacactgtgaggaaagggtaccgagctgtcacttaccacaattggcggcatgggttcaacgtggggcagaccatgtttactttgctgatgacaggaagattaaagaagtactacacagatctcgaagcctttgccatgcttgctgctgctttctgccatgatattgaccacagaggcaccaataatttgtaccagatgaaatccacgtctccattagcaagacttcatggttcttctattttggagaggcaccacctggagtacagtaagactctgttgcaggatgagagtttaaacatcttccagaacctaaataagcggcagtttgaaacagttattcatttgttcgaggtcgcaataatagcaactgacctggctttatatttcaagaagaggaccatgtttcaaaaaattgttgatgcctgtgaacaaatgcaaacggaagaagaagccatcaaatatgtaactgttgatccaaccaagaaagagattatcatggcaatgatgatgacggcatgtgacttgtctgctattaccaagccctgggaggtgcaaagtcaggtagcacttatggttgcaaatgaattttgggaacaaggagatctggagagaacagtgttgcagcaacaacccattcctatgatggacagaaacaaaagagatgaattacctaaacttcaagttggatttattgattttgtttgtacttttgtatataaggagttctcacggtttcacaaagaaatcacacctatgctgagtggtcttcagaataacagagtagaatggaaatcactagctgatgagtatgatgcaaagatgaaggtcattgaagaggaggcaaaaaagcaagaaggaggagccgaaaaagctgctgaagattcaggaggtggtgatgacaaaaagtccaaaacatgtttaatgttgtaatattatctaactggtctaaacttcaaatatcattttacctttgaagaaaaccagaaaacattcaaaagaacttcaacaaatcatcacgtaacaggatcttcagaaaaactaccctgtgactatgaagaaaatatatattgctagcccaaaaatcccaggggcaaaataaagttcaacaaaagtgcaaaatatgacaaaaataggtacatttttggtgccaatttattttaaattaaaaaatatgcaatcctgaaaaaaaaaaaaa

SEQ ID NO: 964 - protein, 858 aa, Homo sapiens
MGEINQVAVEKYLEENPQFAKEYFDRKLRVEVLGEIFKNSQVPVQSSMSFSELTQVEESALCLELLWTVQEEGGTPEQGVHRALQRLAHLLQADRCSMFLCRSRNGIPEVASRLLDVTPTSKFEDNLVGPDKEVVFPLDIGIVGWAAHTKKTHNVPDVKKNSHFSDFMDKQTGYVTKNLLATPIVVGKEVLAVIMAVNKVNASEFSKQDEEVFSKYLNFVSIILRLHHTSYMYNIESRRSQILMWSANKVFEELTDVERQFHKALYTVRSYLNCERYSIGLLDMTKEKEFYDEWPIKLGEVEPYKGPKTPDGREVNFYKIIDYILHGKEEIKVIPTPPADHWTLISGLPTYVAENGFICNMMNAPADEYFTFQKGPVDETGWVIKNVLSLPIVNKKEDIVGVATFYNRKDGKPFDEHDEYITETLTQFLGWSLLNTDTYDKMNKLENRKDIAQEMLMNQTKATPEEIKSILKFQEKLNVDVIDDCEEKQLVAILKEDLPDPRSAELYEFRFSDFPLTEHGLIKCGIRLFFEINVVEKFKVPVEVLTRWMYTVRKGYRAVTYHNWRHGFNVGQTMFTLLMTGRLKKYYTDLEAFAMLAAAFCHDIDHRGTNNLYQMKSTSPLARLHGSSILERHHLEYSKTLLQDESLNIFQNLNKRQFETVIHLFEVAIIATDLALYFKKRTMFQKIVDACEQMQTEEEAIKYVTVDPTKKEIIMAMMMTACDLSAITKPWEVQSQVALMVANEFWEQGDLERTVLQQQPIPMMDRNKRDELPKLQVGFIDFVCTFVYKEFSRFHKEITPMLSGLQNNRVEWKSLADEYDAKMKVIEEEAKKQEGGAEKAAEDSGGGDDKKSKTCLML

SEQ ID NO: 965 - DNA, 2400 bp, Homo sapiens
acccgtagggagaggcgggttgcgggcggcggcggcggcggcggcggcggtggtggttgtggcgaggctgtgcggcagggcgcacgggacctgtgctgcagcggctctctcaggccgtgggtcgtcgctgcagctgccgggaaagaaggaaacgacgactccgggggcgaacttggcacacagggaggaagggaaaggatgcatggtcatggaggctatgattctgattttagtgatgatgaacgctgtggagaatccagcaaaaggaaaaaaaggacagttgaagatgacttactgctccaaaaaccatttcagaaagaaaaacatggaaaggtggcccataaacaagttgcagcagaattgctggatagggaagaagcaagaaatagaaggtttcatctcatagctatggatgcttatcaaagacatacaaagttcgtaaatgactatattttatactatggtggcaaaaaagaagacttcaagcgtttgggggaaaatgacaagacagacttggatgttatacgagaaaatcatagattcctatggaatgaggaggacgaaatggacatgacttgggagaagagacttgctaagaaatactatgataaattatttaaggaatactgcatagcagatctcagtaaatataaagaaaataagtttggatttaggtggcgagtagaaaaagaagtaatttcaggaaaaggtcaatttttctgtggaaataaatattgtgataaaaaagaaggcttaaagagttgggaagttaattttggttatattgagcatggtgagaagagaaatgcacttgttaaattaaggttatgccaagaatgttccattaaattaaatttccatcacaggagaaaagaaatcaagtcaaaaaaaagaaaagataaaaccaaaaaagactgtgaagagtcatcacataaaaaatccagattatcttctgcagaagaggcctccaagaaaaaagataaaggacattcatcttcaaagaaatctgaagattctctacttagaaactctgatgaggaagaaagtgcttcagaatctgaactttggaagggtccactaccagagacagatgaaaaatcacaggaagaagaatttgatgagtattttcaggatttgtttctatgagacgagagagagaagcctccgctccttaatgtgaaacttcatgaagttttaaacttcatgcaatttgaaattccatataagtttttatctgcaagttacagcttgtgtggtttgtctttggaaataaaaatccaggttctctcagaatgtcagaggctttggaagttcattagttcaattaaagactttcctgtcctttaaatatcttttcaattgcttatctacaattctgttttatttatagctcctagaggatagagctggacagattccattgttcctacattttgtaggttttttttcactgccttcattatgtatcttctcttgccttcattattttattttattatttcttctttttctcttttttagagccaccaatactggatttgtttgtttttcatttttttcttttgtagaaacggagtcctcctgtgttgcccaggctggtattcaaactcctggccttatgcattcctcccaccctggcctcccagagtgctgggattacaggtgtgagccaccatgctctgccaattattttaaattactaggattaaagtatattatgtatgtctttaacttctttctttcccattgataaactggcacccttcttttaagtacctgctctcccattaccacctatttccagctgctttttgaggttttttgcttgcctgtctcttgcttccttcttaacctctaccacttaagagagtttgttataatcaaatttgacttcctagcctgtggataatttactattaagtaaattattaccacagggagccagtgaggtcccagtagtctaaaacagttcatgtgttcacaaaaattgcctccccggcagagattatgcagtaagataatttaactgaataatactatgtgcatgtatcttgcctcagatatactcatgcaaatatgaatatacctctgatatggtttggctctgtgtccccacccaaatctcatcttgaatgtgtactcccataattcccacattttataggagggatccagtgagagataatttgaatcaagggggcggtttcccccatattgttcttgtggtagtgaataagtctcacaagatctgatggttttatcaggggcttctgcttttgcatccttctcattttcttttgctgctgccatgtaagaagtgccttttgcctcccaccatgattctgaggctttcccagccatgtggaactgtaagtccaattaaacctctttttcttcccc

SEQ ID NO: 966 - protein, 315 aa, Homo sapiens
MHGHGGYDSDFSDDERCGESSKRKKRTVEDDLLLQKPFQKEKHGKVAHKQVAAELLDREEARNRRFHLIAMDAYQRHTKFVNDYILYYGGKKEDFKRLGENDKTDLDVIRENHRFLWNEEDEMDMTWEKRLAKKYYDKLFKEYCIADLSKYKENKFGFRWRVEKEVISGKGQFFCGNKYCDKKEGLKSWEVNFGYIEHGEKRNALVKLRLCQECSIKLNFHHRRKEIKSKKRKDKTKKDCEESSHKKSRLSSAEEASKKKDKGHSSSKKSEDSLLRNSDEEESASESELWKGPLPETDEKSQEEEFDEYFQDLFL

SEQ ID NO: 967 - DNA, 3592 bp, Homo sapiens
gaggaagaggctgaggaggcgcggggggcgggggaggctcaggagcgggcggtgacggcgacggcggcggcagaggaggcagcggctgggccgggccccgtgcgtctgtccgcgccccgtggatgcgaatcggccgcggcggaggcggcggcggcggaggaggcggcggcgggaggaggagtcggtgagccggctccgggccggaggggcgcggaggatgaggccgctgcctggcgctcttggcgtggcggcggccgccgcgctgtggctgctgctgctgctgctgccccggacccgggcggacgagcacgaacacacgtatcaagataaagaggaagttgtcttatggatgaatactgttgggccctaccataatcgtcaagaaacatataagtacttttcacttccattctgtgtggggtcaaaaaaaagtatcagtcattaccatgaaactctgggagaagcacttcaaggggttgaattggaatttagtggtctggatattaaatttaaagatgatgtgatgccagccacttactgtgaaattgatttagataaagaaaagagagatgcatttgtatatgccataaaaaatcattactggtaccagatgtacatagatgatttaccaatatggggtattgttggtgaggctgatgaaaatggagaagattactatctttggacctataaaaaacttgaaataggttttaatggaaatcgaattgttgatgttaatctaactagtgaaggaaaggtgaaactggttccaaatactaaaatccagatttcatattcagtaaaatggaaaaagtcagatgtgaaatttgaagatcgatttgacaaatatcttgatccgtccttttttcaacatcggattcattggttttcaattttcaactccttcatgatggtgatcttcttggtgggcttagtttcaatgattttaatgagaacattaagaaaagattatgctcggtacagtaaagaggaagaaatggatgatatggatagagacctaggagatgaatatggatggaaacaggtgcatggagatgtatttagaccatcaagtcacccactgatattttcctctctgattggttctggatgtcagatatttgctgtgtctctcatcgttattattgttgcaatgatagaagatttatatactgagaggggatcaatgctcagtacagccatatttgtctatgctgctacgtctccagtgaatggttattttggaggaagtctgtatgctagacaaggaggaaggagatggataaagcagatgtttattggggcattccttatcccagctatggtgtgtggcactgccttcttcatcaatttcatagccatttattaccatgcttcaagagccattccttttggaacaatggtggccgtttgttgcatctgtttttttgttattcttcctctaaatcttgttggtacaatacttggccgaaatctgtcaggtcagcccaactttccttgtcgtgtcaatgctgtgcctcgtcctataccggagaaaaaatggttcatggagcctgcggttattgtttgcctgggtggaattttaccttttggttcaatctttattgaaatgtatttcatcttcacgtctttctgggcatataagatctattatgtctatggcttcatgatgctggtgctggttatcctgtgcattgtgactgtctgtgtgactattgtgtgcacatattttctactaaatgcagaagattaccggtggcaatggacaagttttctctctgctgcatcaactgcaatctatgtttacatgtattccttttactactattttttcaaaacaaagatgtatggcttatttcaaacatcattttactttggatatatggcggtatttagcacagccttggggataatgtgtggagcgattggttacatgggaacaagtgcctttgtccgaaaaatctatactaatgtgaaaattgactagagacccaagaaaacctggaactttggatcaatttctttttcataggggtggaacttgcacagcaaaaacaaacaaacgcaagaagagatttgggctttaacacactgggtactttgtgggtctctctttcgtcggtggcttaaagtaacatctatttccattgatcctaggttcttcctgactgctttctccaactgttcacagcaaatgcttggattttatgcagtaggcattactacagtacatggctaatcttcccaaaaactagctcattaaagatgaaatagaccagctctcttcagtgaagaggacaaatagtttatttaaagcatttgttccaataaaataaatagagggaaacttggatgctaaaattacatgaataggaatcttcctggcacttagtgtttctatgttattgaaaaatgatgttccagaaagattacttttttcctcttatttttactgccattgtcgacctattgtgggacatttttatatattgaatctgggttcttttttgacttttttttttcccaatccaacagcatccttttttttaaaagagagaattagaaaatattaaatcctgcatgtaatatatctgctgtcatcttagttggaccaacttcccatttatttatcttaaaactatacagttacatcttaattccatccaaagaagatacagtttgaagacagaagtgtactctctacaatgcaatttactgtacagttagaaagcaaagtgttaaatggagaagatacttgtttttattaaacattttgagatttagataaactacattttaactgaatgtctaaagtgattatcttttttccccccaagttagtcttaaatcttttgggtttgaatgaaggttttacataagaaattattaaaaacaaggggggtgggtaataaatgtatataacattaaataatgtaacgtaggtgtagattcccaaatgcatttggatgtacagatcgactacagagtacttttttcttatgatgattggtgtagaaatgtgtgatttgggtgggcttttacatcttgcctaccattgcatgaaacattggggtttcttcaaaatgtgtgtgtcatacttcttttgggaggggggttgttttcttctgtttattttctgagactcctacaggagccaaatttgtaatttagagacacttaattttgttaatcctgtctgggacacttaagtaacatctaaagcattattgctttagaatgttcaaataaaatttcctgaccaaattgttttgtggaaatagatgtgtttgcaatttgaagatatctttctgtccagaaggcaaaattaccgaatgccatttttaaaagtatgctataaactatgctactctcatacaggggacccgtattttaaaatctccagacttgcttacatctagattatccagcacaatcataaagtgaatgacaaaccctttgaatgaaattgtggcacaaaatctgttcaggttggtgtaccgtgtaaagtggggatggggtaaaagtggttaacgtactgttggatcaacaaataaaggttacagttttgtaagagaaaaaaaaaaaaaaaaaa

SEQ ID NO: 968 - protein, 589 aa, Homo sapiens
MRPLPGALGVAAAAALWLLLLLLPRTRADEHEHTYQDKEEVVLWMNTVGPYHNRQETYKYFSLPFCVGSKKSISHYHETLGEALQGVELEFSGLDIKFKDDVMPATYCEIDLDKEKRDAFVYAIKNHYWYQMYIDDLPIWGIVGEADENGEDYYLWTYKKLEIGFNGNRIVDVNLTSEGKVKLVPNTKIQISYSVKWKKSDVKFEDRFDKYLDPSFFQHRIHWFSIFNSFMMVIFLVGLVSMILMRTLRKDYARYSKEEEMDDMDRDLGDEYGWKQVHGDVFRPSSHPLIFSSLIGSGCQIFAVSLIVIIVAMIEDLYTERGSMLSTAIFVYAATSPVNGYFGGSLYARQGGRRWIKQMFIGAFLIPAMVCGTAFFINFIAIYYHASRAIPFGTMVAVCCICFFVILPLNLVGTILGRNLSGQPNFPCRVNAVPRPIPEKKWFMEPAVIVCLGGILPFGSIFIEMYFIFTSFWAYKIYYVYGFMMLVLVILCIVTVCVTIVCTYFLLNAEDYRWQWTSFLSAASTAIYVYMYSFYYYFFKTKMYGLFQTSFYFGYMAVFSTALGIMCGAIGYMGTSAFVRKIYTNVKID

SEQ ID NO: 969 - DNA, 4817 bp, Homo sapiens
gaagcgccagagcggcggccggtcccgcgcggagcccggcgcccctccagcccgagccaggacgccgccggccccggtcccggccccgggcacgcagcgagccagggatgtgagcggcgccccgcggcatggcagcctcaggggtgcccagaggatgcgacatcctcatcgtctacagcccggatgccgaggaatggtgccagtacctgcagaccctgttcctgtccagtcggcaggtccgcagccagaagatactgactcacaggctgggccccgaggcctccttctcggcagaggacctaagccttttcctcagcacccgctgtgtcgtggtgctgctgtccgcggagctggtgcagcacttccacaagcccgccttgctgcccctgctgcagagagctttccatcctccgcaccgcgtggtcaggctgctctgcggcgtgcgggacagcgaggagttcctagacttctttccagattgggcccattggcaggagctcacctgtgacgatgagccagagacctacgtggcagctgtgaaaaaagccatttccgaagattctggctgtgactcagtcactgacactgagcctgaggacgagaaggttgtttcctactcgaagcagcagaacctgccgacggtgacttcacctgggaacctgatggtggtgcagccggaccgcattcgctgtggggcagaaaccactgtctatgttattgtgagatgtaagctggatgacagggtggcgacagaagcagagttttctcctgaggattctccctctgtaaggatggaagccaaggtggagaatgagtacaccatttcagtgaaggctcccaacctttcatctgggaacgtttctctgaagatatattctggagacttagtggtgtgtgaaaccgttatcagctattatactgacatggaagaaattgggaatttattgtccaatgccgcgaatcctgtggaattcatgtgtcaggcctttaaaattgtgccctacaacacagagacccttgataaactgctaaccgaatccctgaagaacaatatccctgcaagcggactgcacctctttggaatcaaccagctggaagaagaagatatgatgacaaatcagagggatgaagagctgcccaccctgttgcattttgctgcgaagtatggactgaagaacctcactgccttgttgctcacctgcccaggagccctgcaggcgtacagcgtggccaacaagcatggccactaccccaacaccatcgctgagaaacacggcttcagggacctgcggcagttcatcgacgagtatgtggaaacggtggacatgctcaagagtcacattaaagaggaactgatgcacggggaggaggctgatgctgtgtacgagtccatggcccacctttccacagacctgcttatgaaatgctcgctcaaccccggctgtgacgaggatctctatgagtccatggctgcctttgtcccagctgccactgaagacctctatgttgaaatgcttcaggccagtacatctaacccaatccctggagatggtttctctcgggccactaaggactctatgatccgcaagtttttagaaggcaacagcatgggaatgaccaatctggagagagatcagtgccatcttggtcaggaagaagatgtttatcacacggtggatgacgatgaggccttttctgtggacctggccagcaggccccctgtcccagtgcccagaccagagaccactgctcctggtgctcaccagctgcctgacaacgaaccatacatttttaaagtttttgcagaaaaaagtcaagagcggcctgggaatttctacgtttcctcagagagcatcaggaaagggccgcccgtcagaccatggagggacaggccccagtcgagtatatatgacccttttgcgggaatgaaaacgccaggccagcggcagcttatcaccctccaggagcaggtgaagctgggcattgtcaacgtggatgaggctgtgctccacttcaaagagtggcagctcaaccagaagaaacgatcggagtcctttcgtttccagcaggaaaatcttaaacggctaagagacagcatcacccgaagacagagagagaagcaaaaatcaggaaagcagacagacttggagatcacggtcccaattcggcactcacagcacctgcctgcaaaagtggagtttggagtctatgagagtggccccaggaaaagtgtcattccccctaggacggagctgagacgaggagactggaaaacagacagcacctccagcacagcaagtagcacaagtaaccgctccagcacccggagcctcctcagtgtgagcagcgggatggaaggggacaacgaggataatgaagtccctgaggttaccagaagtcgcagtccaggccccccacaagtggatgggacacccaccatgtccctcgagagaccccccagggtgcctccgagagctgcctcacagaggcctccgaccagggagaccttccatcctcctccacctgttccacccagaggacgctgattccacctcctaaaacctgcctacttcaggactttaagactcacagtcttcagcctgttaatgatgtcttcatgttgagttttatagcatgactgttgaccttaagatccattctcattgctgataatgctgcagccctgctggtttgggcttgcctcgaagattttattaaggcacgaagaagtgaaaaactaagggcttcattcaccatcaccaagtatatcgaaccatatacttgtttgccaaaaggatgaagacttaatcgaaatacttacctctaatttgccatatcagaagcctaaaaagaatgatcataaatgtacttcaccagtgattttactgaaatgcacttatattagtctttatgtatttgctagttcagcctgatttctagaagaggttatagtgtgagacttgtagtattcaagtaagataagtgacctaattttaaaataattcttctacttttctgtatattcagcagggtatttaagtgctagggctggtcacacacaaccaactgaaaaagactagagggattagtacaaactcctcttatacagaaggcaaatctgaggttccacagaagtctggaaccaagactattcagttggttaaataaagaggttagtctagactgggcctgctcattctaggtcaccacattttccatctccaaatagccaggccctctctccctcaagaaatgcccagatgtagaaattcatcagtgcctattggtcttccagaattttccatcttccgtatctcccaggcatgagactaccaagtttgtttgttttctttccaatttgggaatttatacttcagtatggtttcaacgcagttatgtttccagagaacatctagaagtggctggaaaccagaagctggggattccagggaccccacttagtgctctatttcctttataggttttatttctggtcatagagagagaaggacctttgactttttcttcgttgaggcttctgaggaggaaaaacaaacctaaaatagaaatacagtcagcctttcaaatccatgggttctgtgtccgtggattcaaccaaccttggatcaaaaatatttgaaaaaaaatctacaaagtttcaaaaagcaaaacttgaatttgctgcatgccaagaagtatgttgaattcatgtaaatgaagtgatgtgtaggcattgtattagatattataagaaatctagaaatgatttaaagcatacaggaggatgtgcataggttatatgcaaatactatgctattttatatatgggacttgagcatttgtggattttgatactgggggatcctggaaccaatcccccatggataccaaagtacgactgtagttatctattttttacatacttattattaccaccatgctcagtaagtccatttttgcatggaatatggagccttaaaacatgtcatgaatttggagtccctggcacataaatctaccttcaaatcagaggtccttaatgatgcctaaacatacagtaaaattagaatcagaaatacttctttaaaaaatattcaaaatgtgtttgtttcccatgggattattctctatcccacacgaatgtaaaaaaatccacattaatgatccatttaagtatagttttattgggtccttttctaatgattaaaggttctttctcaatttcattcctcagtcctgcaagtaaggactcatactgaagagtactgaaacaaggacttcttgtcagaaacagcttctggaatcttgggttttgtttttgttttttgacaaaatacactattggccatgtccatcacgagagtgtttgtagtaattaattaccttgtacaggacctggcacttagtagcattcttcaaatgttccctcagtgatccttttactctccttgtcacttatttgggagaaataggggcacgtgagataagaagaagaataattttgatgttggtatgcttgccctgttacttatagacagtctttgtcataggcaaacttgaatttgatttaaaatagggctgggaaaaatattcaataactgtaagcccccttttggatgccaaacttagaattttgtacattctctgatgaacaagcatttagatcgtaacatggtaaagcctattaccagccaatgttgttagcatctttgtatgcacatcactgtttgtgcaatatatgaatattttgttgcattgtattcttatataaaaataagtagaaaacataaaattgaaattgctgatgagaaaaaaaa

SEQ ID NO: 970 - protein, 805 aa, Homo sapiens
MAASGVPRGCDILIVYSPDAEEWCQYLQTLFLSSRQVRSQKILTHRLGPEASFSAEDLSLFLSTRCVVVLLSAELVQHFHKPALLPLLQRAFHPPHRVVRLLCGVRDSEEFLDFFPDWAHWQELTCDDEPETYVAAVKKAISEDSGCDSVTDTEPEDEKVVSYSKQQNLPTVTSPGNLMVVQPDRIRCGAETTVYVIVRCKLDDRVATEAEFSPEDSPSVRMEAKVENEYTISVKAPNLSSGNVSLKIYSGDLVVCETVISYYTDMEEIGNLLSNAANPVEFMCQAFKIVPYNTETLDKLLTESLKNNIPASGLHLFGINQLEEEDMMTNQRDEELPTLLHFAAKYGLKNLTALLLTCPGALQAYSVANKHGHYPNTIAEKHGFRDLRQFIDEYVETVDMLKSHIKEELMHGEEADAVYESMAHLSTDLLMKCSLNPGCDEDLYESMAAFVPAATEDLYVEMLQASTSNPIPGDGFSRATKDSMIRKFLEGNSMGMTNLERDQCHLGQEEDVYHTVDDDEAFSVDLASRPPVPVPRPETTAPGAHQLPDNEPYIFKVFAEKSQERPGNFYVSSESIRKGPPVRPWRDRPQSSIYDPFAGMKTPGQRQLITLQEQVKLGIVNVDEAVLHFKEWQLNQKKRSESFRFQQENLKRLRDSITRRQREKQKSGKQTDLEITVPIRHSQHLPAKVEFGVYESGPRKSVIPPRTELRRGDWKTDSTSSTASSTSNRSSTRSLLSVSSGMEGDNEDNEVPEVTRSRSPGPPQVDGTPTMSLERPPRVPPRAASQRPPTRETFHPPPPVPPRGR

SEQ ID NO: 971 - DNA, 1613 bp, Homo sapiens
gaggagcagggccgggcgccatggcaccgtggggcaagcggctggctggcgtgcgcggggtgctgcttgacatctcgggcgtgctgtacgacagcggcgcgggcggcggcacggccatcgccggctcggtggaggcggtggccagactgaagcgttcccggctgaaggtgaggttctgcaccaacgagtcgcagaagtcccgggcagagctggtggggcagcttcagaggctgggatttgacatctctgagcaggaggtgaccgccccggcaccagctgcctgccagatcctgaaggagcgaggcctgcgaccatacctgctcatccatgacggagtccgctcagaatttgatcagatcgacacatccaacccaaactgtgtggtaattgcagacgcaggagaaagcttttcttatcaaaacatgaataacgccttccaggtgctcatggagctggaaaaacctgtgctcatatcactgggaagagggcgttactacaaggagacctctggcctgatgctggacgttggtccctacatgaaggcgcttgagtatgcctgtggcatcaaagccgaggtggtggggaagccttctcctgagtttttcaagtctgccctgcaagcgataggagtggaagcccaccaggccgtcatgattggggacgatatcgtgggcgacgtcggcggtgcccagcggtgtggaatgagagcgctgcaggtgcgcaccgggaagttcaggcccagtgacgagcaccatccggaagtgaaggctgatgggtacgtggacaacctcgcagaggcagtggacctgctgctgcagcacgccgacaagtgatggcctcctgggagagccccgcctcctccacccctgcctctcctccacccctgcctcccctccacccctgcctctcctccacccgcccaggagagccccacctcctccacccctgcctctcctccacccctgcctcccctccacctgccccagtgcccagaccaaccaaggccctgacagccctgccttctgccctctgccctgcatgggcaggcatttgttccctacctgggtggcctgctcccctgcctgggccctgacttcagctccctgtagtgaagtccaggagggtgggacaggcctgtcaggcctctgggaatctcccaaatcccagaactcaccactcaccatgggcctttaaatgcagtaaactccacctaaccagattcaggggcactatgcccactgcctcctcttcagactctttgcatttcagtgaagagcctggaagaaacccaggggcctcctatgcacagatcttgcagcccagaaccaagtcagcctccctgcgactgcccaggcacactgcccaccaccccacccccgaaacaatgccagcccgctgctttttctatcctcccagtcacctttgcagacaaagaccaggggcagctcccgagggcactgtgaaggctcccatgccacacagtgagaactgtagcctctgcgtccaaggcacacagggtactttctggacccactgctggacagacttgaaggtgtcatgcccggtgtgtgcaggaggaaactaacagttcagtaaactctgccttgaccagc

SEQ ID NO: 972 - protein, 270 aa, Homo sapiens
MAPWGKRLAGVRGVLLDISGVLYDSGAGGGTAIAGSVEAVARLKRSRLKVRFCTNESQKSRAELVGQLQRLGFDISEQEVTAPAPAACQILKERGLRPYLLIHDGVRSEFDQIDTSNPNCVVIADAGESFSYQNMNNAFQVLMELEKPVLISLGRGRYYKETSGLMLDVGPYMKALEYACGIKAEVVGKPSPEFFKSALQAIGVEAHQAVMIGDDIVGDVGGAQRCGMRALQVRTGKFRPSDEHHPEVKADGYVDNLAEAVDLLLQHADK

SEQ ID NO: 973 - DNA, 3409 bp, Homo sapiens
gccttccgcaaactcctgacctgtgggtccatccgttcaacggccaaaggctggcggaggagggatcccctgcctttctcggaacggaacggagcagagtcgtgcgtggttgagtttagataaaagccgagtgagcgcgctctgttccttaagattagtttaaggtgccttggattgctctgaagagctttgaccacctgatattgcttacatctggaacttcttggcttctcattccccagatgtgcgggtcagagaggattctacaggcaggaaacatcttagaaatcagggttgggcaggcaggagccaggagagtagctacaatgacttcaccagtactggtggacatacgagaagaggtgacctgccctatctgcctggagctcctaacagaacccctgagcatagactgtggccacagcttctgccaagcctgcatcacaccaaatggcagggaatcagtgattggtcaagaaggggaaagaagctgccctgtgtgccagaccagctaccagccagggaacctgcggcctaatcggcatctggccaacatagtgaggcggctcagagaggtagtgttgggccctgggaagcagctgaaagcagttctttgtgcagaccatggagaaaaactgcagctcttctgtcaggaggatgggaaggtcatttgctggctttgtgagcggtctcaggagcaccgtggtcaccacacgttcctcgtggaggaggttgcccaggagtaccaggagaagtttcaggagtctctaaagaagctgaagaacgaggagcaggaagctgagaagctaacagcttttatcagagagaagaagacatcctggaagaatcagatggagcctgagagatgcaggatccagacagagtttaatcagctgcgaaatatcctagacagagtggagcaacgggagctgaaaaagctggaacaggaagagaagaaggggctacgaattatagaagaggctgagaatgatctggtccaccagacccagtcgctgcgagagctcatctcggatctggagcgtcgatgtcaggggtcaacaatggagctgctgcaggatgtgagtgatgtcacagaaaggagtgagttctggaccctgaggaagccagaagctctccctacaaagctgagaagtatgttccgagccccagatctgaaaaggatgctgcgagtgtgtagagagctgacagatgtccaaagctactgggttgacgtgaccctgaatccacacacagctaatttaaatcttgtcctggctaaaaaccggagacaagtgaggtttgtgggagctaaagtatctggaccttcctgtctggaaaagcattatgactgtagtgtcctgggctcccagcacttctcctctggtaagcattactgggaggtagatgtggccaagaagactgcctggatcctgggggtatgcagcaattcactgggacctacattctctttcaaccattttgctcaaaatcacagtgcttactccaggtatcagcctcagagtggatactgggtgattgggttacagcataaccatgaatatagggcctatgaggattcttccccttccctgcttctctccatgacagtgccccctcgccgtgttggggttttcttagattatgaggctggtactgtctccttttataatgtcacaaaccatggcttccccatctacactttctctaaatattactttcccactactctttgtccatattttaatccttgcaactgtgtaattcctatgaccctgcgtcgtccaagctcttgaatattcttctgttcccacccacttctgataagtaccctgaggcttatcagcatgtgattctcccttctgatcttctgtttttctgtgttctcaattcttttgttgttttttggtttttgaatcttttttgagatggaatctcgctctgtcgcccaggctggagtgcactggcgcaatctcggctcactgcaacctctgcctcctgggttcaagcgaacctcctgcctcagcatcccaagtagctgggattacaggcacccaccaccatgcccaactaatttttgtatttttatagagatagggtttcaccgtgttggccaggctgatctcgaactcctgaccgcaagtgatccacccgcctcggtctcccaaagtgctgggattacagatgtgagccgccgcgcccagacagttctttcgttttaaacagttactcagtactaggatgcacccagtggtgagagtaagcatctttgactgatgacaggtcttgaggtggatagggggcgctttcagtattttgccattaagcatagtatttgatgcaggttttttttgattgatgcaggggatcaaatttaggaagttctgatctgttaatttactacaagtttttgtataaaatgaaaactcgtattctacctatgtcttttctgtaaattattgagacaattgtgtatcatttttgttctgttaatgtggcttagtacattgatttacttcaatttgttaccacaacttgctgaaatacaccattattatttgttgtatgcaatactggatttattttgataacgtattgtttagattttgttctcatctatgttaatgaaagaaattggcctgtatttttacattcttgtaatatctttgccaggttctataaaatgcaataataagcaaataaattactttgtttttgtataagtatgtataggattgagctctaaaaccaaaccattataatgataatttgggtagcttcaaactcaaattgaagagagtcttcactacaatcttcactacaacctttggccttcctctctacatttaagagtagcaatagaacaataaaaaaaaatacgtctttcaaattaattgcagtaaaaacaaaagagtagtggggagagaaaaacaatccaatacatatttttctctcagaatagaaagaaaacacaaagagaaaatatgaacaatataaagcacttaaaggaagaggatgatttcttccagcttttccacactctctttatgcgcaggaacaaacagctgttgagtgagctgctatgactttggtagagaggtgcaatatgttttttgaaccagctataaaagaaattaagaggtacatgtgagggtagaaacaaatatcaaggatgagaatggcactggctgtcccatatggtatccaggagccaccaatgtctgttgagtacttcatacatgcctagtctgaattgagatgtgctcaatgtataaaatatataccagatttcaaatacctacttcaaaaaataatgtaaaatatctcactaataacttttcctttgtgtattgcaatgataatatgttggctctattggattaaataaagtatgttattcattttacctgtt

SEQ ID NO: 974 - protein, 516 aa, Homo sapiens
MCGSERILQAGNILEIRVGQAGARRVATMTSPVLVDIREEVTCPICLELLTEPLSIDCGHSFCQACITPNGRESVIGQEGERSCPVCQTSYQPGNLRPNRHLANIVRRLREVVLGPGKQLKAVLCADHGEKLQLFCQEDGKVICWLCERSQEHRGHHTFLVEEVAQEYQEKFQESLKKLKNEEQEAEKLTAFIREKKTSWKNQMEPERCRIQTEFNQLRNILDRVEQRELKKLEQEEKKGLRIIEEAENDLVHQTQSLRELISDLERRCQGSTMELLQDVSDVTERSEFWTLRKPEALPTKLRSMFRAPDLKRMLRVCRELTDVQSYWVDVTLNPHTANLNLVLAKNRRQVRFVGAKVSGPSCLEKHYDCSVLGSQHFSSGKHYWEVDVAKKTAWILGVCSNSLGPTFSFNHFAQNHSAYSRYQPQSGYWVIGLQHNHEYRAYEDSSPSLLLSMTVPPRRVGVFLDYEAGTVSFYNVTNHGFPIYTFSKYYFPTTLCPYFNPCNCVIPMTLRRPSS

SEQ ID NO: 975 - DNA, 3215 bp, Homo sapiens
ttcggcctgggtggaggacgcggctgcttcaagtccttggctctgatccaggccacagattccaggattctacaggcaggaaacatcttagaaatcagggttgggcaggcaggagccaggagagtagctacaatgacttcaccagtactggtggacatacgagaagaggtgacctgccctatctgcctggagctcctaacagaacccctgagcatagactgtggccacagcttctgccaagcctgcatcacaccaaatggcagggaatcagtgattggtcaagaaggggaaagaagctgccctgtgtgccagaccagctaccagccagggaacctgcggcctaatcggcatctggccaacatagtgaggcggctcagagaggtagtgttgggccctgggaagcagctgaaagcagttctttgtgcagaccatggagaaaaactgcagctcttctgtcaggaggatgggaaggtcatttgctggctttgtgagcggtctcaggagcaccgtggtcaccacacgttcctcgtggaggaggttgcccaggagtaccaggagaagtttcaggagtctctaaagaagctgaagaacgaggagcaggaagctgagaagctaacagcttttatcagagagaagaagacatcctggaagaatcagatggagcctgagagatgcaggatccagacagagtttaatcagctgcgaaatatcctagacagagtggagcaacgggagctgaaaaagctggaacaggaagagaagaaggggctacgaattatagaagaggctgagaatgatctggtccaccagacccagtcgctgcgagagctcatctcggatctggagcgtcgatgtcaggggtcaacaatggagctgctgcaggatgtgagtgatgtcacagaaaggagtgagttctggaccctgaggaagccagaagctctccctacaaagctgagaagtatgttccgagccccagatctgaaaaggatgctgcgagtgtgtagagagctgacagatgtccaaagctactgggttgacgtgaccctgaatccacacacagctaatttaaatcttgtcctggctaaaaaccggagacaagtgaggtttgtgggagctaaagtatctggaccttcctgtctggaaaagcattatgactgtagtgtcctgggctcccagcacttctcctctggtaagcattactgggaggtagatgtggccaagaagactgcctggatcctgggggtatgcagcaattcactgggacctacattctctttcaaccattttgctcaaaatcacagtgcttactccaggtatcagcctcagagtggatactgggtgattgggttacagcataaccatgaatatagggcctatgaggattcttccccttccctgcttctctccatgacagtgccccctcgccgtgttggggttttcttagattatgaggctggtactgtctccttttataatgtcacaaaccatggcttccccatctacactttctctaaatattactttcccactactctttgtccatattttaatccttgcaactgtgtaattcctatgaccctgcgtcgtccaagctcttgaatattcttctgttcccacccacttctgataagtaccctgaggcttatcagcatgtgattctcccttctgatcttctgtttttctgtgttctcaattcttttgttgttttttggtttttgaatcttttttgagatggaatctcgctctgtcgcccaggctggagtgcactggcgcaatctcggctcactgcaacctctgcctcctgggttcaagcgaacctcctgcctcagcatcccaagtagctgggattacaggcacccaccaccatgcccaactaatttttgtatttttatagagatagggtttcaccgtgttggccaggctgatctcgaactcctgaccgcaagtgatccacccgcctcggtctcccaaagtgctgggattacagatgtgagccgccgcgcccagacagttctttcgttttaaacagttactcagtactaggatgcacccagtggtgagagtaagcatctttgactgatgacaggtcttgaggtggatagggggcgctttcagtattttgccattaagcatagtatttgatgcaggttttttttgattgatgcaggggatcaaatttaggaagttctgatctgttaatttactacaagtttttgtataaaatgaaaactcgtattctacctatgtcttttctgtaaattattgagacaattgtgtatcatttttgttctgttaatgtggcttagtacattgatttacttcaatttgttaccacaacttgctgaaatacaccattattatttgttgtatgcaatactggatttattttgataacgtattgtttagattttgttctcatctatgttaatgaaagaaattggcctgtatttttacattcttgtaatatctttgccaggttctataaaatgcaataataagcaaataaattactttgtttttgtataagtatgtataggattgagctctaaaaccaaaccattataatgataatttgggtagcttcaaactcaaattgaagagagtcttcactacaatcttcactacaacctttggccttcctctctacatttaagagtagcaatagaacaataaaaaaaaatacgtctttcaaattaattgcagtaaaaacaaaagagtagtggggagagaaaaacaatccaatacatatttttctctcagaatagaaagaaaacacaaagagaaaatatgaacaatataaagcacttaaaggaagaggatgatttcttccagcttttccacactctctttatgcgcaggaacaaacagctgttgagtgagctgctatgactttggtagagaggtgcaatatgttttttgaaccagctataaaagaaattaagaggtacatgtgagggtagaaacaaatatcaaggatgagaatggcactggctgtcccatatggtatccaggagccaccaatgtctgttgagtacttcatacatgcctagtctgaattgagatgtgctcaatgtataaaatatataccagatttcaaatacctacttcaaaaaataatgtaaaatatctcactaataacttttcctttgtgtattgcaatgataatatgttggctctattggattaaataaagtatgttattcattttacctgtt

SEQ ID NO: 976 - protein, 488 aa, Homo sapiens
MTSPVLVDIREEVTCPICLELLTEPLSIDCGHSFCQACITPNGRESVIGQEGERSCPVCQTSYQPGNLRPNRHLANIVRRLREVVLGPGKQLKAVLCADHGEKLQLFCQEDGKVICWLCERSQEHRGHHTFLVEEVAQEYQEKFQESLKKLKNEEQEAEKLTAFIREKKTSWKNQMEPERCRIQTEFNQLRNILDRVEQRELKKLEQEEKKGLRIIEEAENDLVHQTQSLRELISDLERRCQGSTMELLQDVSDVTERSEFWTLRKPEALPTKLRSMFRAPDLKRMLRVCRELTDVQSYWVDVTLNPHTANLNLVLAKNRRQVRFVGAKVSGPSCLEKHYDCSVLGSQHFSSGKHYWEVDVAKKTAWILGVCSNSLGPTFSFNHFAQNHSAYSRYQPQSGYWVIGLQHNHEYRAYEDSSPSLLLSMTVPPRRVGVFLDYEAGTVSFYNVTNHGFPIYTFSKYYFPTTLCPYFNPCNCVIPMTLRRPSS

SEQ ID NO: 977 - DNA, 3490 bp, Homo sapiens
gccttccgcaaactcctgacctgtgggtccatccgttcaacggccaaaggctggcggaggagggatcccctgcctttctcggaacggaacggagcagagtcgtgcgtggttgagtttagataaaagccgagtgagcgcgctctgttccttaagattagtttaaggtgccttggattgctctgaagagctttgaccacctgatattgcttacatctggaacttcttggcttctcattccccagatgtgcgggtcagagaggattctacaggcaggaaacatcttagaaatcagggttgggcaggcaggagccaggagagtagctacaatgacttcaccagtactggtggacatacgagaagaggtgacctgccctatctgcctggagctcctaacagaacccctgagcatagactgtggccacagcttctgccaagcctgcatcacaccaaatggcagggaatcagtgattggtcaagaaggggaaagaagctgccctgtgtgccagaccagctaccagccagggaacctgcggcctaatcggcatctggccaacatagtgaggcggctcagagaggtagtgttgggccctgggaagcagctgaaagcagttctttgtgcagaccatggagaaaaactgcagctcttctgtcaggaggatgggaaggtcatttgctggctttgtgagcggtctcaggagcaccgtggtcaccacacgttcctcgtggaggaggttgcccaggagtaccaggagaagtttcaggagtctctaaagaagctgaagaacgaggagcaggaagctgagaagctaacagcttttatcagagagaagaagacatcctggaagaatcagatggagcctgagagatgcaggatccagacagagtttaatcagctgcgaaatatcctagacagagtggagcaacgggagctgaaaaagctggaacaggaagagaagaaggggctacgaattatagaagaggctgagaatgatctggtccaccagacccagtcgctgcgagagctcatctcggatctggagcgtcgatgtcaggggtcaacaatggagctgctgcaggatgtgagtgatgtcacagaaaggagtgagttctggaccctgaggaagccagaagctctccctacaaagctgagaagtatgttccgagccccagatctgaaaaggatgctgcgagtgtgtagagagctgacagatgtccaaagctactgggccatccaggggtctttaaccagaagagagaggagagcctcaggagttaggaccagaagaagccagggaagcagtgcaatggcttcaaaaatcttgcttaacgtacaagaggaggtgacctgtcccatctgcctggagctgttgacagaacccttgagtctagactgtggccacagcctctgccgagcctgcatcactgtgagcaacaaggaggcagtgaccagcatgggaggaaaaagcagctgtcctgtgtgtggtatcagttactcatttgaacatctacaggctaatcagcatctggccaacatagtggagagactcaaggaggtcaagttgagcccagacaatgggaagaagagagatctctgtgatcatcatggagagaaactcctactcttctgtaaggaggataggaaagtcatttgctggctttgtgagcggtctcaggagcaccgtggtcaccacacagtcctcacggaggaagtattcaaggaatgtcaggagaaactccaggcagtcctcaagaggctgaagaaggaagaggaggaagctgagaagctggaagctgacatcagagaagagaaaacttcctggaagtatcaggtacaaactgagagacaaaggatacaaacagaatttgatcagcttagaagcatcctaaataatgaggagcagagagagctgcaaagattggaagaagaagaaaagaagacgctggataagtttgcagaggctgaggatgagctagttcagcagaagcagttggtgagagagctcatctcagatgtggagtgtcggagtcagtggtcaacaatggagctgctgcaggacatgagtggaatcatgaaatggagtgagatctggaggctgaaaaagccaaaaatggtttccaagaaactgaagactgtattccatgctccagatctgagtaggatgctgcaaatgtttagagaactgacagctgtccggtgctactgggtggatgtcacactgaattcagtcaacctaaatttgaatcttgtcctttcagaagatcagagacaagtgatatctgtgccaatttggccttttcagtgttataattatggtgtcttgggatcccaatatttctcctctgggaaacattactgggaagtggacgtgtccaagaaaactgcctggatcctgggggtatactgtagaacatattcccgccatatgaagtatgttgttagaagatgtgcaaatcgtcaaaatctttacaccaaatacagacctctatttggctactgggttatagggttacagaataaatgtaagtatggtgtctttgaagagtctttgtcctctgatcccgaggttttgactctctccatggctgtgcctccctgccgtgttggggttttcctcgactatgaagcaggcattgtctcatttttcaatgtcacaagccatggctccctcatttacaagttctctaaatgttgcttttctcagcctgtttatccatatttcaatccttggaactgtccagctcccatgactctatgcccaccaagctcttgaattttctcatttcttcacctacaaccctttgtctcgacttatctcctgcaactgactcatctgcaacattcacaccattgcttccttgtggtttcccttctttagaacttttactcatccttgagatgtatggtgtatttggcttgagttatgagagatgcttatttattcatttactctttttcatattttcagagaaagttacctaatccctcctaaagacacagcagtatgggtataacatccttgccttcccatttatccatgtttcactttatcactgatgtgaagaggcccaaagcctgttagccaccatccatgctacctaggtagtccataggaaccacccccatgaccaccaccaacatcaactaaaggttcttggagggtatgtcagtgtgttgctcaggataccccaggtacatcaaggaatcaaggagaggaaaatatgagcaatatgtgtattcagagtgaagattttatgtccagagtatttgagctcaaaccttgcctgttgttttctaatcatgatgaatactttctcagtttctttttcctgaaatataaattgggatttaagactgtacctaactattaagatcactgtgtaaaactaagtgtctctaaatgtaatgcatcgatttagtgtctggaacataataaatatttgctctcatgattgctaaaaaaaaaaaaaaaaaaaaaaaaaaaaaaaaaaa

SEQ ID NO: 978 - protein, 842 aa, Homo sapiens
MCGSERILQAGNILEIRVGQAGARRVATMTSPVLVDIREEVTCPICLELLTEPLSIDCGHSFCQACITPNGRESVIGQEGERSCPVCQTSYQPGNLRPNRHLANIVRRLREVVLGPGKQLKAVLCADHGEKLQLFCQEDGKVICWLCERSQEHRGHHTFLVEEVAQEYQEKFQESLKKLKNEEQEAEKLTAFIREKKTSWKNQMEPERCRIQTEFNQLRNILDRVEQRELKKLEQEEKKGLRIIEEAENDLVHQTQSLRELISDLERRCQGSTMELLQDVSDVTERSEFWTLRKPEALPTKLRSMFRAPDLKRMLRVCRELTDVQSYWAIQGSLTRRERRASGVRTRRSQGSSAMASKILLNVQEEVTCPICLELLTEPLSLDCGHSLCRACITVSNKEAVTSMGGKSSCPVCGISYSFEHLQANQHLANIVERLKEVKLSPDNGKKRDLCDHHGEKLLLFCKEDRKVICWLCERSQEHRGHHTVLTEEVFKECQEKLQAVLKRLKKEEEEAEKLEADIREEKTSWKYQVQTERQRIQTEFDQLRSILNNEEQRELQRLEEEEKKTLDKFAEAEDELVQQKQLVRELISDVECRSQWSTMELLQDMSGIMKWSEIWRLKKPKMVSKKLKTVFHAPDLSRMLQMFRELTAVRCYWVDVTLNSVNLNLNLVLSEDQRQVISVPIWPFQCYNYGVLGSQYFSSGKHYWEVDVSKKTAWILGVYCRTYSRHMKYVVRRCANRQNLYTKYRPLFGYWVIGLQNKCKYGVFEESLSSDPEVLTLSMAVPPCRVGVFLDYEAGIVSFFNVTSHGSLIYKFSKCCFSQPVYPYFNPWNCPAPMTLCPPSS

SEQ ID NO: 979 - DNA, 2326 bp, Homo sapiens
cccgcctcagcctcccaaagtgctgggattacaggtgtgagccactgcgcccgtcctgactcatgcaacttctgcttcagccatccaggggtctttaaccagaagagagaggagagcctcaggagttaggaccagaagaagccagggaagcagtgcaatggcttcaaaaatcttgcttaacgtacaagaggaggtgacctgtcccatctgcctggagctgttgacagaacccttgagtctagactgtggccacagcctctgccgagcctgcatcactgtgagcaacaaggaggcagtgaccagcatgggaggaaaaagcagctgtcctgtgtgtggtatcagttactcatttgaacatctacaggctaatcagcatctggccaacatagtggagagactcaaggaggtcaagttgagcccagacaatgggaagaagagagatctctgtgatcatcatggagagaaactcctactcttctgtaaggaggataggaaagtcatttgctggctttgtgagcggtctcaggagcaccgtggtcaccacacagtcctcacggaggaagtattcaaggaatgtcaggagaaactccaggcagtcctcaagaggctgaagaaggaagaggaggaagctgagaagctggaagctgacatcagagaagagaaaacttcctggaagtatcaggtacaaactgagagacaaaggatacaaacagaatttgatcagcttagaagcatcctaaataatgaggagcagagagagctgcaaagattggaagaagaagaaaagaagacgctggataagtttgcagaggctgaggatgagctagttcagcagaagcagttggtgagagagctcatctcagatgtggagtgtcggagtcagtggtcaacaatggagctgctgcaggacatgagtggaatcatgaaatggagtgagatctggaggctgaaaaagccaaaaatggtttccaagaaactgaagactgtattccatgctccagatctgagtaggatgctgcaaatgtttagagaactgacagctgtccggtgctactgggtggatgtcacactgaattcagtcaacctaaatttgaatcttgtcctttcagaagatcagagacaagtgatatctgtgccaatttggccttttcagtgttataattatggtgtcttgggatcccaatatttctcctctgggaaacattactgggaagtggacgtgtccaagaaaactgcctggatcctgggggtatactgtagaacatattcccgccatatgaagtatgttgttagaagatgtgcaaatcgtcaaaatctttacaccaaatacagacctctatttggctactgggttatagggttacagaataaatgtaagtatggtgtctttgaagagtctttgtcctctgatcccgaggttttgactctctccatggctgtgcctccctgccgtgttggggttttcctcgactatgaagcaggcattgtctcatttttcaatgtcacaagccatggctccctcatttacaagttctctaaatgttgcttttctcagcctgtttatccatatttcaatccttggaactgtccagctcccatgactctatgcccaccaagctcttgaattttctcatttcttcacctacaaccctttgtcttgacttatctcctgcaactgactcatctgcaacattcacaccattgcttccttgtggtttcccttctttagaacttttactcatccttgagatgtatggtgtatttggcttgagttatgagagatgcttatttattcatttactctttttcatattttcagagaaagttacctaatccctcctaaagacacagcagtatgggtataacatccttgccttcccatttatccatgtttcactttatcactgatatgaagaggcccaaagcctgttagccaccatccatgctacctaggtagtccataggaaccacccccatgaccaccaccaacatcaactaaaggttcttggagggtatgtcagtgtgttgctcaggataccccaggtacatcaaggaatcaaggagaggaaaatatgagcaatatgtgtattcagagtgaagattttatgtccagagtatttgagctcaaaccttgcctgttgttttctaatcatgatgaatactttctcagtttctttttcctgaaatataaattgggatttaagactgtacctaactattaagatcactgtgtaaaactaagtgtctctaaatgtaatgcatcgatttagtgtctggaacataataaatatttgctctcatgattgctaaaaaaaaaaaaaaaaaa

SEQ ID NO: 980 - protein, 488 aa, Homo sapiens
MASKILLNVQEEVTCPICLELLTEPLSLDCGHSLCRACITVSNKEAVTSMGGKSSCPVCGISYSFEHLQANQHLANIVERLKEVKLSPDNGKKRDLCDHHGEKLLLFCKEDRKVICWLCERSQEHRGHHTVLTEEVFKECQEKLQAVLKRLKKEEEEAEKLEADIREEKTSWKYQVQTERQRIQTEFDQLRSILNNEEQRELQRLEEEEKKTLDKFAEAEDELVQQKQLVRELISDVECRSQWSTMELLQDMSGIMKWSEIWRLKKPKMVSKKLKTVFHAPDLSRMLQMFRELTAVRCYWVDVTLNSVNLNLNLVLSEDQRQVISVPIWPFQCYNYGVLGSQYFSSGKHYWEVDVSKKTAWILGVYCRTYSRHMKYVVRRCANRQNLYTKYRPLFGYWVIGLQNKCKYGVFEESLSSDPEVLTLSMAVPPCRVGVFLDYEAGIVSFFNVTSHGSLIYKFSKCCFSQPVYPYFNPWNCPAPMTLCPPSS

SEQ ID NO: 981 - DNA, 2302 bp, Homo sapiens
accctggcttttcttcacctcttcaaccaggagccgagatttctgttgctctgaagccatccaggggtctttaaccagaagagagaggagagcctcaggagttaggaccagaagaagccagggaagcagtgcaatggcttcaaaaatcttgcttaacgtacaagaggaggtgacctgtcccatctgcctggagctgttgacagaacccttgagtctagactgtggccacagcctctgccgagcctgcatcactgtgagcaacaaggaggcagtgaccagcatgggaggaaaaagcagctgtcctgtgtgtggtatcagttactcatttgaacatctacaggctaatcagcatctggccaacatagtggagagactcaaggaggtcaagttgagcccagacaatgggaagaagagagatctctgtgatcatcatggagagaaactcctactcttctgtaaggaggataggaaagtcatttgctggctttgtgagcggtctcaggagcaccgtggtcaccacacagtcctcacggaggaagtattcaaggaatgtcaggagaaactccaggcagtcctcaagaggctgaagaaggaagaggaggaagctgagaagctggaagctgacatcagagaagagaaaacttcctggaagtatcaggtacaaactgagagacaaaggatacaaacagaatttgatcagcttagaagcatcctaaataatgaggagcagagagagctgcaaagattggaagaagaagaaaagaagacgctggataagtttgcagaggctgaggatgagctagttcagcagaagcagttggtgagagagctcatctcagatgtggagtgtcggagtcagtggtcaacaatggagctgctgcaggacatgagtggaatcatgaaatggagtgagatctggaggctgaaaaagccaaaaatggtttccaagaaactgaagactgtattccatgctccagatctgagtaggatgctgcaaatgtttagagaactgacagctgtccggtgctactgggtggatgtcacactgaattcagtcaacctaaatttgaatcttgtcctttcagaagatcagagacaagtgatatctgtgccaatttggccttttcagtgttataattatggtgtcttgggatcccaatatttctcctctgggaaacattactgggaagtggacgtgtccaagaaaactgcctggatcctgggggtatactgtagaacatattcccgccatatgaagtatgttgttagaagatgtgcaaatcgtcaaaatctttacaccaaatacagacctctatttggctactgggttatagggttacagaataaatgtaagtatggtgtctttgaagagtctttgtcctctgatcccgaggttttgactctctccatggctgtgcctccctgccgtgttggggttttcctcgactatgaagcaggcattgtctcatttttcaatgtcacaagccatggctccctcatttacaagttctctaaatgttgcttttctcagcctgtttatccatatttcaatccttggaactgtccagctcccatgactctatgcccaccaagctcttgaattttctcatttcttcacctacaaccctttgtcttgacttatctcctgcaactgactcatctgcaacattcacaccattgcttccttgtggtttcccttctttagaacttttactcatccttgagatgtatggtgtatttggcttgagttatgagagatgcttatttattcatttactctttttcatattttcagagaaagttacctaatccctcctaaagacacagcagtatgggtataacatccttgccttcccatttatccatgtttcactttatcactgatatgaagaggcccaaagcctgttagccaccatccatgctacctaggtagtccataggaaccacccccatgaccaccaccaacatcaactaaaggttcttggagggtatgtcagtgtgttgctcaggataccccaggtacatcaaggaatcaaggagaggaaaatatgagcaatatgtgtattcagagtgaagattttatgtccagagtatttgagctcaaaccttgcctgttgttttctaatcatgatgaatactttctcagtttctttttcctgaaatataaattgggatttaagactgtacctaactattaagatcactgtgtaaaactaagtgtctctaaatgtaatgcatcgatttagtgtctggaacataataaatatttgctctcatgattgctaaaaaaaaaaaaaaaaaa

SEQ ID NO: 982 - protein, 488 aa, Homo sapiens; identical to SEQ ID NO: 980

SEQ ID NO: 983 - DNA, 2222 bp, Homo sapiens
accctggcttttcttcacctcttcaaccaggagccgagatttctgttgctctgaagccatccaggggtctttaaccagaagagagaggagagcctcaggagttaggaccagaagaagccagggaagcagtgcaatggcttcaaaaatcttgcttaacgtacaagaggaggtgacctgtcccatctgcctggagctgttgacagaacccttgagtctagactgtggccacagcctctgccgagcctgcatcactgtgagcaacaaggaggcagtgaccagcatgggaggaaaaagcagctgtcctgtgtgtggtatcagttactcatttgaacatctacaggctaatcagcatctggccaacatagtggagagactcaaggaggtcaagttgagcccagacaatgggaagaagagagatctctgtgatcatcatggagagaaactcctactcttctgtaaggaggataggaaatattcaaggaatgtcaggagaaactccaggcagtcctcaagaggctgaagaaggaagaggaggaagctgagaagctggaagctgacatcagagaagagaaaacttcctggaagtatcaggtacaaactgagagacaaaggatacaaacagaatttgatcagcttagaagcatcctaaataatgaggagcagagagagctgcaaagattggaagaagaagaaaagaagacgctggataagtttgcagaggctgaggatgagctagttcagcagaagcagttggtgagagagctcatctcagatgtggagtgtcggagtcagtggtcaacaatggagctgctgcaggacatgagtggaatcatgaaatggagtgagatctggaggctgaaaaagccaaaaatggtttccaagaaactgaagactgtattccatgctccagatctgagtaggatgctgcaaatgtttagagaactgacagctgtccggtgctactgggtggatgtcacactgaattcagtcaacctaaatttgaatcttgtcctttcagaagatcagagacaagtgatatctgtgccaatttggccttttcagtgttataattatggtgtcttgggatcccaatatttctcctctgggaaacattactgggaagtggacgtgtccaagaaaactgcctggatcctgggggtatactgtagaacatattcccgccatatgaagtatgttgttagaagatgtgcaaatcgtcaaaatctttacaccaaatacagacctctatttggctactgggttatagggttacagaataaatgtaagtatggtgtctttgaagagtctttgtcctctgatcccgaggttttgactctctccatggctgtgcctccctgccgtgttggggttttcctcgactatgaagcaggcattgtctcatttttcaatgtcacaagccatggctccctcatttacaagttctctaaatgttgcttttctcagcctgtttatccatatttcaatccttggaactgtccagctcccatgactctatgcccaccaagctcttgaattttctcatttcttcacctacaaccctttgtcttgacttatctcctgcaactgactcatctgcaacattcacaccattgcttccttgtggtttcccttctttagaacttttactcatccttgagatgtatggtgtatttggcttgagttatgagagatgcttatttattcatttactctttttcatattttcagagaaagttacctaatccctcctaaagacacagcagtatgggtataacatccttgccttcccatttatccatgtttcactttatcactgatatgaagaggcccaaagcctgttagccaccatccatgctacctaggtagtccataggaaccacccccatgaccaccaccaacatcaactaaaggttcttggagggtatgtcagtgtgttgctcaggataccccaggtacatcaaggaatcaaggagaggaaaatatgagcaatatgtgtattcagagtgaagattttatgtccagagtatttgagctcaaaccttgcctgttgttttctaatcatgatgaatactttctcagtttctttttcctgaaatataaattgggatttaagactgtacctaactattaagatcactgtgtaaaactaagtgtctctaaatgtaatgcatcgatttagtgtctggaacataataaatatttgctctcatgattgctaaaaa

SEQ ID NO: 984 - protein, 243 aa, Homo sapiens
MELLQDMSGIMKWSEIWRLKKPKMVSKKLKTVFHAPDLSRMLQMFRELTAVRCYWVDVTLNSVNLNLNLVLSEDQRQVISVPIWPFQCYNYGVLGSQYFSSGKHYWEVDVSKKTAWILGVYCRTYSRHMKYVVRRCANRQNLYTKYRPLFGYWVIGLQNKCKYGVFEESLSSDPEVLTLSMAVPPCRVGVFLDYEAGIVSFFNVTSHGSLIYKFSKCCFSQPVYPYFNPWNCPAPMTLCPPSS

SEQ ID NO: 985 - DNA, 959 bp, Homo sapiens
ccatccaggggtctttaaccagaagagagaggagagcctcaggagttaggaccagaagaagccagggaagcagtgcaatggcttcaaaaatcttgcttaacgtacaagaggaggtgacctgtcccatctgcctggagctgttgacagaacccttgagtctagactgtggccacagcctctgccgagcctgcatcactgtgagcaacaaggaggcagtgaccagcatgggaggaaaaagcagctgtcctgtgtgtggtatcagttactcatttgaacatctacaggctaatcagcatctggccaacatagtggagagactcaaggaggtcaagttgagcccagacaatgggaagaagagagatctctgtgatcatcatggagagaaactcctactcttctgtaaggaggataggaaagtcatttgctggctttgtgagcggtctcaggagcaccgtggtcaccacacagtcctcacggaggaagtattcaaggaatgtcaggagaaactccaggcagtcctcaagaggctgaagaaggaagaggaggaagctgagaagctggaagctgacatcagagaagagaaaacttcctggaagtatcaggtacaaactgagagacaaaggatacaaacagaatttgatcagcttagaagcatcctaaataatgaggagcagagagagctgcaaagattggaagaagaagaaaagaagacgctggataagtttgcagaggctgaggatgagctagttcagcagaagcagttggtgagagagctcatctcagatgtggagtgtcggagtcagtggtcaacaatggagctgctgcaggacatgagtggaatcatgaaatggtgcgtatgggtggccaggagtggtgcttgtgagttataaagaagtgtttgtagctattagagttatttggtggtcaattggaataaaaaatctcccagagtagtaaaa

SEQ ID NO: 986 - protein, 270 aa, Homo sapiens
MASKILLNVQEEVTCPICLELLTEPLSLDCGHSLCRACITVSNKEAVTSMGGKSSCPVCGISYSFEHLQANQHLANIVERLKEVKLSPDNGKKRDLCDHHGEKLLLFCKEDRKVICWLCERSQEHRGHHTVLTEEVFKECQEKLQAVLKRLKKEEEEAEKLEADIREEKTSWKYQVQTERQRIQTEFDQLRSILNNEEQRELQRLEEEEKKTLDKFAEAEDELVQQKQLVRELISDVECRSQWSTMELLQDMSGIMKWCVWVARSGACEL

SEQ ID NO: 987 - DNA, 960 bp, Homo sapiens
atggatacctccaccagtgttacctatgactccagcctccagatttcccagttcatcctgatgggattaccaggcattcatgagtggcagcactggctctccctgcccctgactctgctctacctcttagctcttggtgccaacctcctcatcataatcaccattcaacatgagaccgtgctacatgaacccatgtaccatttgctgggcatattagcagtggtggacattggcctggccaccaccatcatgcccaagatcctggccatcttctggtttgatgccaaggccattagcctccccatgtgttttgctcagatctatgccatccactgcttcttctgcatagagtcaggcatctttctctgcatggcagtagacagatacatagccatctgtcgccctcttcagtacccctccatagtcactaaagcttttgtcttcaaagccacagggttcatcatgctcaggaatggcctgttgaccatcccagtgcctatactggctgcccagagacactactgttccaggaatgaaatcgagcactgcctctgctctaacttgggggttatcagcctggcttgtgatgacatcactgtgaacaaattttaccaactgatgctagcatgggtcttggttgggagtgatatggctctggtattttcttcctatgctgtaatccttcactctgtgctgaggctgaactcagcagaagcaatgtccaaggctctgagcacttgtagctcccacctcatcctcatcctcttccacacaggtatcattgtgctgtctgtcacacaccttgcagagaaaaagattccccttattcctgtgttccttaatgtgctgcacaatgtcatcccccctgcactcaaccccctggcctgtgcactcaggatgcacaaactcagactgggctttcagagactgcttggactgggtcaggacgtgtccaagtaa

SEQ ID NO: 988 - protein, 319 aa, Homo sapiens
MDTSTSVTYDSSLQISQFILMGLPGIHEWQHWLSLPLTLLYLLALGANLLIIITIQHETVLHEPMYHLLGILAVVDIGLATTIMPKILAIFWFDAKAISLPMCFAQIYAIHCFFCIESGIFLCMAVDRYIAICRPLQYPSIVTKAFVFKATGFIMLRNGLLTIPVPILAAQRHYCSRNEIEHCLCSNLGVISLACDDITVNKFYQLMLAWVLVGSDMALVFSSYAVILHSVLRLNSAEAMSKALSTCSSHLILILFHTGIIVLSVTHLAEKKIPLIPVFLNVLHNVIPPALNPLACALRMHKLRLGFQRLLGLGQDVSK

SEQ ID NO: 989 - DNA, 4371 bp, Homo sapiens
cccctgctgctctcaagtttcccgttggcggcgcggcccgggcgcttcaggtagcctctcggctctctctgctccgctccgcgcccaggtagggcaccgacgggggctgcacgcggctggccggcttcctccctgctgaggcggccctccctcctcccgcggggccctcctggccggggatccgcagcgctgcgccctctgaacgcccggcccccgcgcctgctgcggggcgcggcctggccgggccctggccccggctggcctcagtgcccagcagccccgctccgctctgcccagcgcgtcccctttgctccagccctgcggccgtccctttcggccggcggcatggccctgtcgtccgaacccgctgagatgccgcggcagtttcccaagctgaacatctctgaagtggatgagcaagtccggctcctggcggagaaggtgtttgctaaagtgctccgagaagaggacagcaaagatgccctgtccctgttcactgtcccagaggactgccccatcgggcaaaaggaagccaaggagagggagctgcagaaggagctggcagagcagaagtctgtggagaccgcaaaaagaaagaaaagtttcaagatgattcggtcccagtccctgtctctgcaaatgccgccacagcaagattggaagggccccccggcagccagtccggccatgtctcccacaacccctgtggtcactggagccacttccctgcccacgccagcaccctatgccatgcctgagttccagcgggtcaccatcagcggagattactgtgccgggatcactttggaggactatgagcaggcagccaagagtctggccaaggccctaatgatccgggagaagtatgcgcggctcgcctaccaccgcttcccgcggatcacatcccagtacctgggtcatccgcgggcggatactgcacctccggaagagggccttccagacttccaccctcctccactgccccaggaagacccctactgcctggatgatgcaccccccaacctggattacttggtccacatgcaggggggcatcctctttgtgtatgataacaagaagatgctggagcaccaggagccgcacagcctaccctaccccgacctggagacctacacggtggacatgagccacatcctggctctcatcaccgatggccccacgaaaacctattgtcaccggcgactgaactttctggaatccaagttcagccttcatgagatgttaaacgaaatgtccgagttcaaagagttgaagagtaacccccaccgggacttctataacgtgagaaaggtggacacacacatccatgcggccgcctgcatgaaccaaaagcatctgctgcgcttcatcaagcacacataccagacggagcctgacaggactgtggcagagaagcggggccggaagatcaccctgcggcaggtgtttgacggcctgcacatggacccctacgacctcactgtggactcactggatgtccacgcgggccggcagacattccaccgctttgacaagttcaactccaaatacaaccctgtgggggccagtgagctgcgtgacctgtatttgaaaactgaaaactatctgggaggagagtactttgctcggatggtcaaggaggttgcccgggagctggaggagagcaagtaccagtactcagagccacggctctccatctacggccgcagtcctgaggagtggcccaacctggcctactggttcatccagcacaaggtctactctcccaacatgcgctggatcatccaggtgccccggatttatgacatatttaggtcaaagaagctgctgccaaactttgggaagatgctggagaacatcttcctgccccttttcaaggccactatcaacccccaagatcatcgagagcttcacctcttccttaaatatgtgacggggtttgacagcgtggatgatgagtccaagcacagcgaccacatgttttccgacaagagcccaaacccggacgtctggaccagtgagcagaacccaccctacagctactacctgtactacatgtatgccaacatcatggtgctcaacaacctccgcagggagcgcggcctgagcacgttcctgttccggccgcactgtggggaagccggctccatcacccacctggtgtctgccttcctcactgctgacaacatttcccacgggctgctcctcaagaagagtccggtattgcagtatctctactaccttgctcagatccccattgccatgtctcctcttagcaacaacagtttgttcctcgaatattccaagaaccctctgagggaattcctacacaagggactgcatgtttctctttccaccgatgaccccatgcagttccactacacgaaggaagcacttatggaagaatatgccattgcagctcaagtgtggaagctgagcacctgcgacctgtgtgagatcgccaggaacagcgtgctgcagagcggcctctcgcatcaggaaaagcaaaagtttctgggacaaaattattataaagaaggacctgaaggaaatgatattcgaaagacaaatgtggctcagatccggatggcattccgatatgagaccttatgcaatgagctcagcttcctgtctgatgctatgaaatcagaagagatcaccgccttgaccaactaggtccagcatttgacatgcattttaactttttggttcaatttcaagtctgctgtggctaatagtggtcaagattccgaactaggactttcctctgtgaagaggatgcctctgaagaaattttaaactggtgattttggttgcactgctcactttaagagttaacatgctcacttgttagtatttctgagtaacaagatggtgacttctccttggggatctgggagctgagcacttgtctatacttgttcctaattttccaagtatttctcttgaaactgccagtgcctgaactgttggggccaggattttccctggtcagatgccaagtaacatgtggttttctgccatacttttctccattggcccaggtaggctaattggtagttgttcatttcagcctctggatggctggctgccttaaacacaatcaatttcaaagctccatttcataaaggggctactttgaaggagttaagatggaagacttccttcttgacaaattgtgtttttagtgaatttcttaaaccgttttatttagccctccttccctctttctagttggaagccaaatgtactcatgaaaacagccactcctattctgagtcttggtttcttcacctagaaagtgagggtttggactagatgagtggctttcagggtgttctgtgaatctcctcatgaatactttagggtaggggagggaagggagtgagtgatgctcaggggctgtcaaagtgactgcgttcatcagttttacactggggctgctacataatattttcatttgaacgaagaacttcaaaaagcacaggactagatgatctctgttccttttggctctaatatgctacaactgtaggccaattatcactttaccaattaagagttaggccagataagtgaaatttaacttaagggcacacagctaataagtaataggcctaaactggatttccttattccaaatcctgtcttttccccactattccattagaccccacaaatgttagttgtgtgtgtgtgtgtgtgtgtttttaatcactgtaaccggatgcatttttttaaggcaaaatttctcccttatctactatgatgacttcagaagatacaatggtcccaggggccaagtagaaagcatttttaaagattaatctgaattaagctttatcagtgtactctttatctgtgttactagtgcctggtatgtagtaggtgctcaataaatgcatattgaataactaagtgaatttcttttggcaactttttaaggacatgtgctcttagtacttaagaggctgctcaaggaccttcctatctatttctgtggtcaaattcagactacaggaggtctttttgaatcattatagttagaagaagaatccagtttctgcctgtgaacttatttgactttagattgtctcatcttgtgactttataatgcctgtcccctccactggtcaattcagcatatggaagtataaatgcagtctttttactaggcagatatatatgctatcttacagctaattatgaaattgaatgaaaatccattgttatcttagggattagttttgaaaagcccccgtttatatacatttgccctaacataggaagtattgtgtagtttctcattgtcattttatctgtatcaagtatctttttttaaattgttaaataaagtcagctaggactgtg

SEQ ID NO: 990 - protein, 776 aa, Homo sapiens
MALSSEPAEMPRQFPKLNISEVDEQVRLLAEKVFAKVLREEDSKDALSLFTVPEDCPIGQKEAKERELQKELAEQKSVETAKRKKSFKMIRSQSLSLQMPPQQDWKGPPAASPAMSPTTPVVTGATSLPTPAPYAMPEFQRVTISGDYCAGITLEDYEQAAKSLAKALMIREKYARLAYHRFPRITSQYLGHPRADTAPPEEGLPDFHPPPLPQEDPYCLDDAPPNLDYLVHMQGGILFVYDNKKMLEHQEPHSLPYPDLETYTVDMSHILALITDGPTKTYCHRRLNFLESKFSLHEMLNEMSEFKELKSNPHRDFYNVRKVDTHIHAAACMNQKHLLRFIKHTYQTEPDRTVAEKRGRKITLRQVFDGLHMDPYDLTVDSLDVHAGRQTFHRFDKFNSKYNPVGASELRDLYLKTENYLGGEYFARMVKEVARELEESKYQYSEPRLSIYGRSPEEWPNLAYWFIQHKVYSPNMRWIIQVPRIYDIFRSKKLLPNFGKMLENIFLPLFKATINPQDHRELHLFLKYVTGFDSVDDESKHSDHMFSDKSPNPDVWTSEQNPPYSYYLYYMYANIMVLNNLRRERGLSTFLFRPHCGEAGSITHLVSAFLTADNISHGLLLKKSPVLQYLYYLAQIPIAMSPLSNNSLFLEYSKNPLREFLHKGLHVSLSTDDPMQFHYTKEALMEEYAIAAQVWKLSTCDLCEIARNSVLQSGLSHQEKQKFLGQNYYKEGPEGNDIRKTNVAQIRMAFRYETLCNELSFLSDAMKSEEITALTN

SEQ ID NO: 991 - DNA, 4334 bp, Homo sapiens
aaacaactgacccatccttcctgagctcttctccccaggatttcaacagcaccacagaaatagccattttgctcatggttatttcccaggaccacaggatttgcctaagtcactgggaggctatgtgtctgttctgagccttcccactctcctaaagggcagatgaagatcagagctttgcaccctgtgatgccattttaatcaaccctgcttggttttagaggattgctcctgtgggtcacttgaggcaggctccaccttccccaggaggagtggcagagtccagccagcgctcggagctggaggcccacgtgggagcagtgagcggctctgagatgccgcggcagtttcccaagctgaacatctctgaagtggatgagcaagtccggctcctggcggagaaggtgtttgctaaagtgctccgagaagaggacagcaaagatgccctgtccctgttcactgtcccagaggactgccccatcgggcaaaaggaagccaaggagagggagctgcagaaggagctggcagagcagaagtctgtggagaccgcaaaaagaaagaaaagtttcaagatgattcggtcccagtccctgtctctgcaaatgccgccacagcaagattggaagggccccccggcagccagtccggccatgtctcccacaacccctgtggtcactggagccacttccctgcccacgccagcaccctatgccatgcctgagttccagcgggtcaccatcagcggagattactgtgccgggatcactttggaggactatgagcaggcagccaagagtctggccaaggccctaatgatccgggagaagtatgcgcggctcgcctaccaccgcttcccgcggatcacatcccagtacctgggtcatccgcgggcggatactgcacctccggaagagggccttccagacttccaccctcctccactgccccaggaagacccctactgcctggatgatgcaccccccaacctggattacttggtccacatgcaggggggcatcctctttgtgtatgataacaagaagatgctggagcaccaggagccgcacagcctaccctaccccgacctggagacctacacggtggacatgagccacatcctggctctcatcaccgatggccccacgaaaacctattgtcaccggcgactgaactttctggaatccaagttcagccttcatgagatgttaaacgaaatgtccgagttcaaagagttgaagagtaacccccaccgggacttctataacgtgagaaaggtggacacacacatccatgcggccgcctgcatgaaccaaaagcatctgctgcgcttcatcaagcacacataccagacggagcctgacaggactgtggcagagaagcggggccggaagatcaccctgcggcaggtgtttgacggcctgcacatggacccctacgacctcactgtggactcactggatgtccacgcgggccggcagacattccaccgctttgacaagttcaactccaaatacaaccctgtgggggccagtgagctgcgtgacctgtatttgaaaactgaaaactatctgggaggagagtactttgctcggatggtcaaggaggttgcccgggagctggaggagagcaagtaccagtactcagagccacggctctccatctacggccgcagtcctgaggagtggcccaacctggcctactggttcatccagcacaaggtctactctcccaacatgcgctggatcatccaggtgccccggatttatgacatatttaggtcaaagaagctgctgccaaactttgggaagatgctggagaacatcttcctgccccttttcaaggccactatcaacccccaagatcatcgagagcttcacctcttccttaaatatgtgacggggtttgacagcgtggatgatgagtccaagcacagcgaccacatgttttccgacaagagcccaaacccggacgtctggaccagtgagcagaacccaccctacagctactacctgtactacatgtatgccaacatcatggtgctcaacaacctccgcagggagcgcggcctgagcacgttcctgttccggccgcactgtggggaagccggctccatcacccacctggtgtctgccttcctcactgctgacaacatttcccacgggctgctcctcaagaagagtccggtattgcagtatctctactaccttgctcagatccccattgccatgtctcctcttagcaacaacagtttgttcctcgaatattccaagaaccctctgagggaattcctacacaagggactgcatgtttctctttccaccgatgaccccatgcagttccactacacgaaggaagcacttatggaagaatatgccattgcagctcaagtgtggaagctgagcacctgcgacctgtgtgagatcgccaggaacagcgtgctgcagagcggcctctcgcatcaggaaaagcaaaagtttctgggacaaaattattataaagaaggacctgaaggaaatgatattcgaaagacaaatgtggctcagatccggatggcattccgatatgagaccttatgcaatgagctcagcttcctgtctgatgctatgaaatcagaagagatcaccgccttgaccaactaggtccagcatttgacatgcattttaactttttggttcaatttcaagtctgctgtggctaatagtggtcaagattccgaactaggactttcctctgtgaagaggatgcctctgaagaaattttaaactggtgattttggttgcactgctcactttaagagttaacatgctcacttgttagtatttctgagtaacaagatggtgacttctccttggggatctgggagctgagcacttgtctatacttgttcctaattttccaagtatttctcttgaaactgccagtgcctgaactgttggggccaggattttccctggtcagatgccaagtaacatgtggttttctgccatacttttctccattggcccaggtaggctaattggtagttgttcatttcagcctctggatggctggctgccttaaacacaatcaatttcaaagctccatttcataaaggggctactttgaaggagttaagatggaagacttccttcttgacaaattgtgtttttagtgaatttcttaaaccgttttatttagccctccttccctctttctagttggaagccaaatgtactcatgaaaacagccactcctattctgagtcttggtttcttcacctagaaagtgagggtttggactagatgagtggctttcagggtgttctgtgaatctcctcatgaatactttagggtaggggagggaagggagtgagtgatgctcaggggctgtcaaagtgactgcgttcatcagttttacactggggctgctacataatattttcatttgaacgaagaacttcaaaaagcacaggactagatgatctctgttccttttggctctaatatgctacaactgtaggccaattatcactttaccaattaagagttaggccagataagtgaaatttaacttaagggcacacagctaataagtaataggcctaaactggatttccttattccaaatcctgtcttttccccactattccattagaccccacaaatgttagttgtgtgtgtgtgtgtgtgtgtttttaatcactgtaaccggatgcatttttttaaggcaaaatttctcccttatctactatgatgacttcagaagatacaatggtcccaggggccaagtagaaagcatttttaaagattaatctgaattaagctttatcagtgtactctttatctgtgttactagtgcctggtatgtagtaggtgctcaataaatgcatattgaataactaagtgaatttcttttggcaactttttaaggacatgtgctcttagtacttaagaggctgctcaaggaccttcctatctatttctgtggtcaaattcagactacaggaggtctttttgaatcattatagttagaagaagaatccagtttctgcctgtgaacttatttgactttagattgtctcatcttgtgactttataatgcctgtcccctccactggtcaattcagcatatggaagtataaatgcagtctttttactaggcagatatatatgctatcttacagctaattatgaaattgaatgaaaatccattgttatcttagggattagttttgaaaagcccccgtttatatacatttgccctaacataggaagtattgtgtagtttctcattgtcattttatctgtatcaagtatctttttttaaattgttaaataaagtcagctaggactgtg

SEQ ID NO: 992 - protein, 767 aa, Homo sapiens
MPRQFPKLNISEVDEQVRLLAEKVFAKVLREEDSKDALSLFTVPEDCPIGQKEAKERELQKELAEQKSVETAKRKKSFKMIRSQSLSLQMPPQQDWKGPPAASPAMSPTTPVVTGATSLPTPAPYAMPEFQRVTISGDYCAGITLEDYEQAAKSLAKALMIREKYARLAYHRFPRITSQYLGHPRADTAPPEEGLPDFHPPPLPQEDPYCLDDAPPNLDYLVHMQGGILFVYDNKKMLEHQEPHSLPYPDLETYTVDMSHILALITDGPTKTYCHRRLNFLESKFSLHEMLNEMSEFKELKSNPHRDFYNVRKVDTHIHAAACMNQKHLLRFIKHTYQTEPDRTVAEKRGRKITLRQVFDGLHMDPYDLTVDSLDVHAGRQTFHRFDKFNSKYNPVGASELRDLYLKTENYLGGEYFARMVKEVARELEESKYQYSEPRLSIYGRSPEEWPNLAYWFIQHKVYSPNMRWIIQVPRIYDIFRSKKLLPNFGKMLENIFLPLFKATINPQDHRELHLFLKYVTGFDSVDDESKHSDHMFSDKSPNPDVWTSEQNPPYSYYLYYMYANIMVLNNLRRERGLSTFLFRPHCGEAGSITHLVSAFLTADNISHGLLLKKSPVLQYLYYLAQIPIAMSPLSNNSLFLEYSKNPLREFLHKGLHVSLSTDDPMQFHYTKEALMEEYAIAAQVWKLSTCDLCEIARNSVLQSGLSHQEKQKFLGQNYYKEGPEGNDIRKTNVAQIRMAFRYETLCNELSFLSDAMKSEEITALTN

SEQ ID NO: 993 - DNA, 4473 bp, Homo sapiens
atatcgctcgttgctactcagctttcaggaggaggctgggcgttagagggaggctgtggcttatctcctgcagctgggcaggacggctgagtttactgttgtaaagaggaagccgccgctttagtttcctcttgtgagggctgtgaagagggccaggacactgcattcaggataccacagccattttgttttggataactgggattacctggggacttcagggctcttggaaattttccactcatatttcatattcacgagagaatttccagcccaggcttttcctgctctggctcactgctgctcacagatatgcaaaacagagacctcctactccagccggcagacaggacccagccagctgcacgcacgcactgactcagctgagcctcctgggtggcaggcagcacctcacccgggtgcatcacttgagtggcatcttcaggaccagtcatggagccaggctcagctgagatgccgcggcagtttcccaagctgaacatctctgaagtggatgagcaagtccggctcctggcggagaaggtgtttgctaaagtgctccgagaagaggacagcaaagatgccctgtccctgttcactgtcccagaggactgccccatcgggcaaaaggaagccaaggagagggagctgcagaaggagctggcagagcagaagtctgtggagaccgcaaaaagaaagaaaagtttcaagatgattcggtcccagtccctgtctctgcaaatgccgccacagcaagattggaagggccccccggcagccagtccggccatgtctcccacaacccctgtggtcactggagccacttccctgcccacgccagcaccctatgccatgcctgagttccagcgggtcaccatcagcggagattactgtgccgggatcactttggaggactatgagcaggcagccaagagtctggccaaggccctaatgatccgggagaagtatgcgcggctcgcctaccaccgcttcccgcggatcacatcccagtacctgggtcatccgcgggcggatactgcacctccggaagagggccttccagacttccaccctcctccactgccccaggaagacccctactgcctggatgatgcaccccccaacctggattacttggtccacatgcaggggggcatcctctttgtgtatgataacaagaagatgctggagcaccaggagccgcacagcctaccctaccccgacctggagacctacacggtggacatgagccacatcctggctctcatcaccgatggccccacgaaaacctattgtcaccggcgactgaactttctggaatccaagttcagccttcatgagatgttaaacgaaatgtccgagttcaaagagttgaagagtaacccccaccgggacttctataacgtgagaaaggtggacacacacatccatgcggccgcctgcatgaaccaaaagcatctgctgcgcttcatcaagcacacataccagacggagcctgacaggactgtggcagagaagcggggccggaagatcaccctgcggcaggtgtttgacggcctgcacatggacccctacgacctcactgtggactcactggatgtccacgcgggccggcagacattccaccgctttgacaagttcaactccaaatacaaccctgtgggggccagtgagctgcgtgacctgtatttgaaaactgaaaactatctgggaggagagtactttgctcggatggtcaaggaggttgcccgggagctggaggagagcaagtaccagtactcagagccacggctctccatctacggccgcagtcctgaggagtggcccaacctggcctactggttcatccagcacaaggtctactctcccaacatgcgctggatcatccaggtgccccggatttatgacatatttaggtcaaagaagctgctgccaaactttgggaagatgctggagaacatcttcctgccccttttcaaggccactatcaacccccaagatcatcgagagcttcacctcttccttaaatatgtgacggggtttgacagcgtggatgatgagtccaagcacagcgaccacatgttttccgacaagagcccaaacccggacgtctggaccagtgagcagaacccaccctacagctactacctgtactacatgtatgccaacatcatggtgctcaacaacctccgcagggagcgcggcctgagcacgttcctgttccggccgcactgtggggaagccggctccatcacccacctggtgtctgccttcctcactgctgacaacatttcccacgggctgctcctcaagaagagtccggtattgcagtatctctactaccttgctcagatccccattgccatgtctcctcttagcaacaacagtttgttcctcgaatattccaagaaccctctgagggaattcctacacaagggactgcatgtttctctttccaccgatgaccccatgcagttccactacacgaaggaagcacttatggaagaatatgccattgcagctcaagtgtggaagctgagcacctgcgacctgtgtgagatcgccaggaacagcgtgctgcagagcggcctctcgcatcaggaaaagcaaaagtttctgggacaaaattattataaagaaggacctgaaggaaatgatattcgaaagacaaatgtggctcagatccggatggcattccgatatgagaccttatgcaatgagctcagcttcctgtctgatgctatgaaatcagaagagatcaccgccttgaccaactaggtccagcatttgacatgcattttaactttttggttcaatttcaagtctgctgtggctaatagtggtcaagattccgaactaggactttcctctgtgaagaggatgcctctgaagaaattttaaactggtgattttggttgcactgctcactttaagagttaacatgctcacttgttagtatttctgagtaacaagatggtgacttctccttggggatctgggagctgagcacttgtctatacttgttcctaattttccaagtatttctcttgaaactgccagtgcctgaactgttggggccaggattttccctggtcagatgccaagtaacatgtggttttctgccatacttttctccattggcccaggtaggctaattggtagttgttcatttcagcctctggatggctggctgccttaaacacaatcaatttcaaagctccatttcataaaggggctactttgaaggagttaagatggaagacttccttcttgacaaattgtgtttttagtgaatttcttaaaccgttttatttagccctccttccctctttctagttggaagccaaatgtactcatgaaaacagccactcctattctgagtcttggtttcttcacctagaaagtgagggtttggactagatgagtggctttcagggtgttctgtgaatctcctcatgaatactttagggtaggggagggaagggagtgagtgatgctcaggggctgtcaaagtgactgcgttcatcagttttacactggggctgctacataatattttcatttgaacgaagaacttcaaaaagcacaggactagatgatctctgttccttttggctctaatatgctacaactgtaggccaattatcactttaccaattaagagttaggccagataagtgaaatttaacttaagggcacacagctaataagtaataggcctaaactggatttccttattccaaatcctgtcttttccccactattccattagaccccacaaatgttagttgtgtgtgtgtgtgtgtgtgtttttaatcactgtaaccggatgcatttttttaaggcaaaatttctcccttatctactatgatgacttcagaagatacaatggtcccaggggccaagtagaaagcatttttaaagattaatctgaattaagctttatcagtgtactctttatctgtgttactagtgcctggtatgtagtaggtgctcaataaatgcatattgaataactaagtgaatttcttttggcaactttttaaggacatgtgctcttagtacttaagaggctgctcaaggaccttcctatctatttctgtggtcaaattcagactacaggaggtctttttgaatcattatagttagaagaagaatccagtttctgcctgtgaacttatttgactttagattgtctcatcttgtgactttataatgcctgtcccctccactggtcaattcagcatatggaagtataaatgcagtctttttactaggcagatatatatgctatcttacagctaattatgaaattgaatgaaaatccattgttatcttagggattagttttgaaaagcccccgtttatatacatttgccctaacataggaagtattgtgtagtttctcattgtcattttatctgtatcaagtatctttttttaaattgttaaataaagtcagctaggactgtg

SEQ ID NO: 994 - protein, 774 aa, Homo sapiens
MEPGSAEMPRQFPKLNISEVDEQVRLLAEKVFAKVLREEDSKDALSLFTVPEDCPIGQKEAKERELQKELAEQKSVETAKRKKSFKMIRSQSLSLQMPPQQDWKGPPAASPAMSPTTPVVTGATSLPTPAPYAMPEFQRVTISGDYCAGITLEDYEQAAKSLAKALMIREKYARLAYHRFPRITSQYLGHPRADTAPPEEGLPDFHPPPLPQEDPYCLDDAPPNLDYLVHMQGGILFVYDNKKMLEHQEPHSLPYPDLETYTVDMSHILALITDGPTKTYCHRRLNFLESKFSLHEMLNEMSEFKELKSNPHRDFYNVRKVDTHIHAAACMNQKHLLRFIKHTYQTEPDRTVAEKRGRKITLRQVFDGLHMDPYDLTVDSLDVHAGRQTFHRFDKFNSKYNPVGASELRDLYLKTENYLGGEYFARMVKEVARELEESKYQYSEPRLSIYGRSPEEWPNLAYWFIQHKVYSPNMRWIIQVPRIYDIFRSKKLLPNFGKMLENIFLPLFKATINPQDHRELHLFLKYVTGFDSVDDESKHSDHMFSDKSPNPDVWTSEQNPPYSYYLYYMYANIMVLNNLRRERGLSTFLFRPHCGEAGSITHLVSAFLTADNISHGLLLKKSPVLQYLYYLAQIPIAMSPLSNNSLFLEYSKNPLREFLHKGLHVSLSTDDPMQFHYTKEALMEEYAIAAQVWKLSTCDLCEIARNSVLQSGLSHQEKQKFLGQNYYKEGPEGNDIRKTNVAQIRMAFRYETLCNELSFLSDAMKSEEITALTN

SEQ ID NO: 995 - DNA, 4084 bp, Homo sapiens
gaggtgcgaccgggtcccggcctgagtcgcggccacccgcaggtctgagctgtgggctgaggcagcgcagccgctgccgcagggtgcgcgatgccttgaacctgggaaactatgtgaagcaacactctggattttgaaagacatcttttcatcatgggacagcaaatttcggatcagacacagttggttattaacaagttaccagaaaaagtagcaaaacatgttacgttggttcgagagagtggctccttaacttatgaagaatttcttgggagagtagctgagcttaatgatgtaacggctaaagtggcttctggccaggaaaaacatcttctctttgaggtacaacctgggtctgattcctctgctttttggaaagtggttgtacgggtggtctgtaccaagattaacaaaagcagtggcattgtggaggcatcacggatcatgaatttataccagtttattcaactttataaagatatcacaagtcaagcagcaggagtattggcacagagctccacctctgaagaacctgatgaaaactcatcctctgtaacatcttgtcaggctagtctttggatgggaagggtgaagcagctgaccgatgaggaggagtgttgtatctgtatggatgggcgggctgacctcatcctgccttgtgctcacagcttttgtcagaagtgtattgataaatggagtgatcgacacaggaattgccctatttgtcgcctacagatgactggagcaaatgaatcttgggtggtatcagatgcacccactgaagatgatatggctaactatattcttaacatggctgatgaggcaggccagccccacaggccatgaccttgaagtgaaagtcttctgttgctattgtgggctcaaatatttggtcatgggggaagaatgtagggttgtggcactggcacagacacaggaaaatccattttccccactcttttatttttgctattctgatcatttgtcccccttttaaaaataaacttcccatgtcttccatttgtggtactaaaatttgctactgttttagaccatattttcctattatttatctgttcaaatttgtattattacaactaatagctcttgaattctttgctaaaggtaacagcaacacttccagaggcttctaaaacactactgttttgcagggcaggagtattctggaatctttttacttagatataaaataaacctcgaatattaaaaagttgtagccatctgagagaggaaagtttaagtgactgaaaatgtagaatacttcaacgtgcatgttactacttaaaactagtctttctgctggaatctaaggagtatatatatatatgcccccttgtggttaattattgctcctttaataatttttacttgaaatgatccacaattatttcataactttagcagtgtgttttggaactactgtacttaaaggtttgtttgtttgtttttgccatactgtataatttgggtgaggtctacaaaattgggtgtgactttcctttgcaaatggatttctcctggggaattttcttggctgttctggaaatgctttcccacagctgggtaactgttctaaatggctttgataatgctcacacatcttggagtttcagaaggaaattattctgcatcacaaatactaaattttatatttctaaattactataggtcatttaatattggtttatggtgcttttatttccttaacttgaaaacatctttctgagatttcagagtcctcaaatttcttagattaagagacaagaggccagtgcagtggttcacacctgtaatcccagcactttgggaggccgaggtgggtggatcatttgaggttaggagtttgagaccagcctggccaacatggcgaaatcctctctctactaaaatacaaaaattagctgggcatggtggcaggtgcctgtaatctcagctactcgggaggctgaggcagaattgcttgaacccaggaggtggaggttgcagtgagccgagatcacaccactgcactccagcctgggagacagaacgagactcctaatcaaaaaaaaaacacaagaaaatagagtgaggcttttttaccgtatatacataaaatacttatgaaaattagaagataatttggcattcctactgtttcactgtacttccattgaaatactctttccattaaaatattctgaaacaatatagtaataatggaattgtgatcttcagttgcacctcaaccattttttttgcttatgaactaaaatttctaacattaacatttcggcatgtaataaaacaagggcctatctcctttaaaatttaacattccatgtaacttttctgacttatcattcataagttgcaaatattactattttcctaaaccagggtacacaatttaagttgccacttattgatgacagaatttctggatagtaggattttaataggcgagcaaataaaattcaaatcaatttcaaggaaaaacatctggccaggggtagcttgatttcgcccccaaaaatactgaagactaatccattgacattcataatgggacagctaagtaccaaatagctaactactccctatggaggtttatgcaagcagagtaccaggggttccatcatatcaacctggcaatgcacttggtggttgtgtgaccttgagaaagtctcttactcttgtttatgtgttcttactttagaaactgagactttatttgtggttttcacactatttcagcagcaaaaactttttcaaggaaaatcttacagaacctttaaacacgtgtgcatacacacataccctataccccactatataaaagtcatattattataaatttccttattatataaactttatatactataaatgtgattaagtcaatgaataaaaacattaatgcattggtgatatccagcatgtttgaatttggtgagtaacacacatatagtgggagtcgttttttttaaaaaaattttttaattaaattcaagtcaaatttgcagaaccctgtatctcctccatagattcttagtattccatggaacatattttgaaaaccttgggatagatgatccactgaaatcttttccagctctaagattttaaattgtccttttagattagacttgctgagtttaattcagattacctaattttaaaatgtttctgaaaagtgaacagagttaccttacagagttttggatctttccagggatagccaatgattttatcccccagaatccttcacctttcaaggagttatttaacaatgagcccagtgactcaatagggcccaaacctttttattttacaatatgagctccaagacacttactgatctactgtgaatataaaatgttattagccttatcaaataaataaatgagcacagctctttgttcgctctattgaactgggtgataattatttagatgtgaatgttaggtcagttctactgtaataactaatcgtaaaagttgtaaatttgtttaatggatgaaatgtacactttttgtattctgtacagctttgtcttttttaaatatgaagtacttaaatgtacttactatgataggaaatataatgtgtgccttctaggatttgtgaagtggtttcatgaactctaaggaatttgttttccctatcctaactcagtaacagagggtttactccgattatgtatagaaccttagtttgagaaaatgaattttactatgtactgaatttagaggttgagaataataggatctgtgttattcttagtacccactgataaattgtgcaataaataatctttcgcaagtgattttagctaattgaagagattattttcctatgtaatttcacattctaatatactaaatgtttatattccttagagaactattttatattgtgcgctgggggcttgtgatgtttgtgtgctgttttaaaattcatttcaaattggactcgatttccttatatctaatatatatctgggagaaaaggctgcttgaaaatatcttttgattcagtgatttttaacattgggaagttgagtttattaaaaggtagtctg

SEQ ID NO: 996 - protein, 230 aa, Homo sapiens
MGQQISDQTQLVINKLPEKVAKHVTLVRESGSLTYEEFLGRVAELNDVTAKVASGQEKHLLFEVQPGSDSSAFWKVVVRVVCTKINKSSGIVEASRIMNLYQFIQLYKDITSQAAGVLAQSSTSEEPDENSSSVTSCQASLWMGRVKQLTDEEECCICMDGRADLILPCAHSFCQKCIDKWSDRHRNCPICRLQMTGANESWVVSDAPTEDDMANYILNMADEAGQPHRP

SEQ ID NO: 997 - DNA, 2518 bp, Homo sapiens
ctcatttgtgtgttttctgagtcagcattagctaaattttccagaaggccatccacaaagtacagcctgggcgttcaagggacgtcattcatttcccccagtgaccttgacaagtcagaagcttgaaagcagggaaatccggatgtctcggttatgaagtggagcagtgagtgtgagcctcaacatagttccagaactctccatccggactagttattgagcatctgcctctcatatcaccagtggccatctgaggtgtttccctggctctgaaggggtaggcacgatggccaggtgcttcagcctggtgttgcttctcacttccatctggaccacgaggctcctggtccaaggctctttgcgtgcagaagagctttccatccaggtgtcatgcagaattatggggatcacccttgtgagcaaaaaggcgaaccagcagctgaatttcacagaagctaaggaggcctgtaggctgctgggactaagtttggccggcaaggaccaagttgaaacagccttgaaagctagctttgaaacttgcagctatggctgggttggagatggattcgtggtcatctctaggattagcccaaaccccaagtgtgggaaaaatggggtgggtgtcctgatttggaaggttccagtgagccgacagtttgcagcctattgttacaactcatctgatacttggactaactcgtgcattccagaaattatcaccaccaaagatcccatattcaacactcaaactgcaacacaaacaacagaatttattgtcagtgacagtacctactcggtggcatccccttactctacaatacctgcccctactactactcctcctgctccagcttccacttctattccacggagaaaaaaattgatttgtgtcacagaagtttttatggaaactagcaccatgtctacagaaactgaaccatttgttgaaaataaagcagcattcaagaatgaagctgctgggtttggaggtgtccccacggctctgctagtgcttgctctcctcttctttggtgctgcagctggtcttggattttgctatgtcaaaaggtatgtgaaggccttcccttttacaaacaagaatcagcagaaggaaatgatcgaaaccaaagtagtaaaggaggagaaggccaatgatagcaaccctaatgaggaatcaaagaaaactgataaaaacccagaagagtccaagagtccaagcaaaactaccgtgcgatgcctggaagctgaagtttagatgagacagaaatgaggagacacacctgaggctggtttctttcatgctccttaccctgccccagctggggaaatcaaaagggccaaagaaccaaagaagaaagtccacccttggttcctaactggaatcagctcaggactgccattggactatggagtgcaccaaagagaatgcccttctccttattgtaaccctgtctggatcctatcctcctacctccaaagcttcccacggcctttctagcctggctatgtcctaataatatcccactgggagaaaggagttttgcaaagtgcaaggacctaaaacatctcatcagtatccagtggtaaaaaggcctcctggctgtctgaggctaggtgggttgaaagccaaggagtcactgagaccaaggctttctctactgattccgcagctcagaccctttcttcagctctgaaagagaaacacgtatcccacctgacatgtccttctgagcccggtaagagcaaaagaatggcagaaaagtttagcccctgaaagccatggagattctcataacttgagacctaatctctgtaaagctaaaataaagaaatagaacaaggctgaggatacgacagtacactgtcagcagggactgtaaacacagacagggtcaaagtgttttctctgaacacattgagttggaatcactgtttagaacacacacacttactttttctggtctctaccactgctgatattttctctaggaaatatacttttacaagtaacaaaaataaaaactcttataaatttctatttttatctgagttacagaaatgattactaaggaagattactcagtaatttgtttaaaaagtaataaaattcaacaaacatttgctgaatagctactatatgtcaagtgctgtgcaaggtattacactctgtaattgaatattattcctcaaaaaattgcacatagtagaacgctatctgggaagctatttttttcagttttgatatttctagcttatctacttccaaactaatttttatttttgctgagactaatcttattcattttctctaatatggcaaccattataaccttaatttattattaacatacctaagaagtacattgttacctctatataccaaagcacattttaaaagtgccattaacaaatgtatcactagccctcctttttccaacaagaagggactgagagatgcagaaatatttgtgacaaaaaattaaagcatttagaaaacttcaaaaaaaaaaaaaaaaaa

SEQ ID NO: 998 - protein, 322 aa, Homo sapiens
MARCFSLVLLLTSIWTTRLLVQGSLRAEELSIQVSCRIMGITLVSKKANQQLNFTEAKEACRLLGLSLAGKDQVETALKASFETCSYGWVGDGFVVISRISPNPKCGKNGVGVLIWKVPVSRQFAAYCYNSSDTWTNSCIPEIITTKDPIFNTQTATQTTEFIVSDSTYSVASPYSTIPAPTTTPPAPASTSIPRRKKLICVTEVFMETSTMSTETEPFVENKAAFKNEAAGFGGVPTALLVLALLFFGAAAGLGFCYVKRYVKAFPFTNKNQQKEMIETKVVKEEKANDSNPNEESKKTDKNPEESKSPSKTTVRCLEAEV

SEQ ID NO: 999 - DNA, 6218 bp, Homo sapiens
ggcgctggcccagggtcttctccaggctcacatgcttgctggaggctccaggcgggtggggagatctgcagggtccctttgttcccgtccggccaggacagtgtccagtggcacgagttgccatggggactgccatctgctgtgtggatacccatcggaggggcccagggtgagcgactgccccaaaggcccagcctgccctgagccctgaggccagctggtcggctttccctgccattatcccccgagccaggccggagtggggctcccagaggagctctcggctctaagtcccagcccctctcagaggaggcgtgcggccgaggttctgcagccagaggcttctcggctctgagctccggagccagatgtaacattgaccttaaatggtaaaagctccccagagtgaagagaggctggccagaggaggaaaggagaataactcagttttagggtcctcctaccgcaggagtatcttgcagtccaactcccacgattgtcctgactggggatgccacttcaccagaaggagaaaccgacaaaaacctggccaacagagttcacagtccccacaagaggctttctcaccgacacttgaaggtgtccactgcctccctgacatctgtggaccccgcggggcacatcattgacctggtgaatgaccagctgccagacatcagcatctcagaggaggacaagaagaaaaacctggcgctgctggaagaagccaagttggtgagtgagcgattcctgacccgccgtgggaggaagtccaggagcagccccggagactccccatcagctgtttccccgaacctcagccccagcgcttctcctacatcctctcggagcaactcacttacagtccccaccccgccaggtttggatgtgtgcagtggcccgccatcccctctgcctggagcaccaccacagaagggggatgaggccgacgtctcttcacctcaccctggcgagcctaacgtccccaaagggctagctgacaggaagcagaatgaccagaggaaagtgtctcagggcaggctggctcctcgtcctcctccagttgagaagtccaaagagattgcaatagaacaaaaggaaaacttcgatcccctccagtaccccgagaccacacccaaaggcctagctcctgttacaaacagcagtgggaaaatggccctgaacagccctcagcctggccccgtggagagcgagctggggaagcagctcttgaaaacgggctgggagggcagccctctgccgagaagtccaacccaggatgcggcaggagtgggtcccccagcctcccaggggagaggcccagctggagagccgatggggcccgaggctggctccaaagctgagcttccacccactgtgtcccggcccccgctgctgcgagggctctcctgggacagtggccctgaagaacctggcccccggctgcagaaagtgcttgccaagctgccactggcagaggaagaaaagcgttttgcaggcaaggccggcggcaagctggccaaggcccctggtctcaaagactttcagatacaagtgcagcccgtgcggatgcagaaactgaccaagctccgagaggagcacatcctgatgagaaatcagaacttagtggggctcaagcttccagaccttagtgaagcagctgagcaggaaaaagggcttccttctgaactctccccagctattgaggaagaagagtcaaagagtggcttagatgtcatgcctaatatttctgatgtgctgctgcgcaaactgcgggtccacaggagtctccctggaagtgcccctccactcactgaaaaggaagttgagaacgtgtttgtgcaactgtccttggcctttagaaatgacagctacactctggaatctagaattaaccaggctgaaagggaacgcaacctgacagaggagaacactgagaaagaactggaaaacttcaaagcttccattacgtcctcagcttcactctggcaccactgtgagcaccgggaaacctaccagaagttgctggaggacatcgctgtcctgcaccgcctggctgcccgcctctccagccgagctgaggtggtaggcgccgtccgccaggaaaagcgcatgtcgaaagcaacggaagtgatgatgcagtatgtggagaatctaaagaggacgtatgagaaggaccatgcggagctcatggagtttaaaaagcttgcaaatcagaattcaagccgcagctgtggcccctctgaagatggggtccctcgcacggcacggtccatgtccctcacgctgggaaagaatatgcctcgccggagggtcagcgttgctgtggttcctaagtttaatgccctgaatctgcctggccaaactcccagctcatcatccattccctccttaccagccttgtcggaatcacccaatgggaaaggcagcctacctgtcacttcagcactgcctgcacttttggaaaatggaaagacaaatggggacccagattgtgaagcctctgctcctgcgctgaccctgagctgcctggaggagcttagtcaggagaccaaggccaggatggaggaagaagcctacagcaagggattccaagaaggtctaaagaagaccaaagaacttcaagacctgaaggaggaggaggaagaacagaagagtgagagtcctgaggaacctgaagaggtagaagaaactgaggaagaggaaaagggcccaagaagcagcaaacttgaagaattggtccatttcttacaagtcatgtatcccaaactgtgtcagcactggcaagtgatctggatgatggctgcagtgatgctggtcttgactgttgtgctggggctctacaattcctataactcttgtgcagagcaggctgatgggccccttggaagatccacttgctcggcagcccagagggactcctggtggagctcaggactccagcatgagcagcctacagagcagtaggaaacctcacacctagccagtgccctgctctgagacactcagactaccaccctttccccaagtataacgtcaggcccaagtgtggacacactgccgcccatcccatcaggtcatgaggaagggttcttttaacactcggcacttctgtgggagctattcatacacagtgacttgatgttcttggaggatcaacaaaactgccctgggaaagcatccagtggatgaagaagtcaccttcaccaaggaactctattggaagggaaggtctcctgcccctagctcaggtggctggggagaactaaaacaccttcactggtggttgggggtaaggagcggggcacgggggaggaggaggtagggggcagtaaaaaacttactctcttttttcctctctgtaattggttatcaggaagaatttgcttaatgactaacaccctaagcatcagacctggaatttggagttgcaaagtgactatcttcccatttcccatctcattttcaataacttcagcctcccattctttcctttggaatgagagtttctttttacagaagtaggaaaggcttctcagaaaaaaaaaaaaaagtataggctgaatttagctcagtgcttgaaatgggaagatatgaattattatatacgcatctgtccacacatacacacatactgttgtgtacacacacacaacatgcctgtgcacagagccaacaacccttcaaaagtgtgctctgggtgtgtacctctggataaataagatgcatgccaagccaacccacagattttcaccagtgtggggcagtcaccaggcacctgttcaatgagctgtccacatggattgaagatgttttaaaaacacagaaaactcatggcttcaatggcagacttactagtctccatttcaaatgccaactctgagctgctgtacagcacaatctattccctattctctctttgaaaacagttaacccacctcacaggtgaatgaggagagaagatgtgctttctgcttcagtctcttactctgtgtgtgaccacatgcaagagtaaacttgcacctcagtgcttcagttcaaatggggtttccaaccccagtataattaggggtgtttcagagcatccccagttatttagcacaacactgaaggagcacatcccctctccattttgacttctctccccacttttacagccactgccttcatcagttttgtagaggtttgatttccatgtgggttttgttgtcattgttttgcatttttgttttgttattgatattgtttgctttcattgctaaaactcatatacgacttactatgagccaagcactgttctcagtattacataggtatgaattcatttaagtcctgaagaaaaagaaaaaaaaatacgaagtggatattacccttcccattttcaaataaggaaactgaagcacaaaaagaacaagtaacttgacaaggacaccccggtagtaaatcatggggctggagctcaaccccagggtaggctggctccagagctgtgctctccttgactcttctgatggtctcctagctggaagcctcacatttcagtctcattcccccaagtggcccatcagctactccatctctggctccccaactaaacagtttctctcatagtgctggacctccactcactagttttttttccagctgttcttctcttttcttcaggtcactcttctcgaccgagtgcaaaaattatcccctccataccagctttgatgaccttccttccatactcctcaccagacacaacataataggtcacacactcctctgtgctttctggcacgttttaaacattattattattgacctttacctatagtataccatggcctatttatgtatccatctcccctagcatttttcctcaaagacaagaaccatgtcttacccatctcttgggtaagtgcctagcatggtggctgacgcttgggagggtgtcattaaatgttgctcaaaagaacaagcaaacatttaaggtggtggagagcagcctggggacagctgacatgctgcatgcttctcagtaccagcaccatcacaatgcaaaaagcaacatctttcttaacctcagcttattctgtttttcagtctactctgtgagagagcaggaatgagaccagactagcaacaccattgccaagctcaaggactgggctcaatgcagtcactccttcagagagaccccccaccccaagcatgccccactttaaaatagcatgtttattgaagggggcatcctttacagtagctagaaaatgactgaggcccaagccagggttgatcaaggatgtgccattaaggtaaagagttacagagcagggcagagggactctgggggcagaagtggatgatttgcccggcctcttccagggggtctggatacaactgaaggagctttagctacatgaggccctcagagccaaagacaggatgcaaatagagttctagagagtggccgtggaagcagaactccaggtggggaatgttcaatctctgcctcccttaaagcagggccaggctcagctggccccattgttcacttggtcacaagtttcctacctttgtttctggatgagtcaaaggccaggaaggcagttatggagagctcctgcacctccagctgccccacagaaaagcctgcaagagtacttccaggcacaggccctctcccaccctattccatttgtaagcaagggaggtcgaggaaaaggacatctccaaaagggagcataagaatagccatatatacaggggctgaaaaagtgctcatgagtccatcttttctggaaagcaaagaccagcctgaagcagtgggagctgctgcccaagcggtagtgaactggagagaaacaggccctggattttcagtgaggatgtggatctgaagagtcccccaaatgcctctgaagtctgacatctctgcttagccctaggagtctggttccctgccttcagttgcagagtgatgtgtttgtgtcattgttgatgtcacctcctaaaaagaccttcactttctggctgccacaaagccatatgtgttgctccccatatacagcctgacagagtaaatggagaggaagtgctggatttgtgtatcactggctatcagttcctcatgttgttaagcctcacacaggtgtgctagcattgaactgtagagtgtcacatacctgagtttgaaaataaaagcacatttccaaacctcaaaaaaaaaa

SEQ ID NO: 1000 - protein, 821 aa, Homo sapiens
MTGDATSPEGETDKNLANRVHSPHKRLSHRHLKVSTASLTSVDPAGHIIDLVNDQLPDISISEEDKKKNLALLEEAKLVSERFLTRRGRKSRSSPGDSPSAVSPNLSPSASPTSSRSNSLTVPTPPGLDVCSGPPSPLPGAPPQKGDEADVSSPHPGEPNVPKGLADRKQNDQRKVSQGRLAPRPPPVEKSKEIAIEQKENFDPLQYPETTPKGLAPVTNSSGKMALNSPQPGPVESELGKQLLKTGWEGSPLPRSPTQDAAGVGPPASQGRGPAGEPMGPEAGSKAELPPTVSRPPLLRGLSWDSGPEEPGPRLQKVLAKLPLAEEEKRFAGKAGGKLAKAPGLKDFQIQVQPVRMQKLTKLREEHILMRNQNLVGLKLPDLSEAAEQEKGLPSELSPAIEEEESKSGLDVMPNISDVLLRKLRVHRSLPGSAPPLTEKEVENVFVQLSLAFRNDSYTLESRINQAERERNLTEENTEKELENFKASITSSASLWHHCEHRETYQKLLEDIAVLHRLAARLSSRAEVVGAVRQEKRMSKATEVMMQYVENLKRTYEKDHAELMEFKKLANQNSSRSCGPSEDGVPRTARSMSLTLGKNMPRRRVSVAVVPKFNALNLPGQTPSSSSIPSLPALSESPNGKGSLPVTSALPALLENGKTNGDPDCEASAPALTLSCLEELSQETKARMEEEAYSKGFQEGLKKTKELQDLKEEEEEQKSESPEEPEEVEETEEEEKGPRSSKLEELVHFLQVMYPKLCQHWQVIWMMAAVMLVLTVVLGLYNSYNSCAEQADGPLGRSTCSAAQRDSWWSSGLQHEQPTEQ

SEQ ID NO: 1001 - DNA, 3149 bp, Homo sapiens
agggggcgcggtgggaggagtaggagaagacaaaagccgaaagcgaagagggcccgggctgcacacaccggctgggaggcagccgtctgtgcagcgagcagccggcgcggggaggccgcagtgcacggggcgtcacagtcggcaggcagcatggggaagggagggaaccagggcgagggggccgccgagcgcgaggtgtcggtgcccaccttcagctgggaggagattcagaagcataacctgcgcaccgacaggtggctggtcattgaccgcaaggtttacaacatcaccaaatggtccatccagcacccggggggccagcgggtcatcgggcactacgctggagaagatgcaacggatgccttccgcgccttccaccctgacctggaattcgtgggcaagttcttgaaacccctgctgattggtgaactggccccggaggagcccagccaggaccacggcaagaactcaaagatcactgaggacttccgggccctgaggaagacggctgaggacatgaacctgttcaagaccaaccacgtgttcttcctcctcctcctggcccacatcatcgccctggagagcattgcatggttcactgtcttttactttggcaatggctggattcctaccctcatcacggcctttgtccttgctacctctcaggcccaagctggatggctgcaacatgattatggccacctgtctgtctacagaaaacccaagtggaaccaccttgtccacaaattcgtcattggccacttaaagggtgcctctgccaactggtggaatcatcgccacttccagcaccacgccaagcctaacatcttccacaaggatcccgatgtgaacatgctgcacgtgtttgttctgggcgaatggcagcccatcgagtacggcaagaagaagctgaaatacctgccctacaatcaccagcacgaatacttcttcctgattgggccgccgctgctcatccccatgtatttccagtaccagatcatcatgaccatgatcgtccataagaactgggtggacctggcctgggccgtcagctactacatccggttcttcatcacctacatccctttctacggcatcctgggagccctccttttcctcaacttcatcaggttcctggagagccactggtttgtgtgggtcacacagatgaatcacatcgtcatggagattgaccaggaggcctaccgtgactggttcagtagccagctgacagccacctgcaacgtggagcagtccttcttcaacgactggttcagtggacaccttaacttccagattgagcaccacctcttccccaccatgccccggcacaacttacacaagatcgccccgctggtgaagtctctatgtgccaagcatggcattgaataccaggagaagccgctactgagggccctgctggacatcatcaggtccctgaagaagtctgggaagctgtggctggacgcctaccttcacaaatgaagccacagcccccgggacaccgtggggaaggggtgcaggtggggtgatggccagaggaatgatgggcttttgttctgaggggtgtccgagaggctggtgtatgcactgctcacggaccccatgttggatctttctccctttctcctctcctttttctcttcacatctcccccatagcaccctgccctcatgggacctgccctccctcagccgtcagccatcagccatggccctcccagtgcctcctagccccttcttccaaggagcagagaggtggccaccgggggtggctctgtcctacctccactctctgcccctaaagatgggaggagaccagcggtccatgggtctggcctgtgagtctccccttgcagcctggtcactaggcatcacccccgctttggttcttcagatgctcttggggttcataggggcaggtcctagtcgggcagggcccctgaccctcccggcctggcttcactctccctgacggctgccattggtccaccctttcatagagaggcctgctttgttacaaagctcgggtctccctcctgcagctcggttaagtacccgaggcctctcttaagatgtccagggccccaggcccgcgggcacagccagcccaaaccttgggccctggaagagtcctccaccccatcactagagtgctctgaccctgggctttcacgggccccattccaccgcctccccaacttgagcctgtgaccttgggaccaaagggggagtccctcgtctcttgtgactcagcagaggcagtggccacgttcagggaggggccggctggcctggaggctcagcccaccctccagcttttcctcagggtgtcctgaggtccaagattctggagcaatctgacccttctccaaaggctctgttatcagctgggcagtgccagccaatccctggccatttggccccaggggacgtgggccctgcaggctgcaggagggcactggagctgggaggtctcgtcccagccctccccatctcggggctgctgtgtggacggcgctgcctcaggcactctcctgtctgaacctgcccttactgtgtttaacctgttgctccaggatgcattctgataggagggggcggcagggctgggccttgtgacaatctgcctttcaccacatggccttgcctcggtggccctgactgtcagggagggccagggaggcagagcgggagggagtctcaggaggaggctgccctgaggggctggggagggggtacctcatgaggaccagggtggagctgagaagaggaggaggtgggggctggaggtgctggtagctgaggggacgggcaagtgagaggggagggagggaagtcctgggaggatcctgagctgctgttgcagtctaacccactaatcagttcttagattcaggggaagggcaggcaccaacaactcagaatgggggctttcggggagggcgcctagtccccccagctctaagcagccaggagggacctgcatctaagcatctgggttgccatggcaatggcatgccccccagctactgtatgcccccgacccccgcagaggcagaatgaacccatagggagctgatcgtaatgtttatcatgttacttccccacccctacattttttgaaataaaataaggaattttattctc

SEQ ID NO: 1002 - protein, 444 aa, Homo sapiens
MGKGGNQGEGAAEREVSVPTFSWEEIQKHNLRTDRWLVIDRKVYNITKWSIQHPGGQRVIGHYAGEDATDAFRAFHPDLEFVGKFLKPLLIGELAPEEPSQDHGKNSKITEDFRALRKTAEDMNLFKTNHVFFLLLLAHIIALESIAWFTVFYFGNGWIPTLITAFVLATSQAQAGWLQHDYGHLSVYRKPKWNHLVHKFVIGHLKGASANWWNHRHFQHHAKPNIFHKDPDVNMLHVFVLGEWQPIEYGKKKLKYLPYNHQHEYFFLIGPPLLIPMYFQYQIIMTMIVHKNWVDLAWAVSYYIRFFITYIPFYGILGALLFLNFIRFLESHWFVWVTQMNHIVMEIDQEAYRDWFSSQLTATCNVEQSFFNDWFSGHLNFQIEHHLFPTMPRHNLHKIAPLVKSLCAKHGIEYQEKPLLRALLDIIRSLKKSGKLWLDAYLHK

SEQ ID NO: 1003 - DNA, 1807 bp, Homo sapiens
cgcacgctcgctcgtacggcggccgcggcggcagggcggggccggagcagcgggcggcggcggaggcggcgcccgggagcgctcttcgcttccctcggggtcttgctcggacctcggccaccgcctgggatccccaggactcgtgcgtgcagcatgggcggcgtcggggagccgggaccgcgggagggacccgcgcagccgggggcgccgctgcccaccttctgctgggagcagatccgcgcgcacgaccagcccggcgacaagtggctggtcatcgagcgccgcgtctacgacatcagccgctgggcacagcggcacccagggggcagccgcctcatcggccaccacggcgctgaggacgccacggatgccttccgtgccttccatcaagatctcaattttgtgcgcaagttcctacagcccctgttgattggagagctggctccggaagaacccagccaggatggacccctgaatgcgcagctggtcgaggacttccgagccctgcaccaggcagccgaggacatgaagctgtttgatgccagtcccaccttctttgctttcctactgggccacatcctggccatggaggtgctggcctggctccttatctacctcctgggtcctggctgggtgcccagtgccctggccgccttcatcctggccatctctcaggctcagtcctggtgtctgcagcatgacctgggccatgcctccatcttcaagaagtcctggtggaaccacgtggcccagaagttcgtgatggggcagctaaagggcttctccgcccactggtggaacttccgccacttccagcaccacgccaagcccaacatcttccacaaagacccagacgtgacggtggcgcccgtcttcctcctgggggagtcatccgtcgagtatggcaagaagaaacgcagatacctaccctacaaccagcagcacctgtacttcttcctgatcggcccgccgctgctcaccctggtgaactttgaagtggaaaatctggcgtacatgctggtgtgcatgcagtgggcggatttgctctgggccgccagcttctatgcccgcttcttcttatcctacctccccttctacggcgtccctggggtgctgctcttctttgttgctgtcagggtcctggaaagccactggttcgtgtggatcacacagatgaaccacatccccaaggagatcggccacgagaagcaccgggactgggtcagctctcagctggcagccacctgcaacgtggagccctcacttttcaccaactggttcagcgggcacctcaacttccagatcgagcaccacctcttccccaggatgccgagacacaactacagccgggtggccccgctggtcaagtcgctgtgtgccaagcacggcctcagctacgaagtgaagcccttcctcaccgcgctggtggacatcgtcaggtccctgaagaagtctggtgacatctggctggacgcctacctccatcagtgaaggcaacacccaggcgggcagagaagggctcagggcaccagcaaccaagccagcccccggcgggatcgatacccccacccctccactggccagcctgggggtgccctgcctgccctcctggtactgttgtcttcccctcggccccctcacatgtgtattcagcagccctatggccttggctctgggcctgatgggacaggggtagagggaaggtgagcatagcacattttcctagagcgagaattgggggaaagctgttatttttatattaaaatacattcagatgtaaaaaaaaaaaaaaaaaaaaaaaaaaaaa

SEQ ID NO: 1004 - protein, 445 aa, Homo sapiens
MGGVGEPGPREGPAQPGAPLPTFCWEQIRAHDQPGDKWLVIERRVYDISRWAQRHPGGSRLIGHHGAEDATDAFRAFHQDLNFVRKFLQPLLIGELAPEEPSQDGPLNAQLVEDFRALHQAAEDMKLFDASPTFFAFLLGHILAMEVLAWLLIYLLGPGWVPSALAAFILAISQAQSWCLQHDLGHASIFKKSWWNHVAQKFVMGQLKGFSAHWWNFRHFQHHAKPNIFHKDPDVTVAPVFLLGESSVEYGKKKRRYLPYNQQHLYFFLIGPPLLTLVNFEVENLAYMLVCMQWADLLWAASFYARFFLSYLPFYGVPGVLLFFVAVRVLESHWFVWITQMNHIPKEIGHEKHRDWVSSQLAATCNVEPSLFTNWFSGHLNFQIEHHLFPRMPRHNYSRVAPLVKSLCAKHGLSYEVKPFLTALVDIVRSLKKSGDIWLDAYLHQ

SEQ ID NO: 1005 - DNA, 2305 bp, Homo sapiens
cgagcccaggcgtctgagacctactgactggccgcgggcagggctgacaggcggtggggcggctcggcccctggcggagtcggcggcgggcggggacgcggcgctgggaggacgcggcggcgctgggaacggacgcctgggcgccccgaggcgccgggatgtggagcggcccaccccagccagaccagggcctcccgccgccccttgcagctgtcccggtcccctggaagagcacggacccctgccaaggccacagggagtccccaggagccctggtggagacctctgcaggggaggaggcccaaggccaggagggccccgcagccgcccagctggacgtgttgcgcctgcgcagctcttccatggagatccgagagaagggctccgagttcctgaaggaggagctgcacagagcgcagaaggagctgaagctaaaggacgaggaatgtgagcggctgtccaaggtgcgggagcagctagaacaggagctggaagagctgacggccagcctgtttgaggaagctcacaagatggttcgagaagccaacatgaagcaggcggcatcagaaaagcagctgaaggaggctcggggcaagatcgacatgctgcaggcagaggtgacagccttgaagacactggtcatcacgtccacaccagcctctcccaaccgcgagcttcacccccagctgctgagccccaccaaggccgggccccgaaagggccactctcgccacaagagcaccagcagcaccctctgccccgccgtgtgtcccgctgcgggacacaccctcaccccagacagagagggcaaggaggtggacacaatcctgtttgcagagttccaggcctggagggaatcccccaccctggacaagacctgccccttcctggaaagggtgtaccgagaggacgtgggcccctgcctggacttcacaatgcaggagctctcggtgctggtacgggccgccgtggaggacaacacgctcaccattgagccggtggcttcgcagacgctgcccacagtgaaggtggccgaggttgactgtagcagcaccaacacatgtgccctgagcgggctgacccgcacctgccgccaccgaatccggctcggggactccaaaagccattactacatctcgccatcttcccgggccaggatcaccgcagtgtgcaacttcttcacctacatccgctacatccagcaaggcctggtgcggcaggacgcagagcccatgttctgggagatcatgaggttgcggaaggagatgtcactggccaagctcggcttcttcccccaggaggcttagggcgcggcccaggcctgaaggggagctctgagacagagcaaacacccaccccagaacaagccgacacacagggagacgggggcctggagccagccctgagccagaggcagaatggatggacagacaggccatggaggcagcactgagccagcaccacacgtccatcctgggacagacgggcctggacttcacggcaagacccccctctcttccccactgggttctgccaccaccaggaggatttcaagaaagcaccaaagaccagggagctcggatccatactcggggggcctcagcccttgggaggggacacctgaggcagccagcgccccctccccagtccccagaactgcctgcaggtgccttgttgctggcttgtcttcagaaagggactgttctgggtggctggatctccagggtaccctccaccccagctgccaagccctgggccagcagcacccccttgtggccatcctgtgccttgttcccggtggcctccctattggactactaggaggggctggcagggcctccatagcacagaattgccccaaagccttgttaagatgagtcaagacccctcccccgcttcctcccttcctttcccccttcctccctcccccttcataaaggcctcccttgtcaccttccctcccaccccgtctcagccctgtgctcctggaggccctgctcccaaaaccgctggaaggactggggcactttctgccacagtagaacacagacagggcttcagatcacccacgcctgttttcagctgtgggtggccatgcagacacgcgccctggcatgtggggcctgggtgggcaggcaggacctgggccctcccacccatcagagcccactcaggaccagcgttcggagctcccacctggacgcatccctcaccacgtccggatttccttctttggatggaatgtaacgcgatctctatttaataaaggcaggctttgttggtaaaaaaaaaaaaaaaaaaaaaa

SEQ ID NO: 1006 - protein, 382 aa, Homo sapiens
MWSGPPQPDQGLPPPLAAVPVPWKSTDPCQGHRESPGALVETSAGEEAQGQEGPAAAQLDVLRLRSSSMEIREKGSEFLKEELHRAQKELKLKDEECERLSKVREQLEQELEELTASLFEEAHKMVREANMKQAASEKQLKEARGKIDMLQAEVTALKTLVITSTPASPNRELHPQLLSPTKAGPRKGHSRHKSTSSTLCPAVCPAAGHTLTPDREGKEVDTILFAEFQAWRESPTLDKTCPFLERVYREDVGPCLDFTMQELSVLVRAAVEDNTLTIEPVASQTLPTVKVAEVDCSSTNTCALSGLTRTCRHRIRLGDSKSHYYISPSSRARITAVCNFFTYIRYIQQGLVRQDAEPMFWEIMRLRKEMSLAKLGFFPQEA

SEQ ID NO: 1007 - DNA, 339 bp, Homo sapiens
atgaatgtgggcatctacatggtgctaggaccctccaaatacatggagctaggaccctcaaaatacatgaagctaggaccctcaaaatatatggagctaggaccctcaaaatacacagagctaggaccctcaaaatacacggaactaggaccctcagaatacacagagctaggaccctcaaaatacatgaagctaggaccctcaaaatacatggagctaagaccctccaaatacatggagctaggaccctccaactacatgaagcgaggaccctcaaaatacatggagctaagaccctccaaatacatggagctaggaccctccaactacatgaagtga

SEQ ID NO: 1008 - protein, 112 aa, Homo sapiens
MNVGIYMVLGPSKYMELGPSKYMKLGPSKYMELGPSKYTELGPSKYTELGPSEYTELGPSKYMKLGPSKYMELRPSKYMELGPSNYMKRGPSKYMELRPSKYMELGPSNYMK

SEQ ID NO: 1009 - DNA, 456 bp, Homo sapiens
atgaaccacactgtccaaaccttcttctctcctgtcaacagcagccagcccccccaactatgagatgctcaaggaggaacacgacgtggctgtgcgggggcaccccacaaccctgctcccccgacatccactgtgatccacatccgcagcgagacctccgtgcccgaccatgttgtctggtccctgttcaacgccctcttcatgaacccctgccgcccgggcttcaaggcattcgcctactccgtgtagtctagggacaggaagatggttggcgacctgactggggcccaggcctatgcctccaccgccaagtgcctgaacatctgggccctgattttgggcatcctcacgaccattctgctcatcgtcatcccagtgttgatcatccaagcccatcgatagatcaggaggcatcattgaggccaggagctctgcccatgacctgtatcccacgta

SEQ ID NO: 1010 - DNA, 5227 bp, Homo sapiens
gctcctcctccgctccgccagtgtccggccgcgggccggccttagtgactggggcggcgggccccggggccgcggcgtggggcgggcaggcggacgccggccgcgggctgctttcgtcggctcccaagctctcccggagcgagcagccgcccgcgagccgccgcggagcctcctcgcccgctcccgccggcgagcaagatgatgtgcgaggtgatgccgaccatcagcgaagcagaaggcccccctggaggaggtggaggccatggttccggctccccttcacagccagatgcagattcacattttgaacagttgatggtctccatgctagaagaaagggaccgccttcttgatacactgagagagactcaagaaacgctggccttaacccaggggaagttacacgaggttggtcatgaaagagattccttgcagagacagctcaacacggcacttccacaggagttcgcagcacttactaaagaactcaatgtatgcagggaacagctccttgaaagggaagaagaaattgctgaactgaaagcagaaaggaataacaccaggctgctgttagagcatttggaatgccttgtctccaggcatgagcggtctcttaggatgaccgtggtgaagagacaagcgcagtctccagcaggcgtgtccagcgaagtggaagtgctgaaagcactgaagtccttatttgaacaccacaaagctctggatgaaaaggtgagagagcgattacgagtagcacttgaaagatgtagtttgttagaagaggaattaggtgccacacacaaagagctaatgattcttaaagaacagaataatcagaaaaaaactctaacagatggagtgctggacataaaccatgaacaagaaaatacaccaagcacgagtggaaagagatcttctgatggttctttaagccacgaggaagaccttgctaaagtaattgagctccaagaaatcataagtaagcagtcaagggaacagagccaaatgaaagaacgcctggcttccctttccagtcatgtgacagaactggaagaggatctggacacggctagaaaagatctcatcaaatctgaagaaatgaacacaaaattgcaacgagatgtccgtgaagccatggcccaaaaggaagatatggaagagagaatcactactcttgaaaaacgctacctcgctgcacagcgtgaagccacatctgtgcatgacctcaatgataaacttgaaaatgaaattgcaaataaagattctatgcatcgacagactgaagataaaaaccgccagttacaggagcgcttggaattggcagagcaaaagctgcaacagacactgaggaaggcagagacgctcccggaggtggaggcggagctggcccagagggtggcagcgctttccaaggctgaagagagacacggcaacattgaagaaaggttacgacagatggaagcacagttggaggagaagaatcaagaactgcagcgggcaaggcaaagagaaaaaatgaacgaagaacataataaacgtttatcagacactgttgacaagctgctttcagaatctaatgagaggcttcaacttcatcttaaagagagaatggctgctttggaagataagaactctcttttaagagaagttgaaagtgcaaaaaagcagttagaagaaacacaacacgataaggatcagcttgtcctaaacattgaagcactgagggctgaactagaccacatgagactaagaggtgcttcacttcatcatggccgaccccacttgggcagtgtcccagatttcaggttccccatggcagacggccacacagactcctacagcaccagtgcagtgctgcggcgcccacagaaaggccggctggcagccctgcgagatgagccttccaaggtacaaactcttaatgagcaggattgggaacgtgcccagcaagctagtgtcttggcaaatgtagcacaagcattcgagagtgatgctgacgtgtctgatggtgaagatgacagggacactctcctcagctcagttgacctgctatcgcccagcgggcaggccgacgcgcacacactagccatgatgcttcaggagcagctggacgccatcaacaaagagatcaggttgattcaggaagaaaaagaaaatacagagcagcgggcagaggagattgaaagtcgagttggcagtggaagtctagacaatcttggtcgttttagatcaatgagctccattcccccctaccctgcttcctcgcttgctagctcctcccctccgggcagtgggcgctccaccccacgaaggatccctcacagcccagctcgggaagtggacagactgggcgtcatgacccttttgccaccttccagagaagaggtacgagatgacaagacaaccataaagtgtgaaacctccccgccttcctccccgagagcccttcggttagaccggctgcacaaaggggcgctgcacaccgtcagccacgaggacatcagggacataaggaactccacaggctcccaggatggtcccgtgagcaaccccagcagtagcaacagtagccaggactcgctccacaaagccccaaagaagaaaggcattaagtcctccattggccgcttgtttggcaagaaagaaaagggccgacctggacaaactggcaaagaagcattaggacaagctggtgtttccgagacggataactcatctcaggatgccttgggacttagcaaattggggggacaggctgaaaaaaatcgtaaacttcaaaaaaagcatgaattgctggaggaagcccggagacaaggtttaccttttgcccaatgggacgggccaacggttgtggtctggctagagctctgggttgggatgccagcctggtatgtggctgcctgccgagcaaacgtgaaaagcggggccatcatgtcggccctgtccgacacagagatccagcgtgagattggcatcagcaaccccctgcacaggctgaagctgaggctggccatccaggagatcatgtcgctgaccagcccgtctgccccgcccacatctagaacgacactcgcctatggggacatgaaccacgagtggatcggcaacgagtggctccccagcctgggcctcccccagtaccgcagctacttcatggagtgccttgtagacgccaggatgctggaccacttgaccaagaaagaccttcgagggcagctgaaaatggtcgacagttttcacagaaacagtttccagtgtggaattatgtgcctgagaaggttaaattatgaccggaaagaactggaaagaaaaagagaagaaagtcagagtgaaataaaagacgtgcttgtttggagcaatgatcgagtgattcgctggatcctgtcaattggccttaaagaatatgcaaacaatcttatagagagtggtgttcacggagcacttctggccttagatgaaaccttcgacttcagtgcactggcactgctgttacagatcccgacgcagaacacacaggctcgtgctgtcttggaaagagaatttaacaaccttttggtcatggggactgatagaaggtttgatgaagatgatgataaaagctttaggagagcaccttcatggagaaaaaagtttagaccaaaggacattcgtggcttagctgctgggtcagcagagactctccctgcaaacttccgggtgacttcttctatgtcttccccctctatgcagccaaagaagatgcagatggacggcaatgtatcaggaacacagaggttggattctgctacagtcaggacttactcctgctaaagtctcctgttgtttacccacactacttctacagatgattatgcagcatttgaatccaacaaagactacattttggaatccagtggaatctttaatcttgttaatacttgttatatggaccctaagatattttattacagagtttttaattagtgaaaaattcatgaataccatagagaaaatattttagaatttaatgtttcttatatttatgtaaacttatgactcttcatttatatagttacttactttttcatgtatatccaggctataaatatcctttcaaatcatgttcttatacctaattttagtctttcaaatgaatgtactgtaatgcttgtatgtataaatcctatgaatagagggcttttgtaaattatgcatttattgtaattatcattaattttttaatgataaaccatgacaaaggattttacgtttataaaattatgacagaagccatgtgcattatcctttacggacgcagcctagctctacagcaatcatcctgaaataagcatacctaatttcaagcaattgttgtattttcatgactgaccttaactgtactttttctagcaagagatgctttattctgcagcatgaacagatttaaaatggctggtgttaaatatcagctcctaataagatgtggactgaaaacactatcacaacactatgagaagcccctagcactggttaacgctttcctagcctagtctctggatttggggagcttgtcttcagtggctgagactgtgagctgggagcagttctctcagctggagagactcgggatggggtaacctggggaccagtctagcccctgcaccctcttccctgcctctgctccttgggagcgggtggagagacacccatgtggctccccttagggccagcaccaagcaccacgctctcatcctgcaagtcggcgcacacagtggatgaaggcaggagacccagaaagcagtgcagtgcagctctaataaaggccttatttttcttatgtaaatcatctttttacatttgtttgtaaacatgtttaaagaacgaacctagtgggacatttttagactttgatgctctagccattttggattgtgtaagttgcagatgtggcttttactttttaaatggcatattaacaagccagcaaagtgtgtcagaccatggcgtggtatttattgtgcagcagatccagagacagaggcagcctgtcttttcagttggtttctgcttttaatttacttgtacaattcattgttactgttctgtttttctattaatcttttgtcaacttcctgattatgtaacaaagtatgtacagtctacttttgaactatttttatcacagtattatttattgctttctttcaataaagtactgaagcattttccactgccaaaaaaaaaaaaaaaa

SEQ ID NO: 1011 - protein, 1202 aa, Homo sapiens
MMCEVMPTISEAEGPPGGGGGHGSGSPSQPDADSHFEQLMVSMLEERDRLLDTLRETQETLALTQGKLHEVGHERDSLQRQLNTALPQEFAALTKELNVCREQLLEREEEIAELKAERNNTRLLLEHLECLVSRHERSLRMTVVKRQAQSPAGVSSEVEVLKALKSLFEHHKALDEKVRERLRVALERCSLLEEELGATHKELMILKEQNNQKKTLTDGVLDINHEQENTPSTSGKRSSDGSLSHEEDLAKVIELQEIISKQSREQSQMKERLASLSSHVTELEEDLDTARKDLIKSEEMNTKLQRDVREAMAQKEDMEERITTLEKRYLAAQREATSVHDLNDKLENEIANKDSMHRQTEDKNRQLQERLELAEQKLQQTLRKAETLPEVEAELAQRVAALSKAEERHGNIEERLRQMEAQLEEKNQELQRARQREKMNEEHNKRLSDTVDKLLSESNERLQLHLKERMAALEDKNSLLREVESAKKQLEETQHDKDQLVLNIEALRAELDHMRLRGASLHHGRPHLGSVPDFRFPMADGHTDSYSTSAVLRRPQKGRLAALRDEPSKVQTLNEQDWERAQQASVLANVAQAFESDADVSDGEDDRDTLLSSVDLLSPSGQADAHTLAMMLQEQLDAINKEIRLIQEEKENTEQRAEEIESRVGSGSLDNLGRFRSMSSIPPYPASSLASSSPPGSGRSTPRRIPHSPAREVDRLGVMTLLPPSREEVRDDKTTIKCETSPPSSPRALRLDRLHKGALHTVSHEDIRDIRNSTGSQDGPVSNPSSSNSSQDSLHKAPKKKGIKSSIGRLFGKKEKGRPGQTGKEALGQAGVSETDNSSQDALGLSKLGGQAEKNRKLQKKHELLEEARRQGLPFAQWDGPTVVVWLELWVGMPAWYVAACRANVKSGAIMSALSDTEIQREIGISNPLHRLKLRLAIQEIMSLTSPSAPPTSRTTLAYGDMNHEWIGNEWLPSLGLPQYRSYFMECLVDARMLDHLTKKDLRGQLKMVDSFHRNSFQCGIMCLRRLNYDRKELERKREESQSEIKDVLVWSNDRVIRWILSIGLKEYANNLIESGVHGALLALDETFDFSALALLLQIPTQNTQARAVLEREFNNLLVMGTDRRFDEDDDKSFRRAPSWRKKFRPKDIRGLAAGSAETLPANFRVTSSMSSPSMQPKKMQMDGNVSGTQRLDSATVRTYSC

SEQ ID NO: 1012 - DNA, 3945 bp, Homo sapiens
gctcctcctccgctccgccagtgtccggccgcgggccggccttagtgactggggcggcgggccccggggccgcggcgtggggcgggcaggcggacgccggccgcgggctgctttcgtcggctcccaagctctcccggagcgagcagccgcccgcgagccgccgcggagcctcctcgcccgctcccgccggcgagcaagatgatgtgcgaggtgatgccgaccatcagcgaagcagaaggcccccctggaggaggtggaggccatggttccggctccccttcacagccagatgcagattcacattttgaacagttgatggtctccatgctagaagaaagggaccgccttcttgatacactgagagagactcaagaaacgctggccttaacccaggggaagttacacgaggttggtcatgaaagagattccttgcagagacagctcaacacggcacttccacaggagttcgcagcacttactaaagaactcaatgtatgcagggaacagctccttgaaagggaagaagaaattgctgaactgaaagcagaaaggaataacaccaggctgctgttagagcatttggaatgccttgtctccaggcatgagcggtctcttaggatgaccgtggtgaagagacaagcgcagtctccagcaggcgtgtccagcgaagtggaagtgctgaaagcactgaagtccttatttgaacaccacaaagctctggatgaaaaggtgagagagcgattacgagtagcacttgaaagatgtagtttgttagaagaggaattaggtgccacacacaaagagctaatgattcttaaagaacagaataatcagaaaaaaactctaacagatggagtgctggacataaaccatgaacaagaaaatacaccaagcacgagtggaaagagatcttctgatggttctttaagccacgaggaagaccttgctaaagtaattgagctccaagaaatcataagtaagcagtcaagggaacagagccaaatgaaagaacgcctggcttccctttccagtcatgtgacagaactggaagaggatctggacacggctagaaaagatctcatcaaatctgaagaaatgaacacaaaattgcaacgagatgtccgtgaagccatggcccaaaaggaagatatggaagagagaatcactactcttgaaaaacgctacctcgctgcacagcgtgaagccacatctgtgcatgacctcaatgataaacttgaaaatgaaattgcaaataaagattctatgcatcgacagactgaagataaaaaccgccagttacaggagcgcttggaattggcagagcaaaagctgcaacagacactgaggaaggcagagacgctcccggaggtggaggcggagctggcccagagggtggcagcgctttccaaggctgaagagagacacggcaacattgaagaaaggttacgacagatggaagcacagttggaggagaagaatcaagaactgcagcgggcaaggcaaagagaaaaaatgaacgaagaacataataaacgtttatcagacactgttgacaagctgctttcagaatctaatgagaggcttcaacttcatcttaaagagagaatggctgctttggaagataagaactctcttttaagagaagttgaaagtgcaaaaaagcagttagaagaaacacaacacgataaggatcagcttgtcctaaacattgaagcactgagggctgaactagaccacatgagactaagaggtgcttcacttcatcatggccgaccccacttgggcagtgtcccagatttcaggttccccatggcagacggccacacagactcctacagcaccagtgcagtgctgcggcgcccacagaaaggccggctggcagccctgcgagatgagccttccaaggtacaaactcttaatgagcaggattgggaacgtgcccagcaagctagtgtcttggcaaatgtagcacaagcattcgagagtgatgctgacgtgtctgatggtgaagatgacagggacactctcctcagctcagttgacctgctatcgcccagcgggcaggccgacgcgcacacactagccatgatgcttcaggagcagctggacgccatcaacaaagagatcaggttgattcaggaagaaaaagaaaatacagagcagcgggcagaggagattgaaagtcgagttggcagtggaagtctagacaatcttggtcgttttagatcaatgagctccattcccccctaccctgcttcctcgcttgctagctcctcccctccgggcagtgggcgctccaccccacgaaggatccctcacagcccagctcgggaagtggacagactgggcgtcatgacccttttgccaccttccagagaagaggtacgagatgacaagacaaccataaagtgtgaaacctccccgccttcctccccgagagcccttcggttagaccggctgcacaaaggggcgctgcacaccgtcagccacgaggacatcagggacataaggaactccacaggctcccaggatggtcccgtgagcaaccccagcagtagcaacagtagccaggactcgctccacaaagccccaaagaagaaaggcattaagtcctccattggccgcttgtttggcaagaaagaaaagggccgacctggacaaactggcaaagaagcattaggacaagctggtgtttccgagacggataactcatctcaggatgccttgggacttagcaaattggggggacaggctgaaaaaaatcgtaaacttcaaaaaaagcatgaattgctggaggaagcccggagacaaggtttaccttttgcccaatgggacgggccaacggttgtggtctggctagagctctgggttgggatgccagcctggtatgtggctgcctgccgagcaaacgtgaaaagcggggccatcatgtcggccctgtccgacacagagatccagcgtgagattggcatcagcaaccccctgcacaggctgaagctgaggctggccatccaggagatcatgtcgctgaccagcccgtctgccccgcccacatctagaacgacactcgcctatggggacatgaaccacgagtggatcggcaacgagtggctccccagcctgggcctcccccagtaccgcagctacttcatggagtgccttgtagacgccaggatgctggaccacttgaccaagaaagaccttcgagggcagctgaaaatggtcgacagttttcacagaaacagtttccagtgtggaattatgtgcctgagaaggttaaattatgaccggaaagaactggaaagaaaaagagaagaaagtcagagtgaaataaaagacgtgcttgtttggagcaatgatcgagtgattcgctggatcctgtcaattggccttaaagaatatgcaaacaatcttatagagagtggtgttcacggagcacttctggccttagatgaaaccttcgacttcagtgcactggcactgctgttacagatcccgacgcagaacacacaggctcgtgctgtcttggaaagagaatttaacaaccttttggtcatggggactgatagaaggtttgatgaagatgatgataaaagctttaggagagcaccttcatggagaaaaaagtttagaccaaaggacattcgtggcttagctgctgggtcagcagagactctccctgcaaacttccgggtgacttcttctatgtcttccccctctatgcagccaaagaagatgcagatggacggtatgtgatgggtcacactaacctgtcacttgttgggagcatgagcagctttctgtctggaacattaataatgatctaaaacggcctatttaatatgttacaaggcacttgagtatggttgcatgtccaaatataaatgtttttaaattaactctaacatttgtttataaaagtttaaccataataatagaattttt

SEQ ID NO: 1013 - protein, 1185 aa, Homo sapiens
MMCEVMPTISEAEGPPGGGGGHGSGSPSQPDADSHFEQLMVSMLEERDRLLDTLRETQETLALTQGKLHEVGHERDSLQRQLNTALPQEFAALTKELNVCREQLLEREEEIAELKAERNNTRLLLEHLECLVSRHERSLRMTVVKRQAQSPAGVSSEVEVLKALKSLFEHHKALDEKVRERLRVALERCSLLEEELGATHKELMILKEQNNQKKTLTDGVLDINHEQENTPSTSGKRSSDGSLSHEEDLAKVIELQEIISKQSREQSQMKERLASLSSHVTELEEDLDTARKDLIKSEEMNTKLQRDVREAMAQKEDMEERITTLEKRYLAAQREATSVHDLNDKLENEIANKDSMHRQTEDKNRQLQERLELAEQKLQQTLRKAETLPEVEAELAQRVAALSKAEERHGNIEERLRQMEAQLEEKNQELQRARQREKMNEEHNKRLSDTVDKLLSESNERLQLHLKERMAALEDKNSLLREVESAKKQLEETQHDKDQLVLNIEALRAELDHMRLRGASLHHGRPHLGSVPDFRFPMADGHTDSYSTSAVLRRPQKGRLAALRDEPSKVQTLNEQDWERAQQASVLANVAQAFESDADVSDGEDDRDTLLSSVDLLSPSGQADAHTLAMMLQEQLDAINKEIRLIQEEKENTEQRAEEIESRVGSGSLDNLGRFRSMSSIPPYPASSLASSSPPGSGRSTPRRIPHSPAREVDRLGVMTLLPPSREEVRDDKTTIKCETSPPSSPRALRLDRLHKGALHTVSHEDIRDIRNSTGSQDGPVSNPSSSNSSQDSLHKAPKKKGIKSSIGRLFGKKEKGRPGQTGKEALGQAGVSETDNSSQDALGLSKLGGQAEKNRKLQKKHELLEEARRQGLPFAQWDGPTVVVWLELWVGMPAWYVAACRANVKSGAIMSALSDTEIQREIGISNPLHRLKLRLAIQEIMSLTSPSAPPTSRTTLAYGDMNHEWIGNEWLPSLGLPQYRSYFMECLVDARMLDHLTKKDLRGQLKMVDSFHRNSFQCGIMCLRRLNYDRKELERKREESQSEIKDVLVWSNDRVIRWILSIGLKEYANNLIESGVHGALLALDETFDFSALALLLQIPTQNTQARAVLEREFNNLLVMGTDRRFDEDDDKSFRRAPSWRKKFRPKDIRGLAAGSAETLPANFRVTSSMSSPSMQPKKMQMDGM

SEQ ID NO: 1014 - DNA, 3430 bp, Homo sapiens
agacgtttcccgccggcgggagctgtggctgtgattgagagaggggttagaggcgggtcccagcgctgccgcaccatggcggaccagctttatctggaaaatatagacgagttcgtcacggaccaaaacaagatcgtgacatacaaatggctgagctatacactaggggttcatgttaaccaggccaaacagatgctgtatgattatgttgaaaggaaacgaaaagaaaattcaggagcccaactgcatgttacctacttggtgtctggcagtctcattcagaatggacattcctgccacaaggttgcagtagtgagagaagataaattggaagcagtgaagtccaagctagctgtgactgccagcatccatgtgtacagcatccagaaagccatgctaaaggacagtgggcctctgttcaatactgactatgacatccttaaaagcaacttgcagaactgcagcaaatttagtgctatacaatgtgcagctgccgtccctagagctcctgctgaatcctcttcgtcttccaaaaagtttgagcagtcacatcttcacatgtcaagtgagacacaagccaacaatgagctgaccaccaatggtcatggcccacctgcatccaagcaggtttcccagcagcccaaaggaattatgggaatgtttgcctccaaagctgctgctaaaacccaagaaaccaacaaggaaacgaaaacagaggctaaagaagtaacaaatgcatctgcagcaggcaacaaggcaccagggaaagggaatatgatgagcaacttttttggaaaagctgctatgaataaatttaaagtcaatttggactcagaacaagcagtgaaagaagaaaaaatagtggagcagcctacagtgtctgtcacggaaccaaagctggcaactcctgcaggcctgaaaaaatccagcaaaaaagcagagcctgttaaggtgctgcagaaggaaaaaaaaagggggaagcgagtagcattatctgatgatgagacaaaggaaactgaaaacatgaggaaaaagaggagaagaatcaaacttcctgaatctgatagcagtgaagatgaagtctttccagactctcctggggcttatgaagctgagtcaccatccccacctcctcctccgtctccacctcttgaaccagtgccaaagactgagcctgaacctccttctgtcaagagctcaagtggagaaaacaaaagaaaacgaaaacgcgtactaaaatctaaaacttacctggatggggaaggctgcatagtgactgaaaaagtctacgagagtgaatcctgcacagatagtgaagaggagcttaacatgaagacatcctcagtacacagaccccctgccatgactgtgaaaaaagaacccagagaggaacgaaagggccccaagaaagggactgctgctctgggcaaagccaacagacaggtgtccattactggcttcttccagaggaaataaactgccatctctggtagatcagagacttggagtggtcaagggagaagaccaagaaatgtactcctcacttactatgtaagttcatctagatctccacctcacctgtatcaaaagactgttctttcatcctgtgaggtttatactatttctggtttttaaccaaaaggaaatcatctggaagcaggaggcaaaaagctgttaccttctaatgacatttaaaaagcacagtctttgacctgtccaggagaaggatttactccaaaattatactggaacagttttcagaattctcactgaagccatttagtggctaacccactgtgctccactcaccctatgccctggtccgcatatggcacaggaattattccttcttgttcctctgtattctaagaattcatgtgggtgtttcttatccttacattctgctggatacgtttacccctcttgtcttcctgcagtaccacacttctgtcccctaacctcctgaggctgttctctgtaagtcttttaagttttggttggactaaaggctgaagtgaaaatctccctgtaatcctcttcctccattatgcagtacacggacacctggctacagaccaggacgtggcttgtgttctgttcctttcacaaaagctctctgggaccttcacttgcaattagtggttagggaaaagcctcaggcagaacacaaatagaaatttaatgatgtgttcaactccaccagaaattacctcgagtcagcattgacgatattggaggagctgccgtgctgctgatacggggtgtgctttatgctgctctttgcggtttgttgatcccctcctcccccactctcaatacctagagagtgaaacccgtacaatgagataaagactaaaaagagaaatcccttcctatatacagtgtgctacatttacaaaaaatttctccttaagaaaacagaatattcaaaaacagcacttttccaggaagttagtgaggaagataaggcacacatttatttataaatggatgttgctcctttgtatttttagcttccctatttgcttaaaagtacaggctccctaagagaggatggagagggagagactgaattgttagtaggtctaaacatcaaagaaaacatttttattagttacttatggaaaatcatctattacaatgataaccttcaagtgacttccattatggctggacaggcggtgagctcagtggattgcagtggtgtgctggtgattttgcacagtgagctctgcggaaggggtcaggctcaactgctgatgtgtctcacacgtagcagacaaggggtgtctgactggcttcttttgcctcaagatggtgtatgtcgtaagtgatgcaatcagctgtctgctttttaaggttgggattgtgctgactttgggattaacatgagcttctttagcaaccaagcatgaacttgattaagaccagaagtttgggagatgagtcctggcattatgtctaggactaaagcagtggctttgtatagcaagctgagtaaaggttgacatattccaaaacccttctttttaaaatgaaaaaggatggagagaaggatggaaagcctggacttaaacctttagaaaaaacttctggagagaaatcccttttaaacagttacttttgtcattgcctctggtcatttgtctaaataggaatggaaaattaaaagaaaagcaacaatccaatcttttttctaaaaattatgctggggtctcgactaaaactgaatttgaattggaaaattctggtgttggttggagttccatcttgcaagggataatacaaatcctatgatctctatgcccaatatgctgcctcaactctgagctgtctgcaaggcttagtaagtattgagtggtgttttttttttctttttatacaataccatgttaaccacatgagttaaataaatttgagaagttgtttt

SEQ ID NO: 1015 - protein, 466 aa, Homo sapiens
MADQLYLENIDEFVTDQNKIVTYKWLSYTLGVHVNQAKQMLYDYVERKRKENSGAQLHVTYLVSGSLIQNGHSCHKVAVVREDKLEAVKSKLAVTASIHVYSIQKAMLKDSGPLFNTDYDILKSNLQNCSKFSAIQCAAAVPRAPAESSSSSKKFEQSHLHMSSETQANNELTTNGHGPPASKQVSQQPKGIMGMFASKAAAKTQETNKETKTEAKEVTNASAAGNKAPGKGNMMSNFFGKAAMNKFKVNLDSEQAVKEEKIVEQPTVSVTEPKLATPAGLKKSSKKAEPVKVLQKEKKRGKRVALSDDETKETENMRKKRRRIKLPESDSSEDEVFPDSPGAYEAESPSPPPPPSPPLEPVPKTEPEPPSVKSSSGENKRKRKRVLKSKTYLDGEGCIVTEKVYESESCTDSEEELNMKTSSVHRPPAMTVKKEPREERKGPKKGTAALGKANRQVSITGFFQRK

SEQ ID NO: 1016 - DNA, 2345 bp, Homo sapiens
aaatgcagggcgcagcagccgctgcagtggagccggtaggcctggccggcgggctgaaaggaagtgcgagctgtccgcccagggccgggtatccgcccctgcaggctgtggaggggatgtcaggagactggctggcctcttttcttggcccccgactccttccagtctgacactgaagactttataagcttccccccgaccaccctccacgggctccactctccacgggcctgggcttgcgccgcttcgagatcagcctgggggtcgcgccctcctggtcttgtccacgaagcgccgttcttgggccgttaggagctgctgggaagggctctgataggcccactcctcttctccacccaggagatgagaaggagggcaggcctttttaatctgatcagaatgttaacccatctctccgccttgcggtagaacccctggatacattatttgccctctcgaaaggcaggctctgaatttgattcaggtatatttcttcatagctaaccagcacaatggaaaactcagggaaagcaaataaaaaggatacacatgacgggccaccaaaagaaattaaactgcctaccagtgaagcacttctagactatcaatgtcaaataaaggaagatgccgtggagcaattcatgtttcaaataaagacacttaggaaaaagaaccaaaaatatcatgaaagaaatagccgcttaaaagaagaacagatttggcacatacggcatctactaaaggaactgagtgaagagaaggcagagggattgccagttgtaacaagagaggatgttgaagaagcgatgaaggaaaaatggaagtttgaaagagaccaggaaaaaaacttgagagatatgcgcatgcaaataagtaatgctgagaaactatttcttgagaaactcagtgaaaaggaatattgggaggagtacaagaatgtagggagtgaacgacatgctaaactcattacctccttacaaaatgacatcaacacagttaaagagaatgcagagaaaatgtcagaacactataaaatcactctggaagatactagaaagaaaataatcaaggaaactttgttgcaactggaccaaaagaaggaatgggccacacagaatgctgtaaagctcattgacaagggcagttatctagagatctgggagaatgactggctcaaaaaagaggttgcaattcacaggaaggaagttgaagaattaaaaaatgctattcatgaactggaagcagaaaatttggtgcttattgatcaactatccaactgtagacttgtggatctcaagatacccaggtatccagtgctacattcctgtcccacctctaatcctcgtcatctgctgctgctgcctttggaatcatgtctaatctctgccaggcgttgctggcgactatatcttacccaagctgctggactagaagtgccacctgaagaaatgtctttggaattgccagaaacacatatagaagagaagtcagaattgcaacccacagaagtagaaagtagagacttgatgtcctcatcagatgagagcactatcttacatcttagtcatgaaaatagcatcgaagatctccagtatgtgaagatagataaagaggaaaactcaggcacagagtttggggacactgatatgaagtacttactatatgaggatgagaaggatttcaaggattatgtaaacttgggccccctgggagtgaagcttatgagtgtggagagcaagaaaatgcccattcattttcaagagaaggaaattccagtcaaactctataaagatgtcaggagcccagaaagccacatcacatataagatgatgaagtcttttctctaagacggaaagctgcaaaggaaacacaacttttccttataaatgttctttgggaactgaagtatatccgttgcccattttacttacactttggctcatttttaaaccagctgttatttctaaaggtcatatttacatttaaaatcaaaggtattcagctattcatttacttgcatggtatgagtgaccaaaacggaagcacgctttgtatttctacactgaagtattcagaagcatgacagtgggttcaaggtagtctctgaggttccttttcacacacaaaaaattcactgattaatctgtgattccagtatgaaatagttccattagaaatgtttctaagaaaaacttagaagtttgcatagcattgtctacacatctttccctctgaggatgctcaatgtgatagacagccagtctataatgcaagccaattctccgtagtttaaccctgtgtattagtctgttctcatgctgctaataaagacataattgaaactg

SEQ ID NO: 1017 - protein, 444 aa, Homo sapiens
MENSGKANKKDTHDGPPKEIKLPTSEALLDYQCQIKEDAVEQFMFQIKTLRKKNQKYHERNSRLKEEQIWHIRHLLKELSEEKAEGLPVVTREDVEEAMKEKWKFERDQEKNLRDMRMQISNAEKLFLEKLSEKEYWEEYKNVGSERHAKLITSLQNDINTVKENAEKMSEHYKITLEDTRKKIIKETLLQLDQKKEWATQNAVKLIDKGSYLEIWENDWLKKEVAIHRKEVEELKNAIHELEAENLVLIDQLSNCRLVDLKIPRYPVLHSCPTSNPRHLLLLPLESCLISARRCWRLYLTQAAGLEVPPEEMSLELPETHIEEKSELQPTEVESRDLMSSSDESTILHLSHENSIEDLQYVKIDKEENSGTEFGDTDMKYLLYEDEKDFKDYVNLGPLGVKLMSVESKKMPIHFQEKEIPVKLYKDVRSPESHITYKMMKSFL

SEQ ID NO: 1018 - DNA, 4164 bp, Homo sapiens
aattcgcctctgccacaggctgcaaaggacccgaggaaccgctctctctgaactgtgctgatgggcaggaggatgggagacaggaattgagagtcacagaggaaggacagtggagtctggcatcttattggtgtctttaaaggattgccatttaatgccattcaagatctactaagcatcatttttgcatgactactgcaaaaggattactttacagataccagttcctttgtcaagagcatactttggaccctgttttcagaaagcagggcactctttaatgaagaaacaccagagctgttaaacacattgagacacagaagattctagtgactgaggatggcttcctcttggaaactaatgctgtttctgtcagtcaccatgtgtctttcagagtattcaaaatctcttcctggtctctccacttcatatgctgctttgttaagaattaagaagagttcatcttcatctctctttggttccaaaaccagaccacgatacagcagcccttcattaggaacactgagtgcttcttcacccagctggctaggggcagctcagaattattattcccccatcaatctttatcattcctcagatgccttcaaacaagatgaaagtgtggactatgggccagtttttgtgcaagaaccagatgatattatttttccaactgattctgatgaaaagaaggtagcattgaattgtgaagttcgtggcaatccagttcccagttacagatggcttcgaaatggaacagaaatagatctggaaagtgattatcgctacagtttgatagatggcaccttcattataagcaatccaagtgaagcaaaggattctggtcattatcagtgtttagcaaccaacactgtggggagtattcttagtagagaagctacactgcagtttgcctatctgggaaattttagtggccggacaagaagtgcagtctctgtgagggaaggccagggtgtcgttctgatgtgctctcctccgccacattcaccagagatcatctatagctgggtatttaatgagttcccttcctttgtggcggaagacagccggcggttcatctcccaggagacaggcaacctttatatttctaaagtccaaacatcagatgttggcagctatatttgtctggtgaaaaacacagtgacgaatgctagagtccttagtcctccaacgccactcactctgcgtaatgatggtgtgatgggagaatatgagccgaaaattgaggtccattttcctttcacggttacagctgctaaaggaacaactgttaagatggaatgctttgcacttggcaaccccgttccaacaatcacatggatgaaggttaatggttatattcctagtaaggcacgtctgcggaaatctcaggcggtgctggaaataccgaatgtacagctggatgatgcaggcatttatgagtgcagagctgaaaactcacgtggaaaaaattcctttcgtggacaattacaagtatacacctacccacactgggtagaaaaactgaatgatactcagttagacagtgggagccctctccgatgggaatgtaaggctactggaaaacccagacccacgtatcgttggctgaagaatggagtacccctctcacctcagagtagggttgagatggttaatggagtattgatgatccacaatgtgaatcaatcagatgctggaatgtatcagtgtttggctgaaaataagtatggagccatttacgctagtgctgagctgaagattctagcttcagctcccacttttgcactgaatcaactgaagaaaacaataattgttaccaaagaccaagaagttgtcatagagtgcaaaccccaaggctctccaaaaccaaccatctcttggaagaaaggagacagagcagttagagaaaacaaaagaatagctattcttccagacgggagtctacggatcctaaatgcttccaaatcagacgagggaaagtacgtttgccgaggggaaaacgtctttggttctgctgaaattatagcttcgctatctgtaaaagaacctacaaggatagaacttactcctaaaagaacagaattgacagtgggagaaagcattgtccttaattgcaaagcaattcacgatgctagtttggatgtcactttctactggactctgaaaggacagcctattgatttcgaggaagagggtggacattttgaaagcatcagggcccaagcatcctctgcagatttaatgatcaggaacatccttctgatgcatgctgggagatatggctgcagggtacagaccacagcagacagtgtgtcagatgaggcagaacttcttgttaggggacccccaggcccacctgggatagtaattgttgaggaaataaccgaaagtacggccacactgtcctggagcccagcagctgacaaccacagcccaatctcctcctacaaccttcaagctcgcagcccattttccctgggctggcaaacagtaaagacagtcccagaaatcataacaggggacatggagtcagccatggctgtggacctaaatccctgggtggaatatgaatttcgagtggtagccaccaaccctattgggacaggagatccaagcaccccatctcgaatgatccgcacaaatgaagcagttccgaagacagcacccaccaatgtaagcggaagaagtggaagaaggcatgagttagtcattgcctgggagccagtatctgaagagtttcagaatggggaaggcttcggctatattgtggctttcagacccaatggaacacgtggctggaaggaaaaaatggtgacatcctctgaagcttccaaattcatttatcgagatgaaagtgtccctcctcttactccctttgaagtgaaagttggcgtttataacaataaaggagatgggccttttagtcaaattgtggtcatctgttcagctgaaggagaacccagtgctgctcccacagatgtcaaggcgacaagtgtgtctgtgtcagagattcttgttgcatggaaacacattaaagagagtctaggaagaccacagggatttgaggttggttactggaaagacatggaacaggaagatacagcagaaacagtcaaaactagagggaatgagtctttcgtcatcctaacaggattagaaggaaatacgttatatcacttcacagtgagggcttacaatggagctggatatgggccacctagcagtgaagtgagtgcaaccaccaagaaatcccctcctagtcaagcacctagcaacctcaggtgggagcagcaaggctctcaggtttctctgggctgggaacccgtcataccattagccaacgaatctgaagttgtgggttacaaggttttttataggcaagagggtcacagcaacagccaagttattgaaacacagaaacttcaagcagtagtaccactcccagatgctggagtctatattattgaagttcgagcatatagtgaaggaggagatggaacagctagttctcaaattagggtaccatcatattcaggtggaaaaatcacaagtgcacagtcgacccttcactctctctccacatcttcgtcatcagtcaccttgctcttggcattgatgattccttcaacttcctggtgaaaactgctgacttaatttgcttttgtttgctttagcttggtaacagcggtgaatagagtgtagtgtaagtggagaaccaggatcctgagatgagcttgagctttaaaaacttgggactatacatggtgaacttacaggaggttaggggggaaatattacttatccatcaggtttctctttggtttttgtaaacggagaggacagttcttagtccagtaaaaatatgcagattgtatgtaatgaatttttgtaaacaaaggtaatttctgtcaaatgtattctttacttttttaatatgttgggattttattttatatctgatgactccgagtgtgtgccatccatttgttaagtaactggcctttagcagatctgtttcaaaaacaaatacaaaaatgagaatgaaaagtttgcttaagactaagtccagtgtttttcattttccctttggctgaatatttcaattgacaaaccagcaggacatatgaaaaatgcttcagtgatgtggtccattataagata

SEQ ID NO: 1019 - protein, 1100 aa, Homo sapiens
MASSWKLMLFLSVTMCLSEYSKSLPGLSTSYAALLRIKKSSSSSLFGSKTRPRYSSPSLGTLSASSPSWLGAAQNYYSPINLYHSSDAFKQDESVDYGPVFVQEPDDIIFPTDSDEKKVALNCEVRGNPVPSYRWLRNGTEIDLESDYRYSLIDGTFIISNPSEAKDSGHYQCLATNTVGSILSREATLQFAYLGNFSGRTRSAVSVREGQGVVLMCSPPPHSPEIIYSWVFNEFPSFVAEDSRRFISQETGNLYISKVQTSDVGSYICLVKNTVTNARVLSPPTPLTLRNDGVMGEYEPKIEVHFPFTVTAAKGTTVKMECFALGNPVPTITWMKVNGYIPSKARLRKSQAVLEIPNVQLDDAGIYECRAENSRGKNSFRGQLQVYTYPHWVEKLNDTQLDSGSPLRWECKATGKPRPTYRWLKNGVPLSPQSRVEMVNGVLMIHNVNQSDAGMYQCLAENKYGAIYASAELKILASAPTFALNQLKKTIIVTKDQEVVIECKPQGSPKPTISWKKGDRAVRENKRIAILPDGSLRILNASKSDEGKYVCRGENVFGSAEIIASLSVKEPTRIELTPKRTELTVGESIVLNCKAIHDASLDVTFYWTLKGQPIDFEEEGGHFESIRAQASSADLMIRNILLMHAGRYGCRVQTTADSVSDEAELLVRGPPGPPGIVIVEEITESTATLSWSPAADNHSPISSYNLQARSPFSLGWQTVKTVPEIITGDMESAMAVDLNPWVEYEFRVVATNPIGTGDPSTPSRMIRTNEAVPKTAPTNVSGRSGRRHELVIAWEPVSEEFQNGEGFGYIVAFRPNGTRGWKEKMVTSSEASKFIYRDESVPPLTPFEVKVGVYNNKGDGPFSQIVVICSAEGEPSAAPTDVKATSVSVSEILVAWKHIKESLGRPQGFEVGYWKDMEQEDTAETVKTRGNESFVILTGLEGNTLYHFTVRAYNGAGYGPPSSEVSATTKKSPPSQAPSNLRWEQQGSQVSLGWEPVIPLANESEVVGYKVFYRQEGHSNSQVIETQKLQAVVPLPDAGVYIIEVRAYSEGGDGTASSQIRVPSYSGGKITSAQSTLHSLSTSSSSVTLLLALMIPSTSW

SEQ ID NO: 1020 - DNA, 3942 bp, Homo sapiens
aattcgcctctgccacaggctgcaaaggacccgaggaaccgctctctctgaactgtgctgatgggcaggaggatgggagacaggaattgagagtcacagaggaaggacagtggagtctggcatcttattggtgtctttaaaggattgccatttaatgccattcaagatctactaagcatcatttttgcatgactactgcaaaaggattactttacagataccagttcctttgtcaagagcatactttggaccctgttttcagaaagcagggcactctttaatgaagaaacaccagagctgttaaacacattgagacacagaagattctagtgactgaggatggcttcctcttggaaactaatgctgtttctgtcagtcaccatgtgtctttcagaaagtgtggactatgggccagtttttgtgcaagaaccagatgatattatttttccaactgattctgatgaaaagaaggtagcattgaattgtgaagttcgtggcaatccagttcccagttacagatggcttcgaaatggaacagaaatagatctggaaagtgattatcgctacagtttgatagatggcaccttcattataagcaatccaagtgaagcaaaggattctggtcattatcagtgtttagcaaccaacactgtggggagtattcttagtagagaagctacactgcagtttgcctatctgggaaattttagtggccggacaagaagtgcagtctctgtgagggaaggccagggtgtcgttctgatgtgctctcctccgccacattcaccagagatcatctatagctgggtatttaatgagttcccttcctttgtggcggaagacagccggcggttcatctcccaggagacaggcaacctttatatttctaaagtccaaacatcagatgttggcagctatatttgtctggtgaaaaacacagtgacgaatgctagagtccttagtcctccaacgccactcactctgcgtaatgatggtgtgatgggagaatatgagccgaaaattgaggtccattttcctttcacggttacagctgctaaaggaacaactgttaagatggaatgctttgcacttggcaaccccgttccaacaatcacatggatgaaggttaatggttatattcctagtaaggcacgtctgcggaaatctcaggcggtgctggaaataccgaatgtacagctggatgatgcaggcatttatgagtgcagagctgaaaactcacgtggaaaaaattcctttcgtggacaattacaagtatacacctacccacactgggtagaaaaactgaatgatactcagttagacagtgggagccctctccgatgggaatgtaaggctactggaaaacccagacccacgtatcgttggctgaagaatggagtacccctctcacctcagagtagggttgagatggttaatggagtattgatgatccacaatgtgaatcaatcagatgctggaatgtatcagtgtttggctgaaaataagtatggagccatttacgctagtgctgagctgaagattctagcttcagctcccacttttgcactgaatcaactgaagaaaacaataattgttaccaaagaccaagaagttgtcatagagtgcaaaccccaaggctctccaaaaccaaccatctcttggaagaaaggagacagagcagttagagaaaacaaaagaatagctattcttccagacgggagtctacggatcctaaatgcttccaaatcagacgagggaaagtacgtttgccgaggggaaaacgtctttggttctgctgaaattatagcttcgctatctgtaaaagaacctacaaggatagaacttactcctaaaagaacagaattgacagtgggagaaagcattgtccttaattgcaaagcaattcacgatgctagtttggatgtcactttctactggactctgaaaggacagcctattgatttcgaggaagagggtggacattttgaaagcatcagggcccaagcatcctctgcagatttaatgatcaggaacatccttctgatgcatgctgggagatatggctgcagggtacagaccacagcagacagtgtgtcagatgaggcagaacttcttgttaggggacccccaggcccacctgggatagtaattgttgaggaaataaccgaaagtacggccacactgtcctggagcccagcagctgacaaccacagcccaatctcctcctacaaccttcaagctcgcagcccattttccctgggctggcaaacagtaaagacagtcccagaaatcataacaggggacatggagtcagccatggctgtggacctaaatccctgggtggaatatgaatttcgagtggtagccaccaaccctattgggacaggagatccaagcaccccatctcgaatgatccgcacaaatgaagcagttccgaagacagcacccaccaatgtaagcggaagaagtggaagaaggcatgagttagtcattgcctgggagccagtatctgaagagtttcagaatggggaaggcttcggctatattgtggctttcagacccaatggaacacgtggctggaaggaaaaaatggtgacatcctctgaagcttccaaattcatttatcgagatgaaagtgtccctcctcttactccctttgaagtgaaagttggcgtttataacaataaaggagatgggccttttagtcaaattgtggtcatctgttcagctgaaggagaacccagtgctgctcccacagatgtcaaggcgacaagtgtgtctgtgtcagagattcttgttgcatggaaacacattaaagagagtctaggaagaccacagggatttgaggttggttactggaaagacatggaacaggaagatacagcagaaacagtcaaaactagagggaatgagtctttcgtcatcctaacaggattagaaggaaatacgttatatcacttcacagtgagggcttacaatggagctggatatgggccacctagcagtgaagtgagtgcaaccaccaagaaatcccctcctagtcaagcacctagcaacctcaggtgggagcagcaaggctctcaggtttctctgggctgggaacccgtcataccattagccaacgaatctgaagttgtgggttacaaggttttttataggcaagagggtcacagcaacagccaagttattgaaacacagaaacttcaagcagtagtaccactcccagatgctggagtctatattattgaagttcgagcatatagtgaaggaggagatggaacagctagttctcaaattagggtaccatcatattcaggtggaaaaatcacaagtgcacagtcgacccttcactctctctccacatcttcgtcatcagtcaccttgctcttggcattgatgattccttcaacttcctggtgaaaactgctgacttaatttgcttttgtttgctttagcttggtaacagcggtgaatagagtgtagtgtaagtggagaaccaggatcctgagatgagcttgagctttaaaaacttgggactatacatggtgaacttacaggaggttaggggggaaatattacttatccatcaggtttctctttggtttttgtaaacggagaggacagttcttagtccagtaaaaatatgcagattgtatgtaatgaatttttgtaaacaaaggtaatttctgtcaaatgtattctttacttttttaatatgttgggattttattttatatctgatgactccgagtgtgtgccatccatttgttaagtaactggcctttagcagatctgtttcaaaaacaaatacaaaaatgagaatgaaaagtttgcttaagactaagtccagtgtttttcattttccctttggctgaatatttcaattgacaaaccagcaggacatatgaaaaatgcttcagtgatgtggtccattataagata

SEQ ID NO: 1021 - protein, 1026 aa, Homo sapiens
MASSWKLMLFLSVTMCLSESVDYGPVFVQEPDDIIFPTDSDEKKVALNCEVRGNPVPSYRWLRNGTEIDLESDYRYSLIDGTFIISNPSEAKDSGHYQCLATNTVGSILSREATLQFAYLGNFSGRTRSAVSVREGQGVVLMCSPPPHSPEIIYSWVFNEFPSFVAEDSRRFISQETGNLYISKVQTSDVGSYICLVKNTVTNARVLSPPTPLTLRNDGVMGEYEPKIEVHFPFTVTAAKGTTVKMECFALGNPVPTITWMKVNGYIPSKARLRKSQAVLEIPNVQLDDAGIYECRAENSRGKNSFRGQLQVYTYPHWVEKLNDTQLDSGSPLRWECKATGKPRPTYRWLKNGVPLSPQSRVEMVNGVLMIHNVNQSDAGMYQCLAENKYGAIYASAELKILASAPTFALNQLKKTIIVTKDQEVVIECKPQGSPKPTISWKKGDRAVRENKRIAILPDGSLRILNASKSDEGKYVCRGENVFGSAEIIASLSVKEPTRIELTPKRTELTVGESIVLNCKAIHDASLDVTFYWTLKGQPIDFEEEGGHFESIRAQASSADLMIRNILLMHAGRYGCRVQTTADSVSDEAELLVRGPPGPPGIVIVEEITESTATLSWSPAADNHSPISSYNLQARSPFSLGWQTVKTVPEIITGDMESAMAVDLNPWVEYEFRVVATNPIGTGDPSTPSRMIRTNEAVPKTAPTNVSGRSGRRHELVIAWEPVSEEFQNGEGFGYIVAFRPNGTRGWKEKMVTSSEASKFIYRDESVPPLTPFEVKVGVYNNKGDGPFSQIVVICSAEGEPSAAPTDVKATSVSVSEILVAWKHIKESLGRPQGFEVGYWKDMEQEDTAETVKTRGNESFVILTGLEGNTLYHFTVRAYNGAGYGPPSSEVSATTKKSPPSQAPSNLRWEQQGSQVSLGWEPVIPLANESEVVGYKVFYRQEGHSNSQVIETQKLQAVVPLPDAGVYIIEVRAYSEGGDGTASSQIRVPSYSGGKITSAQSTLHSLSTSSSSVTLLLALMIPSTSW

SEQ ID NO: 1022 - DNA, 2265 bp, Homo sapiens
acgcgggatacagggaggggccatgtgcgaaccagggagacctcatcttccaaccaagcttgctgggcttgcatttaatcaatgcatggccagagaacaggagcggaacattgcctagtagaccctgaggctttacaacagtgctactgacccctatgagcctgatgctggatgaccaaccccctatggaggcccagtatgcagaggagggcccaggacctgggatcttcagagcagagcctggagaccagcagcatcccatttctcaggcggtgtgctggcgttccatgcgacgtggctgtgcagtgctgggagccctggggctgctggccggtgcaggtgttggctcatggctcctagtgctgtatctgtgtcctgctgcctctcagcccatttccgggaccttgcaggatgaggagataactttgagctgctcagaggccagcgctgaggaagctctgctccctgcactccccaaaacagtatctttcagaataaacagcgaagacttcttgctggaagcgcaagtgagggatcagccacgctggctcctggtctgccatgagggctggagccccgccctggggctgcagatctgctggagccttgggcatctcagactcactcaccacaagggagtaaacctcactgacatcaaactcaacagttcccaggagtttgctcagctctctcctagactgggaggcttcctggaggaggcgtggcagcccaggaacaactgcacttctggtcaagttgtttccctcagatgctctgagtgtggagcgaggcccctggcttcccggatagttggtgggcagtctgtggctcctgggcgctggccgtggcaggccagcgtggccctgggcttccggcacacgtgtgggggctctgtgctagcgccacgctgggtggtgactgctgcacattgtatgcacagtttcaggctggcccgcctgtccagctggcgggttcatgcggggctggtcagccacagtgccgtcaggccccaccaaggggctctggtggagaggattatcccacaccccctctacagtgcccagaatcatgactacgacgtcgccctcctgaggctccagaccgctctcaacttctcagacactgtgggcgctgtgtgcctgccggccaaggaacagcattttccgaagggctcgcggtgctgggtgtctggctggggccacacccaccctagccatacttacagctcggatatgctccaggacacggtggtgcccttgttcagcactcagctctgcaacagctcttgcgtgtacagcggagccctcaccccccgcatgctttgcgctggctacctggacggaagggctgatgcatgccagggagatagcgggggccccctagtgtgcccagatggggacacatggcgcctagtgggggtggtcagctgggggcgtgcgtgcgcagagcccaatcacccaggtgtctacgccaaggtagctgagtttctggactggatccatgacactgctcaggactccctcctctgagtcctgctgtttcctccagtctcactgcacaccactgcctcatgcttcctggggcctccagcagctccactaatggaggagaggcagtagcctccgacacagaacgcatggacctcctactactgtgtgtgaggaacagtcactacccactggccagccacccagccaacaggtctctcctcttgggccctgatttcagagtcctctttctcactagagactcaatgacagaagagaggctgggacttggttgggcatgctgtggttgctgagggatgagggggaggagagaggtaggagctggagatgaagagactgctagaagcagcaggaagcctgcccttctgccctctcccctccctgcccctgtgtgagtcttttagggagggtgactgggaggtgccccccgtcccacctttttcctgtgctctaggtgggctaagtgcctccctagaggactccatggctgagaggctcctgggcagatggggtcaaggctgggccagtcccagatgaagcctatgggagtcaggaccctctccactctccctctccactccccttcctgttctcacctggctgtggctggccctgtgtggggtgggtacactggaaaacaagaaggttggagttggtctaggacattggttttaaatgacagttctgtgaactggtccaaggaggttctgttattaaagtgatatatggtcttgaaaaaaaaaaaaaaaaaaaaaaa

SEQ ID NO: 1023 - protein, 457 aa, Homo sapiens
MSLMLDDQPPMEAQYAEEGPGPGIFRAEPGDQQHPISQAVCWRSMRRGCAVLGALGLLAGAGVGSWLLVLYLCPAASQPISGTLQDEEITLSCSEASAEEALLPALPKTVSFRINSEDFLLEAQVRDQPRWLLVCHEGWSPALGLQICWSLGHLRLTHHKGVNLTDIKLNSSQEFAQLSPRLGGFLEEAWQPRNNCTSGQVVSLRCSECGARPLASRIVGGQSVAPGRWPWQASVALGFRHTCGGSVLAPRWVVTAAHCMHSFRLARLSSWRVHAGLVSHSAVRPHQGALVERIIPHPLYSAQNHDYDVALLRLQTALNFSDTVGAVCLPAKEQHFPKGSRCWVSGWGHTHPSHTYSSDMLQDTVVPLFSTQLCNSSCVYSGALTPRMLCAGYLDGRADACQGDSGGPLVCPDGDTWRLVGVVSWGRACAEPNHPGVYAKVAEFLDWIHDTAQDSLL

SEQ ID NO: 1024 - DNA, 2871 bp, Homo sapiens
atgccccgcgtctcggcgcctttggtgctgcttcctgcgtggctcgtgatggtcgcctgcagcccgcactccttgaggatcgctgctatcttggacgaccccatggagtgcagcagaggggagcggctctccatcaccctggccaagaaccgcatcaaccgcgctcctgagaggctgggcaaggccaaggtcgaagtggacatctttgagcttctcagagacagcgagtacgagactgcagaaaccatgtgtcagatcctccccaagggggtggtcgctgtcctcggaccatcgtccagcccagcctccagctccatcatcagcaacatctgtggagagaaggaggtccctcacttcaaagtggccccagaggagttcgtcaagttccagttccagagattcacaaccctgaacctccaccccagcaacactgacatcagcgtggctgtagctgggatcctgaacttcttcaactgcaccaccgcctgcctcatctgtgccaaagcagaatgccttttaaacctagagaagctgctccggcaattccttatctccaaggacacgctgtccgtccgcatgctggatgacacccgggaccccaccccgctcctcaaggagatccgggacgacaagaccgccaccatcatcatccacgccaacgcctccatgtcccacaccatcctcctgaaggcagccgaacttgggatggtgtcagcctattacacatacatcttcactaatctggagttctcactccagagaatggacagccttgtggatgatcgtgtcaacatcctgggattttccattttcaaccaatcccatgctttcttccaagagtttgcccagagcctcaaccagtcctggcaggagaactgtgaccatgtgcccttcactgggcctgcgctctcctcggccctgctgtttgatgctgtctatgctgtggtgactgcggtgcaggaactgaaccggagccaagagatcggcgtgaagcccttgtcctgcggctcggcccagatctggcagcacggcaccagcctcatgaactacctgcgcatggtagaattggaaggtcttaccggccacattgaattcaacagcaaaggccagaggtccaactacgctttgaaaatcttacagttcacaaggaatggttttcggcagatcggccagtggcacgtggcagagggcctcagcatggacagccacctctatgcctccaacatctcggacactctcttcaacaccaccctggtcgtcaccaccatcctggaaaacccatatttaatgctgaaggggaaccaccaggagatggaaggcaatgaccgctacgagggcttctgtgtggacatgctcaaggagctggcagagatcctccgattcaactacaagatccgcctggttggggatggcgtgtacggcgttcccgaggccaacggcacctggacgggaatggtcggggagctgatcgctaggaaagcagatctggctgtggcaggcctcaccattacagctgaacgggagaaggtgattgatttctctaagccattcatgactctgggaattagcattctttaccgcgttcatatgggacgcaaacccggctatttctccttcctggacccattttctccgggcgtctggctcttcatgcttctagcctatctggccgtcagctgtgtcctcttcctggtggctcggttgacgccctacgagtggtacagcccacacccatgtgcccagggccggtgcaacctcctggtgaaccagtactccctgggcaacagcctctggtttccggtcggggggttcatgcagcaaggctccaccatcgcccctcgcgccttatccacccgctgtgtcagtggcgtctggtgggcattcacgctgatcatcatctcatcctacacggccaacctggcagccttcctgaccgtgcagcgcatggatgtgcccattgagtcagtggatgacctggctgaccagaccgccattgaatatggcacaattcacggaggctccagcatgaccttcttccaaaattcccgctaccagacctaccaacgcatgtggaattacatgtattccaagcagcccagcgtgttcgtgaagagcacagaggagggaatcgccagggtgttgaattccaactacgccttcctcctggaatccaccatgaacgagtactatcggcagcgaaactgcaacctcactcagattgggggcctgctggacaccaagggctatgggattggcatgccagtcggctcggttttccgggacgagtttgatctggccattctccagctgcaggagaacaaccgcctggagatcctgaagcgcaaatggtgggaaggagggaagtgccccaaggaggaagatcacagagctaaaggcctgggaatggagaatattggtggaatctttgtggttcttatttgtggcttaatcgtggccatttttatggctatgttggagtttttatggactctcagacactcagaagcaactgaggtgtccgtctgccaggagatggtgaccgagctgcgcagcattatcctgtgtcaggacagtatccacccccgccggcggcgcgccgcagtcccgccgccccggccccccatccccgaggagcgccgaccgcggggcacggcgacgctcagcaacgggaagctgtgcggggcaggggagcccgaccagctcgcgcagagactggcgcaggaggccgccctggtggcccgcggctgcacgcacatccgcgtctgccccgagtgccgccgcttccagggcctgcgggcacggccgtcgcccgcccgcagcgaggagagcctggagtgggagaaaaccaccaacagcagcgagcccgagtag

SEQ ID NO: 1025 - protein, 956 aa, Homo sapiens
MPRVSAPLVLLPAWLVMVACSPHSLRIAAILDDPMECSRGERLSITLAKNRINRAPERLGKAKVEVDIFELLRDSEYETAETMCQILPKGVVAVLGPSSSPASSSIISNICGEKEVPHFKVAPEEFVKFQFQRFTTLNLHPSNTDISVAVAGILNFFNCTTACLICAKAECLLNLEKLLRQFLISKDTLSVRMLDDTRDPTPLLKEIRDDKTATIIIHANASMSHTILLKAAELGMVSAYYTYIFTNLEFSLQRMDSLVDDRVNILGFSIFNQSHAFFQEFAQSLNQSWQENCDHVPFTGPALSSALLFDAVYAVVTAVQELNRSQEIGVKPLSCGSAQIWQHGTSLMNYLRMVELEGLTGHIEFNSKGQRSNYALKILQFTRNGFRQIGQWHVAEGLSMDSHLYASNISDTLFNTTLVVTTILENPYLMLKGNHQEMEGNDRYEGFCVDMLKELAEILRFNYKIRLVGDGVYGVPEANGTWTGMVGELIARKADLAVAGLTITAEREKVIDFSKPFMTLGISILYRVHMGRKPGYFSFLDPFSPGVWLFMLLAYLAVSCVLFLVARLTPYEWYSPHPCAQGRCNLLVNQYSLGNSLWFPVGGFMQQGSTIAPRALSTRCVSGVWWAFTLIIISSYTANLAAFLTVQRMDVPIESVDDLADQTAIEYGTIHGGSSMTFFQNSRYQTYQRMWNYMYSKQPSVFVKSTEEGIARVLNSNYAFLLESTMNEYYRQRNCNLTQIGGLLDTKGYGIGMPVGSVFRDEFDLAILQLQENNRLEILKRKWWEGGKCPKEEDHRAKGLGMENIGGIFVVLICGLIVAIFMAMLEFLWTLRHSEATEVSVCQEMVTELRSIILCQDSIHPRRRRAAVPPPRPPIPEERRPRGTATLSNGKLCGAGEPDQLAQRLAQEAALVARGCTHIRVCPECRRFQGLRARPSPARSEESLEWEKTTNSSEPE

SEQ ID NO: 1026 - DNA, 8051 bp, Homo sapiens
gtctctccaagggaatgaaaggtgaggggagcgtgagtgcaggcatgatgggaatctccgtgacttgtgaaccaaggactgggttttgctctggaagcctgtcctgattgcttctgtaatctggcgctatgcatccggatcttggacccttatgtacactgctgtatgttactcttacaattctgtgctcttctgtgagttcagacttggcaccttattttacttctgagccgctctctgctgtccagaaacttggtggacctgtagtactgcattgttctgctcaacctgtgaccactcgtatctcatggctgcataacggaaaaacattggatggaaacctggaacatgttaagattcatcaggggactctgacaattctttctctcaactcctctcttttgggttactaccagtgccttgccaacaatagcatcggtgccattgtgagtggccctgcgacagtatctgtggcagttcttggtgattttggttcatccacaaagcatgttattacagcagaagaaaaaagtgctggtttcattggctgcagggtaccggagagtaaccccaaagctgaggtgcgctataaaatccggggaaaatggctggaacattccacagagaattacttaatccttccatcaggaaatcttcagattttgaatgtatccttagaggacaagggatcatacaaatgtgcagcttataatcctgtcacacatcaattaaaagttgaacctattggccgaaagctccttgtgagtcgtccttcttcagatgatgttcacattcttcaccccacccattcacaggcattagctgttctttctcgtagccctgtaaccttggagtgtgtggtgagtggggtcccggctcctcaagtgtattggctaaaggacgggcaggacattgcaccaggaagcaactggagaaggttgtattctcatcttgccactgatagcgttgacccggcggactccggaaactattcctgcatggcgggaaacaagtctggagatgtaaaatatgtgacttacatggttaatgtacttgaacatgcttccatttctaaaggactacaggatcagatagtgtctctgggtgccacagtacactttacctgcgacgttcatgggaacccagcccccaactgtacctggtttcacaatgcacagcctattcatccttctgcacgacatctaactgcaggaaacggactgaaaatcagtggggttactgtggaagatgttgggatgtatcagtgtgtagcagataatgggattggatttatgcactctactggaagacttgaaattgaaaatgacggtggattcaagccagttataattacggcaccagtaagtgcaaaggttgcagacggagactttgttactctgtcctgcaatgccagtgggctgccggttccggtcattcgttggtatgacagccatggattgataaccagccatccatctcaagtcctgagatcgaaatcccgaaaatcacagttatcaagacctgagggcttgaacctggagcctgtgtacttcgtcctgtcccaagctggtgcaagctctctccatattcaggctgtgactcaggaacatgcggggaaatacatctgcgaagctgcaaatgaacatggtaccacacaggcagaagcatctctcatggttgttccttttgaaacaaatacaaaagcagagacagtcacacttcctgatgctgctcagaatgatgacagaagtaagagagatggttcagaaactgggttactgagctcatttccggtgaaggtccatcccagtgcagtggaatcagcaccagagaaaaacgccagcggcatctctgttcctgatgcccccatcatactgagccccccacagacccacacaccagacacgtacaacctggtgtggagggcaggcaaggatggtgggctgcccatcaatgcttactttgtgaagtatcgaaagctggatgatggggttggcatgctgggaagctggcacacggttcgagtcccaggaagtgaaaatgagctccatttagctgagctggagccatctagtctttatgaagtcttgatggtagcaagaagcgcagcaggtgaaggccaacctgccatgcttaccttccgaaccagcaaagaaaaaacagcgtcatcaaaaaacacccaggcatcctctccacccgtgggcatccctaagtatcccgttgtttcagaggctgcaaacaacaattttggagtggtacttacagattcctctaggcacagtggagttccagaggcaccagatcggcctaccatctccactgcatcagagacatcagtctatgtcacttggattcctcgggcaaacgggggttctccaatcactgccttcaaagtcgaatataaacggatgaggaccagcaattggctggtggcagctgaagacatccctccttccaaactttcagtggaagttcgtagtttagaaccaggttcaacatacaaatttagggtcattgccatcaaccattatggtgagagttttcggagttcagcatctcgtccttatcaagtggttgggttccccaatcgcttttccagccgtccaataactggacctcacattgcatacacagaggctgtcagcgatactcagatcatgctaaagtggacgtacattccatcaagtaacaataacactcccattcaaggattttatatctattaccgaccaacagatagtgacaatgacagtgattacaagagggatgttgtagaaggttcaaagcagtggcacatgattggccacctgcagccagaaacctcctatgacattaaaatgcaatgcttcaatgaaggaggagaaagtgaatttagcaatgtgatgatctgcgagactaaagtgaaacgtgttcctggagcttctgaatatcctgtcaaagacttgagtacccctccaaattctttgggaagtggaggaaatgtggggcctgcaaccagccctgccagaagcagtgacatgttatatctgatcgttggctgtgtgctgggcgtcatggtcctcattctgatggttttcattgcaatgtgcctgtggaagaatcgccagcagaataccatacaaaaatatgacccaccaggatatctctaccaaggatcagatatgaacgggcagatggtggactacaccactctctcaggagcaagtcagataaatggaaatgttcacggaggcttcctaaccaatggcggtctcagcagtggctattcccaccttcaccataaggtccccaatgcagtcaatggaattgtgaatgggagcctaaatggagggctttactccgggcacagcaactctctaaccaggacacacgtggattttgaacatcctcatcatctagtgaatggtggtggaatgtacacggccgtgcctcagattgaccctctggagtgtgttaactgccgaaattgtcgaaacaacaataggtgtttcaccaaaaccaacagcactttcagcagcagccctcctcctgtggtccctgtggtagcaccttatcctcaggatggtttggaaatgaagcccctcagtcacgtgaaggtgcctgtatgcctgacttccgcagtccctgattgtggccagttgccggaggagagcgtcaaggacaatgtggaaccagtccctactcagcgtacctgctgtcaggacattgtaaatgacgtcagctctgatggctcagaagatccagcagagttcagcagaggagacagctgtgcccattcagaaacagagatcaacattgtaagttggaatgctcttattttgccacctgtccccgagggctgtgctgagaagacaatgtggtctccacctggcattcctttagacagcccgacagaggtccttcagcagccccgggaaacctgaggacatgcaaacaaccagtcatgttccaacttcaagccggtaactgcacacaacaggcctgggagcgaactgtgtgaaggaccttaattcaaatcagagaaaatcattatttatttttttgtagtagtaatgtcatatgaatgtatcttaaaacgtgtgcccttttatattatttatgccttaaatgttttcttccccattccttcctccccctcggtaggaaacaaccttgttttgcatagtattcagtcacctggagggcagaggggtccttccatgttttctaacagctatagtgacagcaagagctcctcatgcaaaggatcccatctcttggctgcttcggctaggagggaatgcaggggcccgttgaaggttgccaccagctgggttttcaggtggaaaatggtctttcaatagtgtattctcagacttttttttgtttgttttttgagatggagtcttgctgtcatccaggctggagtgcaatggctcgatcttggctcactgcaacctccgcctcccaggttcaagcaattctcccgcctcagcctcctgagtagctgggactacaggcacctgccaccacgtccagctaattgtcttgtatttttattagagacaaggtttcaggctggttttgaactcctgacctcaagtgatccacccgcctccgcctcccaaagtgcgaggattacaggcgtgagccaccacgtctggcctgtattatcagacttcctgagaacactttgaaatcaactgcagttgtgacccatgtttataataacagacctggctgacggattttacaagagtgccttccacagaagtggtaatgtgacctgttgactttgtatctgcacgtgggcacgagtgatgttcagtttgctaggcactagtcatagtgttatggacgtggtggagtgtaaggtcttgatgaattacggcagtatgcagaaaaggaaccaaggccagagagacaaataatgcctcatgtcccactgctttaaaattacattaatttataaaatggccactatgggctctttttgactgtttctcggagtaggaacaaaataagacattaaatggtggcttgaagagaaagatacacattttcagaagaaagaaaggggagggctgcagggagcctgtcttggcgggagctctccagtctgttggattagcacagggacacgcttatggtgccatgacgccgaaactagtcatcccccatctccagcataggcaacggcctgcaggggtgagtgtcagaaaagacttactttggaagaaaagggtttttttttgtttgtttgttttttgtttttttttgtttgtttgttttgggtttttttcctgaaatttcctgatacctttttcagaatgtcacccttgtaaataggcacctaaagccaagttggtcagcagagctcctgaccacggctgcctctgcgtgacaaggacatttgcagctgcctttggaaggctcttcacattaaaaaacaataattatgtaagtgtgtttcatagcttgagtcaagctttcaaggatcactgctcctttgtgcattgtgcatccctttggggaaagaaacagaaaattattctctttctatagagtcaagcaattccagcagaagtgaagaaatgttagtttcccagaaatcgcagtggaatagaatacaatactgtgttaaccaactttctgtataaatgcatcagtattcccttacatatgtctatatattttataatagaactgttagtgaaaatgtgcttgtttaagctgggtcactatgcaagagttacttccagtagaatgtagtgaatgtaattccctagtcggatattagggatgctgtagacccaagttctacattccagatgtccgtgcctatagtatactggatttattcttcatgttgcttaaatgcagttagctctggagggggatagctgcatcccttacttctgtgactagcaaaggacaaagtcccagcgcacagaatatgaaaacataccctgtgttagccaatcaagttacagcaatgctgtcacaaagggagttttagaaaactggggagtcattgtccgtagacagccattttgatttaggaaacaggtgtattagcatgagccttaggtcatgaactgcttttaaagattgagtttgaatatgggatctgtccacgaggaagagaaaatggctttacctttaggacaatctcattgtggactgctttatttatattattagtaacgctgttttaagtgttattctttttattgtattttatttataaaaaatgcctttatatattgaaatatataaatatatatatataaacacacacacacacacacacacacacatatatatatatatatataattgcctttatatttaggcggtatgagttctccctaagcgtgagttggctctgccctgcacaggcacccaaacagtcctacctaatgtcacttcaccaggaaatgagaggacatggtacagtgtgggagacagcactaacacgtgctgaataactactgtgtaccaggcactgtgctcggtgcttgttactgttaactcatttaacccccacaactcatctacaaagttggcattaaaatccccaagtcactcagtgagccatgggacctgaatccgaacctagtttatctggagccataatctgggctcctcccatttttccatactgctttccaaaagcattgtggttcactctttggatggaaccagtcccgttccgtatgctgtgatctatccctgccgtggaattcctccgaggctccaactccgcagccagagaagctgctctctggcctccgcgggcagagctctgcttatgacttcgtcttccagaggtccacatttctccccttgacgccccctgtctaccacctccacctggaaatttgatctttactgtgctcagtgatcacgaaattggtcaagcctattcatgttccttctcatctagaattctgtgtgattgttttagcataaactgccccgctcccactgtatcatttcacgatctccttttaatgtttttctttcagttttgcactgacagtctggtgacaggtgctgccagggtgcaagttacattgcaatgttctaaaccttttgaagtgttcttagcaaaagcctttctttctgggtgtttttgtcgaatgagtctatgaagactcaatgcatccatcttgggctgatcatgccacagatctcattccagctatagtactgccaagaagtgaagtttatcattgaattttacctgtgttgctctcttttaaagtaatgactttgagatgcatgctttgtatcatattgaaaagtatgttttattttccttaaagttgtaatattgtgtgtgaaactgtacatattttaaatgatgtagctttggcaggttttatttggttgatatgattttatattaaaagagaaggctgctttcatatagcatagcccctgaaggtgggaatactccctgtttgtacaacgctgcttatagtttgtgattggggtgggcgaatgtcttcctctgaaattctttggaaccccccacccctgtcctcccctgaaactcccctgtgcacacccctctgttctgactgcagagatcaaggccctgaaggagcaggatcttgggcaagtgttttaggggacgctgagaacatacctgaccctgggggcgatgtggaggcaggcccacctcctcggggcaactttgcgtttccttggagggaagggaggtgggtaggagaggagcttgggaggatgaggaggagcggtcccgcctcacacattgtctatttttaccattaaccgagcgccacatgtttatgaacttcaggatagaaatttagcctccttgtgaaaacgttttgttttactgccctaagaaaatacacatctctaggcttgtctgaccagaaagccagcaaagtcttttgcatcgggtgtggcccttttgtattttatttcccatatttaaataagccttccttaaaccctagccccagtcctgagagctttgagggtagccgaaaccccttatctaataaagtctaactctgtgagaaccacagaaaaaa

SEQ ID NO: 1027 - protein, 1264 aa, Homo sapiens
MHPDLGPLCTLLYVTLTILCSSVSSDLAPYFTSEPLSAVQKLGGPVVLHCSAQPVTTRISWLHNGKTLDGNLEHVKIHQGTLTILSLNSSLLGYYQCLANNSIGAIVSGPATVSVAVLGDFGSSTKHVITAEEKSAGFIGCRVPESNPKAEVRYKIRGKWLEHSTENYLILPSGNLQILNVSLEDKGSYKCAAYNPVTHQLKVEPIGRKLLVSRPSSDDVHILHPTHSQALAVLSRSPVTLECVVSGVPAPQVYWLKDGQDIAPGSNWRRLYSHLATDSVDPADSGNYSCMAGNKSGDVKYVTYMVNVLEHASISKGLQDQIVSLGATVHFTCDVHGNPAPNCTWFHNAQPIHPSARHLTAGNGLKISGVTVEDVGMYQCVADNGIGFMHSTGRLEIENDGGFKPVIITAPVSAKVADGDFVTLSCNASGLPVPVIRWYDSHGLITSHPSQVLRSKSRKSQLSRPEGLNLEPVYFVLSQAGASSLHIQAVTQEHAGKYICEAANEHGTTQAEASLMVVPFETNTKAETVTLPDAAQNDDRSKRDGSETGLLSSFPVKVHPSAVESAPEKNASGISVPDAPIILSPPQTHTPDTYNLVWRAGKDGGLPINAYFVKYRKLDDGVGMLGSWHTVRVPGSENELHLAELEPSSLYEVLMVARSAAGEGQPAMLTFRTSKEKTASSKNTQASSPPVGIPKYPVVSEAANNNFGVVLTDSSRHSGVPEAPDRPTISTASETSVYVTWIPRANGGSPITAFKVEYKRMRTSNWLVAAEDIPPSKLSVEVRSLEPGSTYKFRVIAINHYGESFRSSASRPYQVVGFPNRFSSRPITGPHIAYTEAVSDTQIMLKWTYIPSSNNNTPIQGFYIYYRPTDSDNDSDYKRDVVEGSKQWHMIGHLQPETSYDIKMQCFNEGGESEFSNVMICETKVKRVPGASEYPVKDLSTPPNSLGSGGNVGPATSPARSSDMLYLIVGCVLGVMVLILMVFIAMCLWKNRQQNTIQKYDPPGYLYQGSDMNGQMVDYTTLSGASQINGNVHGGFLTNGGLSSGYSHLHHKVPNAVNGIVNGSLNGGLYSGHSNSLTRTHVDFEHPHHLVNGGGMYTAVPQIDPLECVNCRNCRNNNRCFTKTNSTFSSSPPPVVPVVAPYPQDGLEMKPLSHVKVPVCLTSAVPDCGQLPEESVKDNVEPVPTQRTCCQDIVNDVSSDGSEDPAEFSRGDSCAHSETEINIVSWNALILPPVPEGCAEKTMWSPPGIPLDSPTEVLQQPRET

SEQ ID NO: 1028 - DNA, 6919 bp, Homo sapiens
gtgctgtggcggcggcggcggcggtagtggcggcggcggcggtgcctgggcggcagcagcagcagtagcggcagccctgaggacggtgagacggccgcggcggcggcgacagcgcggaagtcgcgcgggacccagagcttcccccctgtcgctagtgctgaggctttcgcctttcctacccagcttcttgctcacggcccgggctgggctgggcagggcaacgcgcccccggggaggggcggagctgtagatatggtgtaagatacttcttcaagattggacagctggggaccttcttctgattaaccttaaaccaacttgtagccatagagacacctcacaaggttcccatttttgttgttgttgttgttgattttctgctcacacctttcctgaccttgcaaccatgtatggaagtgcccgctctgttgggaaggtggagccgagcagccagagccctgggcgttcacccaggcttccacgttcccctcgcttgggtcaccgtcgaaccaacagtacgggagggagttcgggaagcagtgttggaggtggcagtgggaaaaccctttcaatggaaaatatacaatctttaaatgctgcctatgccacctctggccctatgtatctaagtgaccatgaaaatgtgggttcagaaacacctaaaagcaccatgacacttggccgttctgggggacgtctgccttacggtgttcggatgactgctatgggtagtagccccaatatagctagcagtggggttgctagtgacaccatagcatttggagagcatcacctccctcctgtgagtatggcatccactgtacctcactcccttcgtcaggcgagagataacacaatcatggatctgcagacacagctgaaggaagtattaagagaaaatgatctcttgcggaaggatgtggaagtaaaggagagcaaattgagttcttcaatgaatagcatcaagaccttctggagcccagagctgaagaaggaacgagccctgagaaaagatgaagcttccaaaatcaccatttggaaggaacagtacagagttgtacaggaggaaaaccagcacatgcagatgacaatccaggctctccaggatgaattgcggatccagagggacctgaatcagctgtttcagcaggatagtagcagcaggactggcgaaccttgtgtagcagagctgacagaggagaactttcagaggcttcatgctgagcatgagcggcaggccaaagagctgtttcttcttcgaaagacattggaggaaatggagctgcgtattgagactcaaaagcagaccctaaatgctcgggatgaatccattaagaagcttctggaaatgttgcagagcaaaggactttctgccaaggctaccgaggaagaccatgagagaacaagacgactggcagaggcagagatgcacgttcatcacctagaaagccttttggagcagaaggaaaaagagaacagtatgttgagagaggagatgcatcgaaggtttgagaatgctcctgattctgccaaaacaaaagctctgcaaactgttattgagatgaaggattcaaaaatttcctctatggagcgtgggcttcgagacctggaagaggaaattcagatgctgaaatcgaatggtgctttgagtactgaggaaagggaagaagaaatgaagcaaatggaagtgtatcggagccattctaaatttatgaaaaataagattggccaggtgaaacaggagctgtccagaaaggacacagaactactcgccctgcagacaaagctagaaacactcacaaaccagttctcagatagtaaacagcacattgaagtgttgaaggagtccttgactgctaaggagcagagggctgccatcctgcagactgaggtggatgctctccgattgcgtttggaagagaaggaaaccatgttgaataaaaagacaaaacaaattcaggatatggctgaagagaaggggacacaagctggagagatacatgacctcaaggacatgttggatgtgaaggagcggaaggttaatgttcttcagaagaagattgaaaatcttcaagagcagcttagagacaaggaaaagcagatgagcagcttgaaagaacgggtcaaatccttgcaggctgacaccaccaacactgacactgccttgacaactttggaggaggcccttgcagagaaagagcggacaattgaacgcttaaaggagcagagggacagagatgagcgagagaagcaagaggaaattgataactacaaaaaagatcttaaagacttgaaggaaaaagtcagcctgttgcaaggcgacctttcagagaaagaggcttcacttttggatctgaaagagcatgcttcttctctggcatcctcaggactgaaaaaggactcacggcttaagacactagagattgctttggagcagaagaaggaggagtgtctgaaaatggaatcacaattgaaaaaggcacatgaggcagcattggaagccagagccagtccagagatgagtgaccgaatacagcacttggagagagagatcaccaggtacaaagatgaatctagcaaggcccaggcagaagttgatcgactcttagaaatcttgaaggaggtggaaaatgagaagaatgacaaagataagaagatagctgagttggaaagtctcacctcaaggcaagtgaaagaccagaataagaaggtagcaaatctgaagcacaaggaacaggtggaaaaaaagaagagtgcacaaatgttagaggaggcgcgacgacgggaggacaatctcaacgacagctctcagcagctacaggtggaggagttactgatggccatggagaaggtaaagcaggaactagaatccatgaaagcaaagctgtcctccacccagcagtctctggcagaaaaggaaactcacttgactaatcttcgggcagagagaaggaaacacttagaggaagttctggagatgaagcaagaagctcttctggctgccattagtgaaaaagacgccaatatagctctcttggagctttcgtcctctaagaagaagacccaagaggaagtggctgccctgaagcgggagaaggatcgtctggtacagcagcttaagcagcagacgcaaaatcgaatgaagctaatggccgacaactacgaggatgaccacttcaaatcctcccattccaatcaaacaaatcacaagccctccccagaccaggatgaggaggagggtatatgggcatagccaatcagaggcttagttcagccattttgttcagaacgatcatccagcccctcttagaacttgaccaaaatagaagtaaattaaagttgtacattggacacctgacaaccctctgccatgaccgagaccccctgatcctccgtggactcactccaccagcttcctataacttggacgatgaccaggcggcttgggagaatgagctgcagaagatgacccgggggcagcttcaggatgagttagagaaaggtgaacgggacaatgcagaactgcaggagtttgccaacgccattcttcagcagatagcagaccattgtcccgacatcctagagcaagtggtcaacgccctggaagagtcctcttgaccctgctttatggggaagcctgaggtagtcaacccaggagccaagaaaagagaactacgaggaacaggtgcccggaaccttcttggcaccaaacactacaaacttcatcccaacttgctcacttgaagaagtgtgattccagcaccgtttctacatctgccatcttactctgcctttctgctttggatgtggtctctacactaaccttcttgatgtccagggtagataaagggtcgaatctctctgaagaactgccacctggtcatcagcagtggagaactgtgggagctggtggctctgccctgacagagagccatggagcagaggagcctctcacctcctgtcctctgacatgagaatgaaaccaggaatggacttggagttcaacaggctgagaggatgcctccaatggaccagagagctgagtgttctaatatcacaataggtgctttctcctaaaagggcaaaaaacaatctcaaaaagattagaaaaagagaaggggggaagggaagagaaaatcgactcttctttttactgtctcttctgcttactttccacatgagatgctttgtaccggggagctgtgagcaggcctcacgatggcttgggagcactcgttctcccaaggtctgagtcttcatccagccctgcctgtctgtcgcagccttcctcactctgttcctcggccagttaacaagaagatggtgtgaggtgttctccaccagtctctcctgtttgagactgttgacgttatcatactgaggtgttagatcaaatatctctaattgaagaacatgtgaggttgaaagagcaccagccagggcaacatagcgtgaccctgtctctacaaaaaattaaaaagagaacatacaaagttgacatatgagaccctgttgtccccgcctgcagctttgccccagtaacagatgcccgttgctcttgggctggtttcccctgaacacctccaagaggctgcctgccttgccagcacccgtgtcctgagctcctgcagcccagtggctgctgaagttgtgatccctcactcaccctgctagctttgcccttgactcgtcttctctgaacctcagcctcgtgcattgcctggaaccttcttctagcataaatgaaggtttttcctcctacacacattccttcctcggttatttcattcagagaatatttatgaaatgcctactgtgtgcaagtcatccatccttgaaaaggccacttctcagtgagggagagatgtagtggattctgtgagacatacctgctggagttgaagcagtaaatagcatgtccttcccctccccgatcttaaggtgtgttttctagaaaagttccctaatggaattcatgagtttgggggtctcagtcacccgcttgcctgtaggattccatttgatgattctggatttttgctgtttgttattgcccttagaggggctctgagtatctacttgtgggtggccatttcctgacatctgcatgtacctcgtggaattcagccagcttcatgttgcaaatcagaaagctgaccccaagactgcaaatcaatgaaggtattggcattgttaaggacgtagcgtagacaacagcagtcataaataattaggcaggaacttaacccaaatctagttctttgaccacctctaccaccagaacccagcagacactcacatctcctgataagagttgctggactcgatgtttttgttttgcattttctcctctccttccccacttactcagagaatttaaagtctgtagagtcagcacagccccatcagtccaggaacttcccaccaccagcccttgactgtcccattaactgacatggtcagatttccagctccccctactccctgctgtgaaacaatccctctccctgtgagaggaaactgtggagcgtttcttatcgaaggttaaatggactctgctcataaacctcttactgagatgcttcctgatagccaggctggccagagaggggtgcaggggttagatagtaagtggtggtcgtttgtggtcagttacctcaattctgttcattgcagtgcccgtaaaccatgtagaaagctcccagcactgaaaggcaggagtgttagcatctcgctttatccaccataacgtaaagaactgcggtgtgataacagccttcacggggccacggtggaaccaagacagcaggcgaggccatgcctaaacaagtggtctggcacgggcactggccagctgctctctccaagcaggtggcccagatcccacccacgtggactttctcatcaggtgcagcgcctgccactctcagccactgggtgtgtgactctcctcttcatctcagcattctccatcacttcccctccagaaaaacggatggaaggaagccctctgtgacactgcttctgagaagaagcatttccgggaccgatatcatctgtctggtctctgtgaacagcaaggaatcttcttgaccgttcttgggcactggaggctggctaggagttcagtaataaacgtggccttcgtgctgtagggcagagtggatgcagtttgtagctttcagagtgtctcattgagtctagatcattgaaccaacacttaaccaaatgtcccactcccatcacactaggacttgtcattccatgcccctctcctagtggtcatggtttcatatgggcatacaactgctactgaagttatatagccttgaaaactcagtgcaggttgcccttaattttccccaaacccctccatcggcaagtctagttgccctttagcacctaaagatctgcaccccaaaccaatgtcaccataaagagggcacgaagaagagtgggtgtgatcccaacggggttttgtaactgaagaagcccagtgtgagcttctcatcttttcatatacctctaacccccggtactcattgaatcattgatgaggtatctcaattgagatttgcaaggactttgataccatttgaaatggaaaaattttgaacgggctttaacatgtttaagaaatatggatggggccggccacagtggctcacgcctgtaatcccagaactctggaaggctgaggcaggcggatcacctgagatcaggagttcgaggccagcctggccaagatggcaaaaaccccgactctactaaaaatacaaaattagccaggcgtggtggcgtacgcctgtaatcccagctactcaggaggcaggagaatcgcttgagcctgggaggcagaggctgcggtgagccgagatcgtgtcactgcactccagcctgggtgacagagactccattt

SEQ ID NO: 1029 - protein, 948 aa, Homo sapiens
MYGSARSVGKVEPSSQSPGRSPRLPRSPRLGHRRTNSTGGSSGSSVGGGSGKTLSMENIQSLNAAYATSGPMYLSDHENVGSETPKSTMTLGRSGGRLPYGVRMTAMGSSPNIASSGVASDTIAFGEHHLPPVSMASTVPHSLRQARDNTIMDLQTQLKEVLRENDLLRKDVEVKESKLSSSMNSIKTFWSPELKKERALRKDEASKITIWKEQYRVVQEENQHMQMTIQALQDELRIQRDLNQLFQQDSSSRTGEPCVAELTEENFQRLHAEHERQAKELFLLRKTLEEMELRIETQKQTLNARDESIKKLLEMLQSKGLSAKATEEDHERTRRLAEAEMHVHHLESLLEQKEKENSMLREEMHRRFENAPDSAKTKALQTVIEMKDSKISSMERGLRDLEEEIQMLKSNGALSTEEREEEMKQMEVYRSHSKFMKNKIGQVKQELSRKDTELLALQTKLETLTNQFSDSKQHIEVLKESLTAKEQRAAILQTEVDALRLRLEEKETMLNKKTKQIQDMAEEKGTQAGEIHDLKDMLDVKERKVNVLQKKIENLQEQLRDKEKQMSSLKERVKSLQADTTNTDTALTTLEEALAEKERTIERLKEQRDRDEREKQEEIDNYKKDLKDLKEKVSLLQGDLSEKEASLLDLKEHASSLASSGLKKDSRLKTLEIALEQKKEECLKMESQLKKAHEAALEARASPEMSDRIQHLEREITRYKDESSKAQAEVDRLLEILKEVENEKNDKDKKIAELESLTSRQVKDQNKKVANLKHKEQVEKKKSAQMLEEARRREDNLNDSSQQLQVEELLMAMEKVKQELESMKAKLSSTQQSLAEKETHLTNLRAERRKHLEEVLEMKQEALLAAISEKDANIALLELSSSKKKTQEEVAALKREKDRLVQQLKQQTQNRMKLMADNYEDDHFKSSHSNQTNHKPSPDQDEEEGIWA

SEQ ID NO: 1030 - DNA, 7051 bp, Homo sapiens
gtgctgtggcggcggcggcggcggtagtggcggcggcggcggtgcctgggcggcagcagcagcagtagcggcagccctgaggacggtgagacggccgcggcggcggcgacagcgcggaagtcgcgcgggacccagagcttcccccctgtcgctagtgctgaggctttcgcctttcctacccagcttcttgctcacggcccgggctgggctgggcagggcaacgcgcccccggggaggggcggagctgtagatatggtgtaagatacttcttcaagattggacagctggggaccttcttctgattaaccttaaaccaacttgtagccatagagacacctcacaaggttcccatttttgttgttgttgttgttgattttctgctcacacctttcctgaccttgcaaccatgtatggaagtgcccgctctgttgggaaggtggagccgagcagccagagccctgggcgttcacccaggcttccacgttcccctcgcttgggtcaccgtcgaaccaacagtacgggagggagttcgggaagcagtgttggaggtggcagtgggaaaaccctttcaatggaaaatatacaatctttaaatgctgcctatgccacctctggccctatgtatctaagtgaccatgaaaatgtgggttcagaaacacctaaaagcaccatgacacttggccgttctgggggacgtctgccttacggtgttcggatgactgctatgggtagtagccccaatatagctagcagtggggttgctagtgacaccatagcatttggagagcatcacctccctcctgtgagtatggcatccactgtacctcactcccttcgtcaggcgagagataacacaatcatggatctgcagacacagctgaaggaagtattaagagaaaatgatctcttgcggaaggatgtggaagtaaaggagagcaaattgagttcttcaatgaatagcatcaagaccttctggagcccagagctgaagaaggaacgagccctgagaaaagatgaagcttccaaaatcaccatttggaaggaacagtacagagttgtacaggaggaaaaccagcacatgcagatgacaatccaggctctccaggatgaattgcggatccagagggacctgaatcagctgtttcagcaggatagtagcagcaggactggcgaaccttgtgtagcagagctgacagaggagaactttcagaggcttcatgctgagcatgagcggcaggccaaagagctgtttcttcttcgaaagacattggaggaaatggagctgcgtattgagactcaaaagcagaccctaaatgctcgggatgaatccattaagaagcttctggaaatgttgcagagcaaaggactttctgccaaggctaccgaggaagaccatgagagaacaagacgactggcagaggcagagatgcacgttcatcacctagaaagccttttggagcagaaggaaaaagagaacagtatgttgagagaggagatgcatcgaaggtttgagaatgctcctgattctgccaaaacaaaagctctgcaaactgttattgagatgaaggattcaaaaatttcctctatggagcgtgggcttcgagacctggaagaggaaattcagatgctgaaatcgaatggtgctttgagtactgaggaaagggaagaagaaatgaagcaaatggaagtgtatcggagccattctaaatttatgaaaaataagattggccaggtgaaacaggagctgtccagaaaggacacagaactactcgccctgcagacaaagctagaaacactcacaaaccagttctcagatagtaaacagcacattgaagtgttgaaggagtccttgactgctaaggagcagagggctgccatcctgcagactgaggtggatgctctccgattgcgtttggaagagaaggaaaccatgttgaataaaaagacaaaacaaattcaggatatggctgaagagaaggggacacaagctggagagatacatgacctcaaggacatgttggatgtgaaggagcggaaggttaatgttcttcagaagaagattgaaaatcttcaagagcagcttagagacaaggaaaagcagatgagcagcttgaaagaacgggtcaaatccttgcaggctgacaccaccaacactgacactgccttgacaactttggaggaggcccttgcagagaaagagcggacaattgaacgcttaaaggagcagagggacagagatgagcgagagaagcaagaggaaattgataactacaaaaaagatcttaaagacttgaaggaaaaagtcagcctgttgcaaggcgacctttcagagaaagaggcttcacttttggatctgaaagagcatgcttcttctctggcatcctcaggactgaaaaaggactcacggcttaagacactagagattgctttggagcagaagaaggaggagtgtctgaaaatggaatcacaattgaaaaaggcacatgaggcagcattggaagccagagccagtccagagatgagtgaccgaatacagcacttggagagagagatcaccaggtacaaagatgaatctagcaaggcccaggcagaagttgatcgactcttagaaatcttgaaggaggtggaaaatgagaagaatgacaaagataagaagatagctgagttggaaagtctcacctcaaggcaagtgaaagaccagaataagaaggtagcaaatctgaagcacaaggaacaggtggaaaaaaagaagagtgcacaaatgttagaggaggcgcgacgacgggaggacaatctcaacgacagctctcagcagctacaggacagtctccgtaagaaggatgacaggattgaagagctggaagaagcactaagagaaagtgtacagataactgcagagcgggaaatggtgctagcacaagaggaatcagccaggaccaatgctgaaaaacaggtggaggagttactgatggccatggagaaggtaaagcaggaactagaatccatgaaagcaaagctgtcctccacccagcagtctctggcagaaaaggaaactcacttgactaatcttcgggcagagagaaggaaacacttagaggaagttctggagatgaagcaagaagctcttctggctgccattagtgaaaaagacgccaatatagctctcttggagctttcgtcctctaagaagaagacccaagaggaagtggctgccctgaagcgggagaaggatcgtctggtacagcagcttaagcagcagacgcaaaatcgaatgaagctaatggccgacaactacgaggatgaccacttcaaatcctcccattccaatcaaacaaatcacaagccctccccagaccaggatgaggaggagggtatatgggcatagccaatcagaggcttagttcagccattttgttcagaacgatcatccagcccctcttagaacttgaccaaaatagaagtaaattaaagttgtacattggacacctgacaaccctctgccatgaccgagaccccctgatcctccgtggactcactccaccagcttcctataacttggacgatgaccaggcggcttgggagaatgagctgcagaagatgacccgggggcagcttcaggatgagttagagaaaggtgaacgggacaatgcagaactgcaggagtttgccaacgccattcttcagcagatagcagaccattgtcccgacatcctagagcaagtggtcaacgccctggaagagtcctcttgaccctgctttatggggaagcctgaggtagtcaacccaggagccaagaaaagagaactacgaggaacaggtgcccggaaccttcttggcaccaaacactacaaacttcatcccaacttgctcacttgaagaagtgtgattccagcaccgtttctacatctgccatcttactctgcctttctgctttggatgtggtctctacactaaccttcttgatgtccagggtagataaagggtcgaatctctctgaagaactgccacctggtcatcagcagtggagaactgtgggagctggtggctctgccctgacagagagccatggagcagaggagcctctcacctcctgtcctctgacatgagaatgaaaccaggaatggacttggagttcaacaggctgagaggatgcctccaatggaccagagagctgagtgttctaatatcacaataggtgctttctcctaaaagggcaaaaaacaatctcaaaaagattagaaaaagagaaggggggaagggaagagaaaatcgactcttctttttactgtctcttctgcttactttccacatgagatgctttgtaccggggagctgtgagcaggcctcacgatggcttgggagcactcgttctcccaaggtctgagtcttcatccagccctgcctgtctgtcgcagccttcctcactctgttcctcggccagttaacaagaagatggtgtgaggtgttctccaccagtctctcctgtttgagactgttgacgttatcatactgaggtgttagatcaaatatctctaattgaagaacatgtgaggttgaaagagcaccagccagggcaacatagcgtgaccctgtctctacaaaaaattaaaaagagaacatacaaagttgacatatgagaccctgttgtccccgcctgcagctttgccccagtaacagatgcccgttgctcttgggctggtttcccctgaacacctccaagaggctgcctgccttgccagcacccgtgtcctgagctcctgcagcccagtggctgctgaagttgtgatccctcactcaccctgctagctttgcccttgactcgtcttctctgaacctcagcctcgtgcattgcctggaaccttcttctagcataaatgaaggtttttcctcctacacacattccttcctcggttatttcattcagagaatatttatgaaatgcctactgtgtgcaagtcatccatccttgaaaaggccacttctcagtgagggagagatgtagtggattctgtgagacatacctgctggagttgaagcagtaaatagcatgtccttcccctccccgatcttaaggtgtgttttctagaaaagttccctaatggaattcatgagtttgggggtctcagtcacccgcttgcctgtaggattccatttgatgattctggatttttgctgtttgttattgcccttagaggggctctgagtatctacttgtgggtggccatttcctgacatctgcatgtacctcgtggaattcagccagcttcatgttgcaaatcagaaagctgaccccaagactgcaaatcaatgaaggtattggcattgttaaggacgtagcgtagacaacagcagtcataaataattaggcaggaacttaacccaaatctagttctttgaccacctctaccaccagaacccagcagacactcacatctcctgataagagttgctggactcgatgtttttgttttgcattttctcctctccttccccacttactcagagaatttaaagtctgtagagtcagcacagccccatcagtccaggaacttcccaccaccagcccttgactgtcccattaactgacatggtcagatttccagctccccctactccctgctgtgaaacaatccctctccctgtgagaggaaactgtggagcgtttcttatcgaaggttaaatggactctgctcataaacctcttactgagatgcttcctgatagccaggctggccagagaggggtgcaggggttagatagtaagtggtggtcgtttgtggtcagttacctcaattctgttcattgcagtgcccgtaaaccatgtagaaagctcccagcactgaaaggcaggagtgttagcatctcgctttatccaccataacgtaaagaactgcggtgtgataacagccttcacggggccacggtggaaccaagacagcaggcgaggccatgcctaaacaagtggtctggcacgggcactggccagctgctctctccaagcaggtggcccagatcccacccacgtggactttctcatcaggtgcagcgcctgccactctcagccactgggtgtgtgactctcctcttcatctcagcattctccatcacttcccctccagaaaaacggatggaaggaagccctctgtgacactgcttctgagaagaagcatttccgggaccgatatcatctgtctggtctctgtgaacagcaaggaatcttcttgaccgttcttgggcactggaggctggctaggagttcagtaataaacgtggccttcgtgctgtagggcagagtggatgcagtttgtagctttcagagtgtctcattgagtctagatcattgaaccaacacttaaccaaatgtcccactcccatcacactaggacttgtcattccatgcccctctcctagtggtcatggtttcatatgggcatacaactgctactgaagttatatagccttgaaaactcagtgcaggttgcccttaattttccccaaacccctccatcggcaagtctagttgccctttagcacctaaagatctgcaccccaaaccaatgtcaccataaagagggcacgaagaagagtgggtgtgatcccaacggggttttgtaactgaagaagcccagtgtgagcttctcatcttttcatatacctctaacccccggtactcattgaatcattgatgaggtatctcaattgagatttgcaaggactttgataccatttgaaatggaaaaattttgaacgggctttaacatgtttaagaaatatggatggggccggccacagtggctcacgcctgtaatcccagaactctggaaggctgaggcaggcggatcacctgagatcaggagttcgaggccagcctggccaagatggcaaaaaccccgactctactaaaaatacaaaattagccaggcgtggtggcgtacgcctgtaatcccagctactcaggaggcaggagaatcgcttgagcctgggaggcagaggctgcggtgagccgagatcgtgtcactgcactccagcctgggtgacagagactccattt

SEQ ID NO: 1031 - protein, 992 aa, Homo sapiens
MYGSARSVGKVEPSSQSPGRSPRLPRSPRLGHRRTNSTGGSSGSSVGGGSGKTLSMENIQSLNAAYATSGPMYLSDHENVGSETPKSTMTLGRSGGRLPYGVRMTAMGSSPNIASSGVASDTIAFGEHHLPPVSMASTVPHSLRQARDNTIMDLQTQLKEVLRENDLLRKDVEVKESKLSSSMNSIKTFWSPELKKERALRKDEASKITIWKEQYRVVQEENQHMQMTIQALQDELRIQRDLNQLFQQDSSSRTGEPCVAELTEENFQRLHAEHERQAKELFLLRKTLEEMELRIETQKQTLNARDESIKKLLEMLQSKGLSAKATEEDHERTRRLAEAEMHVHHLESLLEQKEKENSMLREEMHRRFENAPDSAKTKALQTVIEMKDSKISSMERGLRDLEEEIQMLKSNGALSTEEREEEMKQMEVYRSHSKFMKNKIGQVKQELSRKDTELLALQTKLETLTNQFSDSKQHIEVLKESLTAKEQRAAILQTEVDALRLRLEEKETMLNKKTKQIQDMAEEKGTQAGEIHDLKDMLDVKERKVNVLQKKIENLQEQLRDKEKQMSSLKERVKSLQADTTNTDTALTTLEEALAEKERTIERLKEQRDRDEREKQEEIDNYKKDLKDLKEKVSLLQGDLSEKEASLLDLKEHASSLASSGLKKDSRLKTLEIALEQKKEECLKMESQLKKAHEAALEARASPEMSDRIQHLEREITRYKDESSKAQAEVDRLLEILKEVENEKNDKDKKIAELESLTSRQVKDQNKKVANLKHKEQVEKKKSAQMLEEARRREDNLNDSSQQLQDSLRKKDDRIEELEEALRESVQITAEREMVLAQEESARTNAEKQVEELLMAMEKVKQELESMKAKLSSTQQSLAEKETHLTNLRAERRKHLEEVLEMKQEALLAAISEKDANIALLELSSSKKKTQEEVAALKREKDRLVQQLKQQTQNRMKLMADNYEDDHFKSSHSNQTNHKPSPDQDEEEGIWA

SEQ ID NO: 1032 - DNA, 6070 bp, Homo sapiens
gtgctgtggcggcggcggcggcggtagtggcggcggcggcggtgcctgggcggcagcagcagcagtagcggcagccctgaggacgatatggtgtaagatacttcttcaagattggacagctggggaccttcttctgattaaccttaaaccaacttgtagccatagagacacctcacaaggttcccatttttgttgttgttgttgttgattttctgctcacacctttcctgaccttgcaaccatgtatggaagtgcccgctctgttgggaaggtggagccgagcagccagagccctgggcgttcacccaggcttccacgttcccctcgcttgggtcaccgtcgaaccaacagtacgggagggagttcgggaagcagtgttggaggtggcagtgggaaaaccctttcaatggaaaatatacaatctttaaatgctgcctatgccacctctggccctatgtatctaagtgaccatgaaaatgtgggttcagaaacacctaaaagcaccatgacacttggccgttctgggggacgtctgccttacggtgttcggatgactgctatgggtagtagccccaatatagctagcagtggggttgctagtgacaccatagcatttggagagcatcacctccctcctgtgagtatggcatccactgtacctcactcccttcgtcaggcgagagataacacaatcatggatctgcagacacagctgaaggaagtattaagagaaaatgatctcttgcggaaggatgtggaagtaaaggagagcaaattgagttcttcaatgaatagcatcaagaccttctggagcccagagctgaagaaggaacgagccctgagaaaagatgaagcttccaaaatcaccatttggaaggaacagtacagagttgtacaggaggaaaaccaggtggatgctctccgattgcgtttggaagagaaggaaaccatgttgaataaaaagacaaaacaaattcaggatatggctgaagagaaggggacacaagctggagagatacatgacctcaaggacatgttggatgtgaaggagcggaaggttaatgttcttcagaagaagattgaaaatcttcaagagcagcttagagacaaggaaaagcagatgagcagcttgaaagaacgggtcaaatccttgcaggctgacaccaccaacactgacactgccttgacaactttggaggaggcccttgcagagaaagagcggacaattgaacgcttaaaggagcagagggacagagatgagcgagagaagcaagaggaaattgataactacaaaaaagatcttaaagacttgaaggaaaaagtcagcctgttgcaaggcgacctttcagagaaagaggcttcacttttggatctgaaagagcatgcttcttctctggcatcctcaggactgaaaaaggactcacggcttaagacactagagattgctttggagcagaagaaggaggagtgtctgaaaatggaatcacaattgaaaaaggcacatgaggcagcattggaagccagagccagtccagagatgagtgaccgaatacagcacttggagagagagatcaccaggtacaaagatgaatctagcaaggcccaggcagaagttgatcgactcttagaaatcttgaaggaggtggaaaatgagaagaatgacaaagataagaagatagctgagttggaaagtctcacctcaaggcaagtgaaagaccagaataagaaggtagcaaatctgaagcacaaggaacaggtggaaaaaaagaagagtgcacaaatgttagaggaggcgcgacgacgggaggacaatctcaacgacagctctcagcagctacaggacagtctccgtaagaaggatgacaggattgaagagctggaagaagcactaagagaaagtgtacagataactgcagagcgggaaatggtgctagcacaagaggaatcagccaggaccaatgctgaaaaacaggtggaggagttactgatggccatggagaaggtaaagcaggaactagaatccatgaaagcaaagctgtcctccacccagcagtctctggcagaaaaggaaactcacttgactaatcttcgggcagagagaaggaaacacttagaggaagttctggagatgaagcaagaagctcttctggctgccattagtgaaaaagacgccaatatagctctcttggagctttcgtcctctaagaagaagacccaagaggaagtggctgccctgaagcgggagaaggatcgtctggtacagcagcttaagcagcagacgcaaaatcgaatgaagctaatggccgacaactacgaggatgaccacttcaaatcctcccattccaatcaaacaaatcacaagccctccccagaccaggatgaggaggagggtatatgggcatagccaatcagaggcttagttcagccattttgttcagaacgatcatccagcccctcttagaacttgaccaaaatagaagtaaattaaagttgtacattggacacctgacaaccctctgccatgaccgagaccccctgatcctccgtggactcactccaccagcttcctataacttggacgatgaccaggcggcttgggagaatgagctgcagaagatgacccgggggcagcttcaggatgagttagagaaaggtgaacgggacaatgcagaactgcaggagtttgccaacgccattcttcagcagatagcagaccattgtcccgacatcctagagcaagtggtcaacgccctggaagagtcctcttgaccctgctttatggggaagcctgaggtagtcaacccaggagccaagaaaagagaactacgaggaacaggtgcccggaaccttcttggcaccaaacactacaaacttcatcccaacttgctcacttgaagaagtgtgattccagcaccgtttctacatctgccatcttactctgcctttctgctttggatgtggtctctacactaaccttcttgatgtccagggtagataaagggtcgaatctctctgaagaactgccacctggtcatcagcagtggagaactgtgggagctggtggctctgccctgacagagagccatggagcagaggagcctctcacctcctgtcctctgacatgagaatgaaaccaggaatggacttggagttcaacaggctgagaggatgcctccaatggaccagagagctgagtgttctaatatcacaataggtgctttctcctaaaagggcaaaaaacaatctcaaaaagattagaaaaagagaaggggggaagggaagagaaaatcgactcttctttttactgtctcttctgcttactttccacatgagatgctttgtaccggggagctgtgagcaggcctcacgatggcttgggagcactcgttctcccaaggtctgagtcttcatccagccctgcctgtctgtcgcagccttcctcactctgttcctcggccagttaacaagaagatggtgtgaggtgttctccaccagtctctcctgtttgagactgttgacgttatcatactgaggtgttagatcaaatatctctaattgaagaacatgtgaggttgaaagagcaccagccagggcaacatagcgtgaccctgtctctacaaaaaattaaaaagagaacatacaaagttgacatatgagaccctgttgtccccgcctgcagctttgccccagtaacagatgcccgttgctcttgggctggtttcccctgaacacctccaagaggctgcctgccttgccagcacccgtgtcctgagctcctgcagcccagtggctgctgaagttgtgatccctcactcaccctgctagctttgcccttgactcgtcttctctgaacctcagcctcgtgcattgcctggaaccttcttctagcataaatgaaggtttttcctcctacacacattccttcctcggttatttcattcagagaatatttatgaaatgcctactgtgtgcaagtcatccatccttgaaaaggccacttctcagtgagggagagatgtagtggattctgtgagacatacctgctggagttgaagcagtaaatagcatgtccttcccctccccgatcttaaggtgtgttttctagaaaagttccctaatggaattcatgagtttgggggtctcagtcacccgcttgcctgtaggattccatttgatgattctggatttttgctgtttgttattgcccttagaggggctctgagtatctacttgtgggtggccatttcctgacatctgcatgtacctcgtggaattcagccagcttcatgttgcaaatcagaaagctgaccccaagactgcaaatcaatgaaggtattggcattgttaaggacgtagcgtagacaacagcagtcataaataattaggcaggaacttaacccaaatctagttctttgaccacctctaccaccagaacccagcagacactcacatctcctgataagagttgctggactcgatgtttttgttttgcattttctcctctccttccccacttactcagagaatttaaagtctgtagagtcagcacagccccatcagtccaggaacttcccaccaccagcccttgactgtcccattaactgacatggtcagatttccagctccccctactccctgctgtgaaacaatccctctccctgtgagaggaaactgtggagcgtttcttatcgaaggttaaatggactctgctcataaacctcttactgagatgcttcctgatagccaggctggccagagaggggtgcaggggttagatagtaagtggtggtcgtttgtggtcagttacctcaattctgttcattgcagtgcccgtaaaccatgtagaaagctcccagcactgaaaggcaggagtgttagcatctcgctttatccaccataacgtaaagaactgcggtgtgataacagccttcacggggccacggtggaaccaagacagcaggcgaggccatgcctaaacaagtggtctggcacgggcactggccagctgctctctccaagcaggtggcccagatcccacccacgtggactttctcatcaggtgcagcgcctgccactctcagccactgggtgtgtgactctcctcttcatctcagcattctccatcacttcccctccagaaaaacggatggaaggaagccctctgtgacactgcttctgagaagaagcatttccgggaccgatatcatctgtctggtctctgtgaacagcaaggaatcttcttgaccgttcttgggcactggaggctggctaggagttcagtaataaacgtggccttcgtgctgtagggcagagtggatgcagtttgtagctttcagagtgtctcattgagtctagatcattgaaccaacacttaaccaaatgtcccactcccatcacactaggacttgtcattccatgcccctctcctagtggtcatggtttcatatgggcatacaactgctactgaagttatatagccttgaaaactcagtgcaggttgcccttaattttccccaaacccctccatcggcaagtctagttgccctttagcacctaaagatctgcaccccaaaccaatgtcaccataaagagggcacgaagaagagtgggtgtgatcccaacggggttttgtaactgaagaagcccagtgtgagcttctcatcttttcatatacctctaacccccggtactcattgaatcattgatgaggtatctcaattgagatttgcaaggactttgataccatttgaaatggaaaaattttgaacgggctttaacatgtttaagaaatatggatggggccggccacagtggctcacgcctgtaatcccagaactctggaaggctgaggcaggcggatcacctgagatcaggagttcgaggccagcctggccaagatggcaaaaaccccgactctactaaaaatacaaaattagccaggcgtggtggcgtacgcctgtaatcccagctactcaggaggcaggagaatcgcttgagcctgggaggcagaggctgcggtgagccgagatcgtgtcactgcactccagcctgggtgacagagactccattt

SEQ ID NO: 1033 - protein, 720 aa, Homo sapiens
MYGSARSVGKVEPSSQSPGRSPRLPRSPRLGHRRTNSTGGSSGSSVGGGSGKTLSMENIQSLNAAYATSGPMYLSDHENVGSETPKSTMTLGRSGGRLPYGVRMTAMGSSPNIASSGVASDTIAFGEHHLPPVSMASTVPHSLRQARDNTIMDLQTQLKEVLRENDLLRKDVEVKESKLSSSMNSIKTFWSPELKKERALRKDEASKITIWKEQYRVVQEENQVDALRLRLEEKETMLNKKTKQIQDMAEEKGTQAGEIHDLKDMLDVKERKVNVLQKKIENLQEQLRDKEKQMSSLKERVKSLQADTTNTDTALTTLEEALAEKERTIERLKEQRDRDEREKQEEIDNYKKDLKDLKEKVSLLQGDLSEKEASLLDLKEHASSLASSGLKKDSRLKTLEIALEQKKEECLKMESQLKKAHEAALEARASPEMSDRIQHLEREITRYKDESSKAQAEVDRLLEILKEVENEKNDKDKKIAELESLTSRQVKDQNKKVANLKHKEQVEKKKSAQMLEEARRREDNLNDSSQQLQDSLRKKDDRIEELEEALRESVQITAEREMVLAQEESARTNAEKQVEELLMAMEKVKQELESMKAKLSSTQQSLAEKETHLTNLRAERRKHLEEVLEMKQEALLAAISEKDANIALLELSSSKKKTQEEVAALKREKDRLVQQLKQQTQNRMKLMADNYEDDHFKSSHSNQTNHKPSPDQDEEEGIWA

SEQ ID NO: 1034 - DNA, 6809 bp, Homo sapiens
gtgctgtggcggcggcggcggcggtagtggcggcggcggcggtgcctgggcggcagcagcagcagtagcggcagccctgaggacgatatggtgtaagatacttcttcaagattggacagctggggaccttcttctgattaaccttaaaccaacttgtagccatagagacacctcacaaggttcccatttttgttgttgttgttgttgattttctgctcacacctttcctgaccttgcaaccatgtatggaagtgcccgctctgttgggaaggtggagccgagcagccagagccctgggcgttcacccaggcttccacgttcccctcgcttgggtcaccgtcgaaccaacagtacgggagggagttcgggaagcagtgttggaggtggcagtgggaaaaccctttcaatggaaaatatacaatctttaaatgctgcctatgccacctctggccctatgtatctaagtgaccatgaaaatgtgggttcagaaacacctaaaagcaccatgacacttggccgttctgggggacgtctgccttacggtgttcggatgactgctatgggtagtagccccaatatagctagcagtggggttgctagtgacaccatagcatttggagagcatcacctccctcctgtgagtatggcatccactgtacctcactcccttcgtcaggcgagagataacacaatcatggatctgcagacacagctgaaggaagtattaagagaaaatgatctcttgcggaaggatgtggaagtaaaggagagcaaattgagttcttcaatgaatagcatcaagaccttctggagcccagagctgaagaaggaacgagccctgagaaaagatgaagcttccaaaatcaccatttggaaggaacagtacagagttgtacaggaggaaaaccagcacatgcagatgacaatccaggctctccaggatgaattgcggatccagagggacctgaatcagctgtttcagcaggatagtagcagcaggactggcgaaccttgtgtagcagagctgacagaggagaactttcagaggcttcatgctgagcatgagcggcaggccaaagagctgtttcttcttcgaaagacattggaggaaatggagctgcgtattgagactcaaaagcagaccctaaatgctcgggatgaatccattaagaagcttctggaaatgttgcagagcaaaggactttctgccaaggctaccgaggaagaccatgagagaacaagacgactggcagaggcagagatgcacgttcatcacctagaaagccttttggagcagaaggaaaaagagaacagtatgttgagagaggagatgcatcgaaggtttgagaatgctcctgattctgccaaaacaaaagctctgcaaactgttattgagatgaaggattcaaaaatttcctctatggagcgtgggcttcgagacctggaagaggaaattcagatgctgaaatcgaatggtgctttgagtactgaggaaagggaagaagaaatgaagcaaatggaagtgtatcggagccattctaaatttatgaaaaataagattggccaggtgaaacaggagctgtccagaaaggacacagaactactcgccctgcagacaaagctagaaacactcacaaaccagttctcagatagtaaacagcacattgaagtgttgaaggagtccttgactgctaaggagcagagggctgccatcctgcagactgaggtggatgctctccgattgcgtttggaagagaaggaaaccatgttgaataaaaagacaaaacaaattcaggatatggctgaagagaaggggacacaagctggagagatacatgacctcaaggacatgttggatgtgaaggagcggaaggttaatgttcttcagaagaagattgaaaatcttcaagagcagcttagagacaaggaaaagcagatgagcagcttgaaagaacgggtcaaatccttgcaggctgacaccaccaacactgacactgccttgacaactttggaggaggcccttgcagagaaagagcggacaattgaacgcttaaaggagcagagggacagagatgagcgagagaagcaagaggaaattgataactacaaaaaagatcttaaagacttgaaggaaaaagtcagcctgttgcaaggcgacctttcagagaaagaggcttcacttttggatctgaaagagcatgcttcttctctggcatcctcaggactgaaaaaggactcacggcttaagacactagagattgctttggagcagaagaaggaggagtgtctgaaaatggaatcacaattgaaaaaggcacatgaggcagcattggaagccagagccagtccagagatgagtgaccgaatacagcacttggagagagagatcaccaggtacaaagatgaatctagcaaggcccaggcagaagttgatcgactcttagaaatcttgaaggaggtggaaaatgagaagaatgacaaagataagaagatagctgagttggaaaggcaagtgaaagaccagaataagaaggtagcaaatctgaagcacaaggaacaggtggaaaaaaagaagagtgcacaaatgttagaggaggcgcgacgacgggaggacaatctcaacgacagctctcagcagctacaggacagtctccgtaagaaggatgacaggattgaagagctggaagaagcactaagagaaagtgtacagataactgcagagcgggaaatggtgctagcacaagaggaatcagccaggaccaatgctgaaaaacaggtggaggagttactgatggccatggagaaggtaaagcaggaactagaatccatgaaagcaaagctgtcctccacccagcagtctctggcagaaaaggaaactcacttgactaatcttcgggcagagagaaggaaacacttagaggaagttctggagatgaagcaagaagctcttctggctgccattagtgaaaaagacgccaatatagctctcttggagctttcgtcctctaagaagaagacccaagaggaagtggctgccctgaagcgggagaaggatcgtctggtacagcagcttaagcagcagacgcaaaatcgaatgaagctaatggccgacaactacgaggatgaccacttcaaatcctcccattccaatcaaacaaatcacaagccctccccagaccagatcatccagcccctcttagaacttgaccaaaatagaagtaaattaaagttgtacattggacacctgacaaccctctgccatgaccgagaccccctgatcctccgtggactcactccaccagcttcctataacttggacgatgaccaggcggcttgggagaatgagctgcagaagatgacccgggggcagcttcaggatgagttagagaaaggtgaacgggacaatgcagaactgcaggagtttgccaacgccattcttcagcagatagcagaccattgtcccgacatcctagagcaagtggtcaacgccctggaagagtcctcttgaccctgctttatggggaagcctgaggtagtcaacccaggagccaagaaaagagaactacgaggaacaggtgcccggaaccttcttggcaccaaacactacaaacttcatcccaacttgctcacttgaagaagtgtgattccagcaccgtttctacatctgccatcttactctgcctttctgctttggatgtggtctctacactaaccttcttgatgtccagggtagataaagggtcgaatctctctgaagaactgccacctggtcatcagcagtggagaactgtgggagctggtggctctgccctgacagagagccatggagcagaggagcctctcacctcctgtcctctgacatgagaatgaaaccaggaatggacttggagttcaacaggctgagaggatgcctccaatggaccagagagctgagtgttctaatatcacaataggtgctttctcctaaaagggcaaaaaacaatctcaaaaagattagaaaaagagaaggggggaagggaagagaaaatcgactcttctttttactgtctcttctgcttactttccacatgagatgctttgtaccggggagctgtgagcaggcctcacgatggcttgggagcactcgttctcccaaggtctgagtcttcatccagccctgcctgtctgtcgcagccttcctcactctgttcctcggccagttaacaagaagatggtgtgaggtgttctccaccagtctctcctgtttgagactgttgacgttatcatactgaggtgttagatcaaatatctctaattgaagaacatgtgaggttgaaagagcaccagccagggcaacatagcgtgaccctgtctctacaaaaaattaaaaagagaacatacaaagttgacatatgagaccctgttgtccccgcctgcagctttgccccagtaacagatgcccgttgctcttgggctggtttcccctgaacacctccaagaggctgcctgccttgccagcacccgtgtcctgagctcctgcagcccagtggctgctgaagttgtgatccctcactcaccctgctagctttgcccttgactcgtcttctctgaacctcagcctcgtgcattgcctggaaccttcttctagcataaatgaaggtttttcctcctacacacattccttcctcggttatttcattcagagaatatttatgaaatgcctactgtgtgcaagtcatccatccttgaaaaggccacttctcagtgagggagagatgtagtggattctgtgagacatacctgctggagttgaagcagtaaatagcatgtccttcccctccccgatcttaaggtgtgttttctagaaaagttccctaatggaattcatgagtttgggggtctcagtcacccgcttgcctgtaggattccatttgatgattctggatttttgctgtttgttattgcccttagaggggctctgagtatctacttgtgggtggccatttcctgacatctgcatgtacctcgtggaattcagccagcttcatgttgcaaatcagaaagctgaccccaagactgcaaatcaatgaaggtattggcattgttaaggacgtagcgtagacaacagcagtcataaataattaggcaggaacttaacccaaatctagttctttgaccacctctaccaccagaacccagcagacactcacatctcctgataagagttgctggactcgatgtttttgttttgcattttctcctctccttccccacttactcagagaatttaaagtctgtagagtcagcacagccccatcagtccaggaacttcccaccaccagcccttgactgtcccattaactgacatggtcagatttccagctccccctactccctgctgtgaaacaatccctctccctgtgagaggaaactgtggagcgtttcttatcgaaggttaaatggactctgctcataaacctcttactgagatgcttcctgatagccaggctggccagagaggggtgcaggggttagatagtaagtggtggtcgtttgtggtcagttacctcaattctgttcattgcagtgcccgtaaaccatgtagaaagctcccagcactgaaaggcaggagtgttagcatctcgctttatccaccataacgtaaagaactgcggtgtgataacagccttcacggggccacggtggaaccaagacagcaggcgaggccatgcctaaacaagtggtctggcacgggcactggccagctgctctctccaagcaggtggcccagatcccacccacgtggactttctcatcaggtgcagcgcctgccactctcagccactgggtgtgtgactctcctcttcatctcagcattctccatcacttcccctccagaaaaacggatggaaggaagccctctgtgacactgcttctgagaagaagcatttccgggaccgatatcatctgtctggtctctgtgaacagcaaggaatcttcttgaccgttcttgggcactggaggctggctaggagttcagtaataaacgtggccttcgtgctgtagggcagagtggatgcagtttgtagctttcagagtgtctcattgagtctagatcattgaaccaacacttaaccaaatgtcccactcccatcacactaggacttgtcattccatgcccctctcctagtggtcatggtttcatatgggcatacaactgctactgaagttatatagccttgaaaactcagtgcaggttgcccttaattttccccaaacccctccatcggcaagtctagttgccctttagcacctaaagatctgcaccccaaaccaatgtcaccataaagagggcacgaagaagagtgggtgtgatcccaacggggttttgtaactgaagaagcccagtgtgagcttctcatcttttcatatacctctaacccccggtactcattgaatcattgatgaggtatctcaattgagatttgcaaggactttgataccatttgaaatggaaaaattttgaacgggctttaacatgtttaagaaatatggatggggccggccacagtggctcacgcctgtaatcccagaactctggaaggctgaggcaggcggatcacctgagatcaggagttcgaggccagcctggccaagatggcaaaaaccccgactctactaaaaatacaaaattagccaggcgtggtggcgtacgcctgtaatcccagctactcaggaggcaggagaatcgcttgagcctgggaggcagaggctgcggtgagccgagatcgtgtcactgcactccagcctgggtgacagagactccattt

SEQ ID NO: 1035 - protein, 1088 aa, Homo sapiens
MYGSARSVGKVEPSSQSPGRSPRLPRSPRLGHRRTNSTGGSSGSSVGGGSGKTLSMENIQSLNAAYATSGPMYLSDHENVGSETPKSTMTLGRSGGRLPYGVRMTAMGSSPNIASSGVASDTIAFGEHHLPPVSMASTVPHSLRQARDNTIMDLQTQLKEVLRENDLLRKDVEVKESKLSSSMNSIKTFWSPELKKERALRKDEASKITIWKEQYRVVQEENQHMQMTIQALQDELRIQRDLNQLFQQDSSSRTGEPCVAELTEENFQRLHAEHERQAKELFLLRKTLEEMELRIETQKQTLNARDESIKKLLEMLQSKGLSAKATEEDHERTRRLAEAEMHVHHLESLLEQKEKENSMLREEMHRRFENAPDSAKTKALQTVIEMKDSKISSMERGLRDLEEEIQMLKSNGALSTEEREEEMKQMEVYRSHSKFMKNKIGQVKQELSRKDTELLALQTKLETLTNQFSDSKQHIEVLKESLTAKEQRAAILQTEVDALRLRLEEKETMLNKKTKQIQDMAEEKGTQAGEIHDLKDMLDVKERKVNVLQKKIENLQEQLRDKEKQMSSLKERVKSLQADTTNTDTALTTLEEALAEKERTIERLKEQRDRDEREKQEEIDNYKKDLKDLKEKVSLLQGDLSEKEASLLDLKEHASSLASSGLKKDSRLKTLEIALEQKKEECLKMESQLKKAHEAALEARASPEMSDRIQHLEREITRYKDESSKAQAEVDRLLEILKEVENEKNDKDKKIAELERQVKDQNKKVANLKHKEQVEKKKSAQMLEEARRREDNLNDSSQQLQDSLRKKDDRIEELEEALRESVQITAEREMVLAQEESARTNAEKQVEELLMAMEKVKQELESMKAKLSSTQQSLAEKETHLTNLRAERRKHLEEVLEMKQEALLAAISEKDANIALLELSSSKKKTQEEVAALKREKDRLVQQLKQQTQNRMKLMADNYEDDHFKSSHSNQTNHKPSPDQIIQPLLELDQNRSKLKLYIGHLTTLCHDRDPLILRGLTPPASYNLDDDQAAWENELQKMTRGQLQDELEKGERDNAELQEFANAILQQIADHCPDILEQVVNALEESS

SEQ ID NO: 1036 - DNA, 6893 bp, Homo sapiens
gtgctgtggcggcggcggcggcggtagtggcggcggcggcggtgcctgggcggcagcagcagcagtagcggcagccctgaggacgatatggtgtaagatacttcttcaagattggacagctggggaccttcttctgattaaccttaaaccaacttgtagccatagagacacctcacaaggttcccatttttgttgttgttgttgttgattttctgctcacacctttcctgaccttgcaaccatgtatggaagtgcccgctctgttgggaaggtggagccgagcagccagagccctgggcgttcacccaggcttccacgttcccctcgcttgggtcaccgtcgaaccaacagtacgggagggagttcgggaagcagtgttggaggtggcagtgggaaaaccctttcaatggaaaatatacaatctttaaatgctgcctatgccacctctggccctatgtatctaagtgaccatgaaaatgtgggttcagaaacacctaaaagcaccatgacacttggccgttctgggggacgtctgccttacggtgttcggatgactgctatgggtagtagccccaatatagctagcagtggggttgctagtgacaccatagcatttggagagcatcacctccctcctgtgagtatggcatccactgtacctcactcccttcgtcaggcgagagataacacaatcatggatctgcagacacagctgaaggaagtattaagagaaaatgatctcttgcggaaggatgtggaagtaaaggagagcaaattgagttcttcaatgaatagcatcaagaccttctggagcccagagctgaagaaggaacgagccctgagaaaagatgaagcttccaaaatcaccatttggaaggaacagtacagagttgtacaggaggaaaaccagcacatgcagatgacaatccaggctctccaggatgaattgcggatccagagggacctgaatcagctgtttcagcaggatagtagcagcaggactggcgaaccttgtgtagcagagctgacagaggagaactttcagaggcttcatgctgagcatgagcggcaggccaaagagctgtttcttcttcgaaagacattggaggaaatggagctgcgtattgagactcaaaagcagaccctaaatgctcgggatgaatccattaagaagcttctggaaatgttgcagagcaaaggactttctgccaaggctaccgaggaagaccatgagagaacaagacgactggcagaggcagagatgcacgttcatcacctagaaagccttttggagcagaaggaaaaagagaacagtatgttgagagaggagatgcatcgaaggtttgagaatgctcctgattctgccaaaacaaaagctctgcaaactgttattgagatgaaggattcaaaaatttcctctatggagcgtgggcttcgagacctggaagaggaaattcagatgctgaaatcgaatggtgctttgagtactgaggaaagggaagaagaaatgaagcaaatggaagtgtatcggagccattctaaatttatgaaaaataaggtagaacaactgaaggaggaactaagttcgaaagaggctcaatgggaggagctgaaaaagaaagcggctggtcttcaggctgagattggccaggtgaaacaggagctgtccagaaaggacacagaactactcgccctgcagacaaagctagaaacactcacaaaccagttctcagatagtaaacagcacattgaagtgttgaaggagtccttgactgctaaggagcagagggctgccatcctgcagactgaggtggatgctctccgattgcgtttggaagagaaggaaaccatgttgaataaaaagacaaaacaaattcaggatatggctgaagagaaggggacacaagctggagagatacatgacctcaaggacatgttggatgtgaaggagcggaaggttaatgttcttcagaagaagattgaaaatcttcaagagcagcttagagacaaggaaaagcagatgagcagcttgaaagaacgggtcaaatccttgcaggctgacaccaccaacactgacactgccttgacaactttggaggaggcccttgcagagaaagagcggacaattgaacgcttaaaggagcagagggacagagatgagcgagagaagcaagaggaaattgataactacaaaaaagatcttaaagacttgaaggaaaaagtcagcctgttgcaaggcgacctttcagagaaagaggcttcacttttggatctgaaagagcatgcttcttctctggcatcctcaggactgaaaaaggactcacggcttaagacactagagattgctttggagcagaagaaggaggagtgtctgaaaatggaatcacaattgaaaaaggcacatgaggcagcattggaagccagagccagtccagagatgagtgaccgaatacagcacttggagagagagatcaccaggtacaaagatgaatctagcaaggcccaggcagaagttgatcgactcttagaaatcttgaaggaggtggaaaatgagaagaatgacaaagataagaagatagctgagttggaaaggcaagtgaaagaccagaataagaaggtagcaaatctgaagcacaaggaacaggtggaaaaaaagaagagtgcacaaatgttagaggaggcgcgacgacgggaggacaatctcaacgacagctctcagcagctacaggacagtctccgtaagaaggatgacaggattgaagagctggaagaagcactaagagaaagtgtacagataactgcagagcgggaaatggtgctagcacaagaggaatcagccaggaccaatgctgaaaaacaggtggaggagttactgatggccatggagaaggtaaagcaggaactagaatccatgaaagcaaagctgtcctccacccagcagtctctggcagaaaaggaaactcacttgactaatcttcgggcagagagaaggaaacacttagaggaagttctggagatgaagcaagaagctcttctggctgccattagtgaaaaagacgccaatatagctctcttggagctttcgtcctctaagaagaagacccaagaggaagtggctgccctgaagcgggagaaggatcgtctggtacagcagcttaagcagcagacgcaaaatcgaatgaagctaatggccgacaactacgaggatgaccacttcaaatcctcccattccaatcaaacaaatcacaagccctccccagaccagatcatccagcccctcttagaacttgaccaaaatagaagtaaattaaagttgtacattggacacctgacaaccctctgccatgaccgagaccccctgatcctccgtggactcactccaccagcttcctataacttggacgatgaccaggcggcttgggagaatgagctgcagaagatgacccgggggcagcttcaggatgagttagagaaaggtgaacgggacaatgcagaactgcaggagtttgccaacgccattcttcagcagatagcagaccattgtcccgacatcctagagcaagtggtcaacgccctggaagagtcctcttgaccctgctttatggggaagcctgaggtagtcaacccaggagccaagaaaagagaactacgaggaacaggtgcccggaaccttcttggcaccaaacactacaaacttcatcccaacttgctcacttgaagaagtgtgattccagcaccgtttctacatctgccatcttactctgcctttctgctttggatgtggtctctacactaaccttcttgatgtccagggtagataaagggtcgaatctctctgaagaactgccacctggtcatcagcagtggagaactgtgggagctggtggctctgccctgacagagagccatggagcagaggagcctctcacctcctgtcctctgacatgagaatgaaaccaggaatggacttggagttcaacaggctgagaggatgcctccaatggaccagagagctgagtgttctaatatcacaataggtgctttctcctaaaagggcaaaaaacaatctcaaaaagattagaaaaagagaaggggggaagggaagagaaaatcgactcttctttttactgtctcttctgcttactttccacatgagatgctttgtaccggggagctgtgagcaggcctcacgatggcttgggagcactcgttctcccaaggtctgagtcttcatccagccctgcctgtctgtcgcagccttcctcactctgttcctcggccagttaacaagaagatggtgtgaggtgttctccaccagtctctcctgtttgagactgttgacgttatcatactgaggtgttagatcaaatatctctaattgaagaacatgtgaggttgaaagagcaccagccagggcaacatagcgtgaccctgtctctacaaaaaattaaaaagagaacatacaaagttgacatatgagaccctgttgtccccgcctgcagctttgccccagtaacagatgcccgttgctcttgggctggtttcccctgaacacctccaagaggctgcctgccttgccagcacccgtgtcctgagctcctgcagcccagtggctgctgaagttgtgatccctcactcaccctgctagctttgcccttgactcgtcttctctgaacctcagcctcgtgcattgcctggaaccttcttctagcataaatgaaggtttttcctcctacacacattccttcctcggttatttcattcagagaatatttatgaaatgcctactgtgtgcaagtcatccatccttgaaaaggccacttctcagtgagggagagatgtagtggattctgtgagacatacctgctggagttgaagcagtaaatagcatgtccttcccctccccgatcttaaggtgtgttttctagaaaagttccctaatggaattcatgagtttgggggtctcagtcacccgcttgcctgtaggattccatttgatgattctggatttttgctgtttgttattgcccttagaggggctctgagtatctacttgtgggtggccatttcctgacatctgcatgtacctcgtggaattcagccagcttcatgttgcaaatcagaaagctgaccccaagactgcaaatcaatgaaggtattggcattgttaaggacgtagcgtagacaacagcagtcataaataattaggcaggaacttaacccaaatctagttctttgaccacctctaccaccagaacccagcagacactcacatctcctgataagagttgctggactcgatgtttttgttttgcattttctcctctccttccccacttactcagagaatttaaagtctgtagagtcagcacagccccatcagtccaggaacttcccaccaccagcccttgactgtcccattaactgacatggtcagatttccagctccccctactccctgctgtgaaacaatccctctccctgtgagaggaaactgtggagcgtttcttatcgaaggttaaatggactctgctcataaacctcttactgagatgcttcctgatagccaggctggccagagaggggtgcaggggttagatagtaagtggtggtcgtttgtggtcagttacctcaattctgttcattgcagtgcccgtaaaccatgtagaaagctcccagcactgaaaggcaggagtgttagcatctcgctttatccaccataacgtaaagaactgcggtgtgataacagccttcacggggccacggtggaaccaagacagcaggcgaggccatgcctaaacaagtggtctggcacgggcactggccagctgctctctccaagcaggtggcccagatcccacccacgtggactttctcatcaggtgcagcgcctgccactctcagccactgggtgtgtgactctcctcttcatctcagcattctccatcacttcccctccagaaaaacggatggaaggaagccctctgtgacactgcttctgagaagaagcatttccgggaccgatatcatctgtctggtctctgtgaacagcaaggaatcttcttgaccgttcttgggcactggaggctggctaggagttcagtaataaacgtggccttcgtgctgtagggcagagtggatgcagtttgtagctttcagagtgtctcattgagtctagatcattgaaccaacacttaaccaaatgtcccactcccatcacactaggacttgtcattccatgcccctctcctagtggtcatggtttcatatgggcatacaactgctactgaagttatatagccttgaaaactcagtgcaggttgcccttaattttccccaaacccctccatcggcaagtctagttgccctttagcacctaaagatctgcaccccaaaccaatgtcaccataaagagggcacgaagaagagtgggtgtgatcccaacggggttttgtaactgaagaagcccagtgtgagcttctcatcttttcatatacctctaacccccggtactcattgaatcattgatgaggtatctcaattgagatttgcaaggactttgataccatttgaaatggaaaaattttgaacgggctttaacatgtttaagaaatatggatggggccggccacagtggctcacgcctgtaatcccagaactctggaaggctgaggcaggcggatcacctgagatcaggagttcgaggccagcctggccaagatggcaaaaaccccgactctactaaaaatacaaaattagccaggcgtggtggcgtacgcctgtaatcccagctactcaggaggcaggagaatcgcttgagcctgggaggcagaggctgcggtgagccgagatcgtgtcactgcactccagcctgggtgacagagactccattt

SEQ ID NO: 1037 - protein, 1116 aa, Homo sapiens
MYGSARSVGKVEPSSQSPGRSPRLPRSPRLGHRRTNSTGGSSGSSVGGGSGKTLSMENIQSLNAAYATSGPMYLSDHENVGSETPKSTMTLGRSGGRLPYGVRMTAMGSSPNIASSGVASDTIAFGEHHLPPVSMASTVPHSLRQARDNTIMDLQTQLKEVLRENDLLRKDVEVKESKLSSSMNSIKTFWSPELKKERALRKDEASKITIWKEQYRVVQEENQHMQMTIQALQDELRIQRDLNQLFQQDSSSRTGEPCVAELTEENFQRLHAEHERQAKELFLLRKTLEEMELRIETQKQTLNARDESIKKLLEMLQSKGLSAKATEEDHERTRRLAEAEMHVHHLESLLEQKEKENSMLREEMHRRFENAPDSAKTKALQTVIEMKDSKISSMERGLRDLEEEIQMLKSNGALSTEEREEEMKQMEVYRSHSKFMKNKVEQLKEELSSKEAQWEELKKKAAGLQAEIGQVKQELSRKDTELLALQTKLETLTNQFSDSKQHIEVLKESLTAKEQRAAILQTEVDALRLRLEEKETMLNKKTKQIQDMAEEKGTQAGEIHDLKDMLDVKERKVNVLQKKIENLQEQLRDKEKQMSSLKERVKSLQADTTNTDTALTTLEEALAEKERTIERLKEQRDRDEREKQEEIDNYKKDLKDLKEKVSLLQGDLSEKEASLLDLKEHASSLASSGLKKDSRLKTLEIALEQKKEECLKMESQLKKAHEAALEARASPEMSDRIQHLEREITRYKDESSKAQAEVDRLLEILKEVENEKNDKDKKIAELERQVKDQNKKVANLKHKEQVEKKKSAQMLEEARRREDNLNDSSQQLQDSLRKKDDRIEELEEALRESVQITAEREMVLAQEESARTNAEKQVEELLMAMEKVKQELESMKAKLSSTQQSLAEKETHLTNLRAERRKHLEEVLEMKQEALLAAISEKDANIALLELSSSKKKTQEEVAALKREKDRLVQQLKQQTQNRMKLMADNYEDDHFKSSHSNQTNHKPSPDQIIQPLLELDQNRSKLKLYIGHLTTLCHDRDPLILRGLTPPASYNLDDDQAAWENELQKMTRGQLQDELEKGERDNAELQEFANAILQQIADHCPDILEQVVNALEESS

SEQ ID NO: 1038 - DNA, 1320 bp, Homo sapiens
cggaaggggaagggggtggaggttgctgctatgagagagaaaaaaaaaacagccacaatagagattctgccttcaaaggttggcttgccacctgaagcagccactgcccagggggtgcaaagaagagacagcagcgcccagcttggaggtgctaactccagaggccagcatcagcaactgggcacagaaaggagccgcctgggcagggaccatggcacggccacatccctggtggctgtgcgttctggggaccctggtggggctctcagctactccagcccccaagagctgcccagagaggcactactgggctcagggaaagctgtgctgccagatgtgtgagccaggaacattcctcgtgaaggactgtgaccagcatagaaaggctgctcagtgtgatccttgcataccgggggtctccttctctcctgaccaccacacccggccccactgtgagagctgtcggcactgtaactctggtcttctcgttcgcaactgcaccatcactgccaatgctgagtgtgcctgtcgcaatggctggcagtgcagggacaaggagtgcaccgagtgtgatcctcttccaaacccttcgctgaccgctcggtcgtctcaggccctgagcccacaccctcagcccacccacttaccttatgtcagtgagatgctggaggccaggacagctgggcacatgcagactctggctgacttcaggcagctgcctgcccggactctctctacccactggccaccccaaagatccctgtgcagctccgattttattcgcatccttgtgatcttctctggaatgttccttgttttcaccctggccggggccctgttcctccatcaacgaaggaaatatagatcaaacaaaggagaaagtcctgtggagcctgcagagccttgtcgttacagctgccccagggaggaggagggcagcaccatccccatccaggaggattaccgaaaaccggagcctgcctgctccccctgagccagcacctgcgggagctgcactacagccctggcctccacccccaccccgccgaccatccaagggagagtgagacctggcagccacaactgcagtcccatcctcttgtcagggccctttcctgtgtacacgtgacagagtgccttttcgagactggcagggacgaggacaaatatggatgaggtggagagtgggaagcaggagcccagccagctgcgcctgcgctgcaggagggcgggggctctggttgtaaaacacacttcctgctgcgaaagacccacatgctacaagacgggcaaaataaagtgacagatgaccaccctgca

SEQ ID NO: 1039 - protein, 260 aa, Homo sapiens
MARPHPWWLCVLGTLVGLSATPAPKSCPERHYWAQGKLCCQMCEPGTFLVKDCDQHRKAAQCDPCIPGVSFSPDHHTRPHCESCRHCNSGLLVRNCTITANAECACRNGWQCRDKECTECDPLPNPSLTARSSQALSPHPQPTHLPYVSEMLEARTAGHMQTLADFRQLPARTLSTHWPPQRSLCSSDFIRILVIFSGMFLVFTLAGALFLHQRRKYRSNKGESPVEPAEPCRYSCPREEEGSTIPIQEDYRKPEPACSP

SEQ ID NO: 1040 - DNA, 1834 bp, Homo sapiens
aaacagcaagcagggctctggcagctgctgcagacggcttcacacagggacgcgggctgccatcttgctctaagtgaaagtgaaagaaaagtcggcagcagagggaacagggaagaaacctaaaggctgcaggctgccaggtgtgcttggagagcccccttcttccgccgggcctcgcaagcagcgtaggactgtggagaagggcggtgggcaaggagggaactcgagagcagcctccatgggcacacaggagggctggtgcctgctgctctgcctggctctatctggagcagcagaaaccaagccccacccagcagaggggcagtggcgggcagtggacgtggtcctagactgcttcctggcgaaggacggtgcgcaccgtggagctctcgccagcagtgaggacagggcaagggcctcccttgtgctgaagcaggtgccagtgctggacgatggctccctggaggacttcaccgatttccaagggggcacactggcccaagatgacccacctattatctttgaggcctcagtggacctggtccagattccccaggccgaggccttgctccatgctgactgcagtgggaaggaggtgacctgtgagatctcccgctactttctccagatgacagagaccactgttaagacagcagcttggttcatggccaacatgcaggtctctggagggggacctagcatctccttggtgatgaagactcccagggtcaccaagaatgaggcgctctggcacccgacgctgaacttgccactgagcccccaggggactgtgcgaactgcagtggagttccaggtgatgacacagacccaatccctgagcttcctgctggggtcctcagcctccttggactgtggcttctccatggcaccgggcttggacctcatcagtgtggagtggcgactgcagcacaagggcaggggtcagttggtgtacagctggaccgcagggcaggggcaggctgtgcggaagggcgctaccctggagcctgcacaactgggcatggccagggatgcctccctcaccctgcccggcctcactatacaggacgaggggacctacatttgccagatcaccacctctctgtaccgagctcagcagatcatccagctcaacatccaagcttcccctaaagtacgactgagcttggcaaacgaagctctgctgcccaccctcatctgcgacattgctggctattaccctctggatgtggtggtgacgtggacccgagaggagctgggtggatccccagcccaagtctctggtgcctccttctccagcctcaggcaaagcgtggcaggcacctacagcatctcctcctctctcaccgcagaacctggctctgcaggtgccacttacacctgccaggtcacacacatctctctggaggagccccttggggccagcacccaggttgtcccaccagagcggagaacagccttgggagtcatctttgccagcagtctcttccttcttgcactgatgttcctggggcttcagagacggcaagcacctacaggacttgggctgcttcaggctgaacgctgggagaccacttcctgtgctgacacacagagctcccatctccatgaagaccgcacagcgcgtgtaagccagcccagctgacctaaagcgacatgagactactagaaagaaacgacacccttccccaagcccccacagctactccaacccaaacaacaaccaagccagtttaatggtaggaatttgtattttttgcctttgttcagaatacatgacattggtaaatatgccacatgcctttggtggaagtacaaaaaaaaaaaaaaaaaa

SEQ ID NO: 1041 - protein, 468 aa, Homo sapiens
MGTQEGWCLLLCLALSGAAETKPHPAEGQWRAVDVVLDCFLAKDGAHRGALASSEDRARASLVLKQVPVLDDGSLEDFTDFQGGTLAQDDPPIIFEASVDLVQIPQAEALLHADCSGKEVTCEISRYFLQMTETTVKTAAWFMANMQVSGGGPSISLVMKTPRVTKNEALWHPTLNLPLSPQGTVRTAVEFQVMTQTQSLSFLLGSSASLDCGFSMAPGLDLISVEWRLQHKGRGQLVYSWTAGQGQAVRKGATLEPAQLGMARDASLTLPGLTIQDEGTYICQITTSLYRAQQIIQLNIQASPKVRLSLANEALLPTLICDIAGYYPLDVVVTWTREELGGSPAQVSGASFSSLRQSVAGTYSISSSLTAEPGSAGATYTCQVTHISLEEPLGASTQVVPPERRTALGVIFASSLFLLALMFLGLQRRQAPTGLGLLQAERWETTSCADTQSSHLHEDRTARVSQPS

SEQ ID NO: 1042 - DNA, 928 bp, Homo sapiens
taaaactttaggaaattagtaccagacttttatattggtcaacagcaaaatgaacattactactcagcctccaacacatgcagtttgcctataccagggatcctgtcaaaatatacaccacttatagcttcttaagtgcagttatcatagagcacagtccctgacatcacacagctgcagagatgaataaacaaagaggaacctactcagaagtgagtctggcccaggacccaaagaggcagcaaaggaaacttaagggcaataaaatctccatttcaggaaccaaacaggaaatattccaagtagaattaaaccttcaaaatgcttcttcggatcatcaagggaatgacaagacatatcactgcaaaggtttactgccacctccagagaagctcactgctgaggtcctaggaatcatttgcattgtcctgatggccactgtgttaaaaacaatagttcttattccttgtattggagtactggagcagaacaatttttccctgaatagaagaatgcagaaagcacgtcattgtggccattgtcctgaggagtggattacatattccaacagttgttattacattggtaaggaaagaagaacttgggaagaaagagtttgctggcctgtgcttcgaagaactctgatctgctttctatagataatgaggaagaaatggtaagacgtaaatgtttcaacactttactaaaagcttatttctgtcaatatcatatttgtagaaatcatccatatgtttatacatatatttacttcatatatttttaagtctgtgtagtattcaactgacttcataatatttttatattcatatactgttaatgcacatttggttatttccagttttgcttttcatggaaacccatgcttctataaatgtttttatcacaaaataaatataaagaaaactaa

SEQ ID NO: 1043 - protein, 158 aa, Homo sapiens
MNKQRGTYSEVSLAQDPKRQQRKLKGNKISISGTKQEIFQVELNLQNASSDHQGNDKTYHCKGLLPPPEKLTAEVLGIICIVLMATVLKTIVLIPCIGVLEQNNFSLNRRMQKARHCGHCPEEWITYSNSCYYIGKERRTWEERVCWPVLRRTLICFL

SEQ ID NO: 1044 - DNA, 1042 bp, Homo sapiens
gcagttatcatagagcacagtccctcacatcacacagctgcagagatgagtaaacaaagaggaaccttctcagaagtgagtctggcccaggacccaaagtggcagcaaaggaaacctaaaggcaataaaagctccatttcaggaaccgaacaggaaatattccaagtagaattaaaccttcaaaatgcttctctgaatcatcaagggattgataaaatatatgactgccaaggtttactgccacctccagaaaagctcactgccgaggtcctaggaatcatttgcattgtcctgatggccactgtgttaaaaacaatagttcttattcctttcctggagcagaacaattcttccccgaatgcaagaacccagaaagcacgtcattgtggccattgtcctgaggagtggattacatattccaacagttgttattacattggtaaggaaagaagaacttgggaagagagtttgcaggcctgtgcttcaaagaactcttctagtctgctttgtatagataatgaagaagaaatgaaatttctggccagcattttaccttcctcatggattggtgtgtttcgtaacagcagtcatcatccatgggtgacaataaatggtttggctttcaaacatgagataaaagactcagatcatgctgaacgtaactgtgcaatgctacatgtacgtggacttatatcagaccagtgtggatcttcaagaatcattagacggggtttcatcatgttgaccaggctggtcttgaactcctgagctcaagaaatcaacacatcttggcctcccaagttgctgggattactgacacaagccaccgcccctgagtgctcatgtaccatttagcttgtgttttaaaaatctactttttctgccctccctatttttaactagatgatgttttaaaaattacttttccctctctatatagtttgatttaagcattagtcatttacaacaaatattaatattaaaatgcagaccgttatgattggaaaataaatcaatgaacaataaaaaaaaaaaaaaaaaa

SEQ ID NO: 1045 - protein, 240 aa, Homo sapiens
MSKQRGTFSEVSLAQDPKWQQRKPKGNKSSISGTEQEIFQVELNLQNASLNHQGIDKIYDCQGLLPPPEKLTAEVLGIICIVLMATVLKTIVLIPFLEQNNSSPNARTQKARHCGHCPEEWITYSNSCYYIGKERRTWEESLQACASKNSSSLLCIDNEEEMKFLASILPSSWIGVFRNSSHHPWVTINGLAFKHEIKDSDHAERNCAMLHVRGLISDQCGSSRIIRRGFIMLTRLVLNS

SEQ ID NO: 1046 - DNA, 843 bp, Homo sapiens
gcagttatcatagagcacagtccctcacatcacacagctgcagagatgagtaaacaaagaggaaccttctcagaagtgagtctggcccaggacccaaagtggcagcaaaggaaacctaaaggcaataaaagctccatttcaggaaccgaacaggaaatattccaagtagaattaaaccttcaaaatgcttctctgaatcatcaagggattgataaaatatatgactgccaaggtttactgccacctccagaaaagctcactgccgaggtcctaggaatcatttgcattgtcctgatggccactgtgttaaaaacaatagttcttattcctttcctggagcagaacaattcttccccgaatgcaagaacccagaaagcacgtcattgtggccattgtcctgaggagtggattacatattccaacagttgttattacattggtaaggaaagaagaacttgggaagagagtttgcaggcctgtgcttcaaagaactcttctagtctgctttgtatagataatgaagaagaaatgaaatttctggccagcattttaccttcctcatggattggtgtgtttcgtaacagcagtcatcatccatgggtgacaataaatggtttggctttcaaacatgagataaaagactcagatcatgctgaacgtaactgtgcaatgctacatgtacgtggacttatatcagaccagtgtggatcttcaagaatcattgtgagcataagctttagaattaaagcgcttgagcttgcagtgcatcagataaaattttatatttgttcaaacagaaatgatattatgattgcataagccttaaaatgaattgtgttattt

SEQ ID NO: 1047 - protein, 257 aa, Homo sapiens
MSKQRGTFSEVSLAQDPKWQQRKPKGNKSSISGTEQEIFQVELNLQNASLNHQGIDKIYDCQGLLPPPEKLTAEVLGIICIVLMATVLKTIVLIPFLEQNNSSPNARTQKARHCGHCPEEWITYSNSCYYIGKERRTWEESLQACASKNSSSLLCIDNEEEMKFLASILPSSWIGVFRNSSHHPWVTINGLAFKHEIKDSDHAERNCAMLHVRGLISDQCGSSRIIVSISFRIKALELAVHQIKFYICSNRNDIMIA

SEQ ID NO: 1048 - DNA, 1223 bp, Homo sapiens
tgcagagatgaataaacaaagaggaaccttctcagaagtgagtctggcccaggacccaaagcggcagcaaaggaaacctaaaggcaataaaagctccatttcaggaaccgaacaggaaatattccaagtagaattaaatcttcaaaatccttccctgaatcatcaagggattgataaaatatatgactgccaaggtttactgccacctccagagaagctcactgccgaggtcctaggaatcatttgcattgtcctgatggccactgtgttaaaaacaatagttcttattcctttcctggagcagaacaatttttccccgaatacaagaacgcagaaagcacgtcattgtggccattgtcctgaggagtggattacatattccaacagttgttattacattggtaaggaaagaagaacttgggaagagagtttgctggcctgtacttcgaagaactccagtctgctttctatagataatgaagaagaaatgaaatttctggccagcattttaccttcctcatggattggtgtgtttcgtaacagcagtcatcatccatgggtgacaataaatggtttggctttcaaacataagataaaagactcagataatgctgaacttaactgtgcagtgctacaagtaaatcgacttaaatcagcccagtgtggatcttcaatgatatatcattgtaagcataagctttagaagtaaagcatttgcgtttgcagtgcatcagatacattttatatttcttaaaatagaaatattatgattgcataaatctgaaaatgaattatgttatttgctctgatacaaaaattctaaatcaattattgaaataggatgcacacaattactaaagtacagacatcctagcatttgtgtcgggctcattttgctcaacatggtatttgtggttttcagcctttctaaaagttgcatgttatgtgagtcagcttataggaagtaccaagaacagtcaaacccatggagacagaaagtagaatagtggttgccaatgtctcagggaggttgaaataggagatgaccactaattgatagaacgtttctttgtgtcgtgatgaaaactttctaaatttcagtagtggtgatggttgtaactctgcgaatatactaaacatcattgatttttaatcattttaagtgcatgaaatgtatgctttgtacatgacacttcaataaagctatccagaaaaaaaaaaaa

SEQ ID NO: 1049 - protein, 231 aa, Homo sapiens
MNKQRGTFSEVSLAQDPKRQQRKPKGNKSSISGTEQEIFQVELNLQNPSLNHQGIDKIYDCQGLLPPPEKLTAEVLGIICIVLMATVLKTIVLIPFLEQNNFSPNTRTQKARHCGHCPEEWITYSNSCYYIGKERRTWEESLLACTSKNSSLLSIDNEEEMKFLASILPSSWIGVFRNSSHHPWVTINGLAFKHKIKDSDNAELNCAVLQVNRLKSAQCGSSMIYHCKHKL

SEQ ID NO: 1050 - DNA, 1393 bp, Homo sapiens
gcaggcattgtttgttcttgtcttggatttatgcctttaaatttcaccttttattacacagctatagcaggcctttttatgagactaacctggcctctccactaaaggatgtgtgactttctggggacagaagagtacagtccctgacatcacacactgcagagatggataaccaaggagtaatctactcagacctgaatctgcccccaaacccaaagaggcagcaacgaaaacctaaaggcaataaaagctccattttagcaactgaacaggaaataacctatgcggaattaaaccttcaaaaagcttctcaggattttcaagggaatgacaaaacctatcactgcaaagatttaccatcagctccagagaagctcattgttgggatcctgggaattatctgtcttatcttaatggcctctgtggtaacgatagttgttattccctctacattaatacagaggcacaacaattcttccctgaatacaagaactcagaaagcacgtcattgtggccattgtcctgaggagtggattacatattccaacagttgttactacattggtaaggaaagaagaacttgggaagagagtttgctggcctgtacttcgaagaactccagtctgctttctatagataatgaagaagaaatgaaatttctgtccatcatttcaccatcctcatggattggtgtgtttcgtaacagcagtcatcatccatgggtgacaatgaatggtttggctttcaaacatgagataaaagactcagataatgctgaacttaactgtgcagtgctacaagtaaatcgacttaaatcagcccagtgtggatcttcaataatatatcattgtaagcataagctttagaggtaaagcgtttgcatttgcagtgcatcagataaattgtatatttcttaaaatagaaatatattatgattgcataaatcttaaaatgaattatgttatttgctctaataagaaaattctaaatcaattattgaaacaggatacacacaattactaaagtacagacatcctagcatttgtgtcgggctcattttgctcaacatggtatttgtggttttcagcctttctaaaagttgcatgttatgtgagtcagcttataggaagtaccaagaacagtcaaacccatggagacagaaagtagaatagtggttgccaatgtctgagggaggttgaaataggagatgacctctaactgatagaacgttactttgtgtcgtgatgaaaactttctaaatttcagtagtggtgatggttgtaactctgcgaatatactaaacatcattgatttttaatcattttaagtgcatgaaatgtatgctttgtacacgacacttcaataaagctatccagaaaaaaaaaaaaaaaaa

SEQ ID NO: 1051 - protein, 233 aa, Homo sapiens
MDNQGVIYSDLNLPPNPKRQQRKPKGNKSSILATEQEITYAELNLQKASQDFQGNDKTYHCKDLPSAPEKLIVGILGIICLILMASVVTIVVIPSTLIQRHNNSSLNTRTQKARHCGHCPEEWITYSNSCYYIGKERRTWEESLLACTSKNSSLLSIDNEEEMKFLSIISPSSWIGVFRNSSHHPWVTMNGLAFKHEIKDSDNAELNCAVLQVNRLKSAQCGSSIIYHCKHKL

SEQ ID NO: 1052 - DNA, 1339 bp, Homo sapiens
gcaggcattgtttgttcttgtcttggatttatgcctttaaatttcaccttttattacacagctatagcaggcctttttatgagactaacctggcctctccactaaaggatgtgtgactttctggggacagaagagtacagtccctgacatcacacactgcagagatggataaccaaggagtaatctactcagacctgaatctgcccccaaacccaaagaggcagcaacgaaaacctaaaggcaataaaagctccattttagcaactgaacaggaaataacctatgcggaattaaaccttcaaaaagcttctcaggattttcaagggaatgacaaaacctatcactgcaaagatttaccatcagctccagagaagctcattgttgggatcctgggaattatctgtcttatcttaatggcctctgtggtaacgatagttgttattccctcacgtcattgtggccattgtcctgaggagtggattacatattccaacagttgttactacattggtaaggaaagaagaacttgggaagagagtttgctggcctgtacttcgaagaactccagtctgctttctatagataatgaagaagaaatgaaatttctgtccatcatttcaccatcctcatggattggtgtgtttcgtaacagcagtcatcatccatgggtgacaatgaatggtttggctttcaaacatgagataaaagactcagataatgctgaacttaactgtgcagtgctacaagtaaatcgacttaaatcagcccagtgtggatcttcaataatatatcattgtaagcataagctttagaggtaaagcgtttgcatttgcagtgcatcagataaattgtatatttcttaaaatagaaatatattatgattgcataaatcttaaaatgaattatgttatttgctctaataagaaaattctaaatcaattattgaaacaggatacacacaattactaaagtacagacatcctagcatttgtgtcgggctcattttgctcaacatggtatttgtggttttcagcctttctaaaagttgcatgttatgtgagtcagcttataggaagtaccaagaacagtcaaacccatggagacagaaagtagaatagtggttgccaatgtctgagggaggttgaaataggagatgacctctaactgatagaacgttactttgtgtcgtgatgaaaactttctaaatttcagtagtggtgatggttgtaactctgcgaatatactaaacatcattgatttttaatcattttaagtgcatgaaatgtatgctttgtacacgacacttcaataaagctatccagaaaaaaaaaaaaaaaaa

SEQ ID NO: 1053 - protein, 215 aa, Homo sapiens
MDNQGVIYSDLNLPPNPKRQQRKPKGNKSSILATEQEITYAELNLQKASQDFQGNDKTYHCKDLPSAPEKLIVGILGIICLILMASVVTIVVIPSRHCGHCPEEWITYSNSCYYIGKERRTWEESLLACTSKNSSLLSIDNEEEMKFLSIISPSSWIGVFRNSSHHPWVTMNGLAFKHEIKDSDNAELNCAVLQVNRLKSAQCGSSIIYHCKHKL

SEQ ID NO: 1054 - DNA, 1332 bp, Homo sapiens
ggcaagcacaggaggatgggtcccttttcaggtctggagatggaatcactgttgctatagcaggcctttttatgagactaacctggcctctccactaaaggatgtgtgactttctggggacagaagagtacagtccctgacatcacacactgcagagatggataaccaaggagtaatctactcagacctgaatctgcccccaaacccaaagaggcagcaacgaaaacctaaaggcaataaaagctccattttagcaactgaacaggaaataacctatgcggaattaaaccttcaaaaagcttctcaggattttcaagggaatgacaaaacctatcactgcaaagatttaccatcagctccagagaagctcattgttgggatcctgggaattatctgtcttatcttaatggcctctgtggtaacgatagttgttattccctcacgtcattgtggccattgtcctgaggagtggattacatattccaacagttgttactacattggtaaggaaagaagaacttgggaagagagtttgctggcctgtacttcgaagaactccagtctgctttctatagataatgaagaagaaatgaaatttctgtccatcatttcaccatcctcatggattggtgtgtttcgtaacagcagtcatcatccatgggtgacaatgaatggtttggctttcaaacatgagataaaagactcagataatgctgaacttaactgtgcagtgctacaagtaaatcgacttaaatcagcccagtgtggatcttcaataatatatcattgtaagcataagctttagaggtaaagcgtttgcatttgcagtgcatcagataaattgtatatttcttaaaatagaaatatattatgattgcataaatcttaaaatgaattatgttatttgctctaataagaaaattctaaatcaattattgaaacaggatacacacaattactaaagtacagacatcctagcatttgtgtcgggctcattttgctcaacatggtatttgtggttttcagcctttctaaaagttgcatgttatgtgagtcagcttataggaagtaccaagaacagtcaaacccatggagacagaaagtagaatagtggttgccaatgtctgagggaggttgaaataggagatgacctctaactgatagaacgttactttgtgtcgtgatgaaaactttctaaatttcagtagtggtgatggttgtaactctgcgaatatactaaacatcattgatttttaatcattttaagtgcatgaaatgtatgctttgtacacgacacttcaataaagctatccagaaaaaaaaaaaaaaaaa

SEQ ID NO: 1055 - protein, 215 aa, Homo sapiens; identical to SEQ ID NO: 1053

SEQ ID NO: 1056 - DNA, 1386 bp, Homo sapiens
ggcaagcacaggaggatgggtcccttttcaggtctggagatggaatcactgttgctatagcaggcctttttatgagactaacctggcctctccactaaaggatgtgtgactttctggggacagaagagtacagtccctgacatcacacactgcagagatggataaccaaggagtaatctactcagacctgaatctgcccccaaacccaaagaggcagcaacgaaaacctaaaggcaataaaagctccattttagcaactgaacaggaaataacctatgcggaattaaaccttcaaaaagcttctcaggattttcaagggaatgacaaaacctatcactgcaaagatttaccatcagctccagagaagctcattgttgggatcctgggaattatctgtcttatcttaatggcctctgtggtaacgatagttgttattccctctacattaatacagaggcacaacaattcttccctgaatacaagaactcagaaagcacgtcattgtggccattgtcctgaggagtggattacatattccaacagttgttactacattggtaaggaaagaagaacttgggaagagagtttgctggcctgtacttcgaagaactccagtctgctttctatagataatgaagaagaaatgaaatttctgtccatcatttcaccatcctcatggattggtgtgtttcgtaacagcagtcatcatccatgggtgacaatgaatggtttggctttcaaacatgagataaaagactcagataatgctgaacttaactgtgcagtgctacaagtaaatcgacttaaatcagcccagtgtggatcttcaataatatatcattgtaagcataagctttagaggtaaagcgtttgcatttgcagtgcatcagataaattgtatatttcttaaaatagaaatatattatgattgcataaatcttaaaatgaattatgttatttgctctaataagaaaattctaaatcaattattgaaacaggatacacacaattactaaagtacagacatcctagcatttgtgtcgggctcattttgctcaacatggtatttgtggttttcagcctttctaaaagttgcatgttatgtgagtcagcttataggaagtaccaagaacagtcaaacccatggagacagaaagtagaatagtggttgccaatgtctgagggaggttgaaataggagatgacctctaactgatagaacgttactttgtgtcgtgatgaaaactttctaaatttcagtagtggtgatggttgtaactctgcgaatatactaaacatcattgatttttaatcattttaagtgcatgaaatgtatgctttgtacacgacacttcaataaagctatccagaaaaaaaaaaaaaaaaa

SEQ ID NO: 1057 - protein, 233 aa, Homo sapiens; identical to SEQ ID NO: 1051

SEQ ID NO: 1058 - DNA, 4124 bp, Homo sapiens
agtgaagagggcaccctataccatggcagtgcccggcgacgctgcacgagtcagggacaagcccgtccacagtggggtgagtcaagcccccacggcgggccgggactgccaccatcgtgcggaccccgcatcgccgcgggactcgggctgccgtggctgctggggagacctggtgctgcagccgctccggagctctcggaaactttcctccgcgctgtgcgcgggctccctgtcctttctgctggcgctgctggtgaggctggtccgcggggaggtcggctgtgacctggagcagtgtaaggaggcggcggcggcggaggaggaggaagcagccccgggagcagaagggggcgtcttcccggggcctcggggaggtgctcccgggggcggtgcgcggctcagcccctggctgcagccctcggcgctgctcttcagtctcctgtgtgccttcttctggatgggcttgtacctcctgcgcgccggggtgcgcctgcctctggctgtcgcgctgctggccgcctgctgcgggggggaagcgctcgtccagattgggctgggcgtcggggaggatcacttactctcactccccgccgcgggggtggtgctcagctgcttggccgccgcgacatggctggtgctgaggctgaggctgggcgtcctcatgatcgccttgactagcgcggtcaggaccgtgtccctcatttccttagagaggttcaaggtcgcctggagaccttacctggcgtacctggccggcgtgctggggatcctcttggccaggtacgtggaacaaatcttgccgcagtccgcggaggcggctccaagggagcatttggggtcccagctgattgctgggaccaaggaagatatcccggtgtttaagaggaggaggcggtccagctccgtcgtgtccgccgagatgtccggctgcagcagcaagtcccatcggaggacctccctgccctgtataccgagggaacagctcatggggcattcagaatgggaccacaaacgagggccaagaggatcacagtcttcaggaaccagtattactgtggacatcgccgtcatgggcgaggcccacggcctcattaccgacctcctggcagacccttctcttccaccaaacgtgtgcacatccttgagagccgtgagcaacttgctcagcacacagctcaccttccaggccattcacaagcccagagtgaatcccgtcacttcgctcagtgaaaactatacctgttctgactctgaagagagctctgaaaaagacaagcttgctattccaaagcgcctgagaaggagtttgcctcctggcttgttgagacgagtttcttccacttggaccaccaccacctcggccacaggtctacccaccttggagcctgcaccagtacggagagaccgcagcaccagcatcaaactgcaggaagcaccttcatccagtcctgattcttggaataatccagtgatgatgaccctcaccaaaagcagatcctttacttcatcctatgctatttctgcagctaaccatgtaaaggctaaaaagcaaagtcgaccaggtgccctcgctaaaatttcacctctttcatcgccctgctcctcacctctccaagggactcctgccagcagcctggtcagcaaaatttctgcagtgcagtttccagaatctgctgacacaactgccaaacaaagcctaggttctcacagggccttaacttacactcagagtgccccagacctatcccctcaaatcctgactccacctgttatatgtagcagctgtggcagaccatattcccaagggaatcctgctgatgagcccctggagagaagtggggtagccactcggacaccaagtagaacagatgacactgctcaagttacctctgattatgaaaccaataacaacagtgacagcagtgacattgtacagaatgaagatgaaacagagtgcctgagagagcctctgaggaaagcatcggcttgcagcacctatgctcctgagaccatgatgtttctggacaaaccaattcttgctcccgaacctcttgtcatggataacctggactcaattatggagcagctaaatacttggaattttccaatttttgatttagtggaaaatataggaagaaaatgtggccgtattcttagtcaggtatcttacagactttttgaagacatgggcctctttgaagcttttaaaattccaattagggaatttatgaattattttcatgctttggagattggatatagggatattccttatcataacagaatccatgccactgatgttttacatgctgtttggtatcttactacacagcctattccaggcctctcaactgtgattaatgatcatggttcaaccagtgattcagattctgacagtggatttacacatggacatatgggatatgtattctcaaaaacgtataatgtgacagatgataaatacggatgtctgtctgggaatatccctgccttggagttgatggcgctgtatgtggctgcagccatgcacgattatgatcatccaggaaggactaatgctttcctggttgcaactagtgctcctcaggcggtgctatataacgatcgttcagttttggagaatcatcacgcagctgctgcatggaatcttttcatgtcccggccagagtataacttcttaattaaccttgaccatgtggaatttaagcatttccgtttccttgtcattgaagcaattttggccactgacctgaagaaacactttgacttcgtagccaaatttaatggcaaggtaaatgatgatgttggaatagattggaccaatgaaaatgatcgtctactggtttgtcaaatgtgtataaagttggctgatatcaatggtccagctaaatgtaaagaactccatcttcagtggacagatggtattgtcaatgaattttatgaacagggtgatgaagaggccagccttggattacccataagccccttcatggatcgttctgctcctcagctggccaaccttcaggaatccttcatctctcacattgtggggcctctgtgcaactcctatgattcagcaggactaatgcctggaaaatgggtggaagacagcgatgagtcaggagatactgatgacccagaagaagaggaggaagaagcaccagcaccaaatgaagaggaaacctgtgaaaataatgaatctccaaaaaagaagactttcaaaaggagaaaaatctactgccaaataactcagcacctcttacagaaccacaagatgtggaagaaagtcattgaagaggagcaacggttggcaggcatagaaaatcaatccctggaccagacccctcagtcgcactcttcagaacagatccaggctatcaaggaagaagaagaagagaaagggaaaccaagaggcgaggagataccaacccaaaagccagaccagtgacaatggatagaatgggctgtgtttccaaacagattgacttgtcaaagactctcttcaagccagcacaacatttagacacaacactgtagaaatttgagatgggcaaatggctattgcattttgggattcttcgcattttgtgtgtatatttttacagtgaggtacattgttaaaaactttttgctcaaagaagctttcacattgcaacaccagcttctaaggattttttaaggagggaatatatatgtgtgtgtgtatataagctcccacatagatacatgtaaaacatattcacacccatgcacgcacacacatacacactgaaggccacgattgctggctccacaatttagtaacatttatattaagatatatatatagtggtcactgtgatataataaatcataaaggaaaccaaatcacaaaggagatggtgtggcttagcaaggaaacagtgcaggaaatgtaggttaccaactaagcagcttttgctcttagtactgagggatgaaagttccagagcattatttgaattctgatacatcctgccaacactgtgtgtgtgtgtgtgtgtgtgtgtgtgtgtgtgtgtgtgtgtgaaagagagacagaagggaatggtttgagagggtgcttgtgtgcatgtgtgtgcatatgtaaagagatttttgtggtt

SEQ ID NO: 1059 - protein, 1141 aa, Homo sapiens
MAVPGDAARVRDKPVHSGVSQAPTAGRDCHHRADPASPRDSGCRGCWGDLVLQPLRSSRKLSSALCAGSLSFLLALLVRLVRGEVGCDLEQCKEAAAAEEEEAAPGAEGGVFPGPRGGAPGGGARLSPWLQPSALLFSLLCAFFWMGLYLLRAGVRLPLAVALLAACCGGEALVQIGLGVGEDHLLSLPAAGVVLSCLAAATWLVLRLRLGVLMIALTSAVRTVSLISLERFKVAWRPYLAYLAGVLGILLARYVEQILPQSAEAAPREHLGSQLIAGTKEDIPVFKRRRRSSSVVSAEMSGCSSKSHRRTSLPCIPREQLMGHSEWDHKRGPRGSQSSGTSITVDIAVMGEAHGLITDLLADPSLPPNVCTSLRAVSNLLSTQLTFQAIHKPRVNPVTSLSENYTCSDSEESSEKDKLAIPKRLRRSLPPGLLRRVSSTWTTTTSATGLPTLEPAPVRRDRSTSIKLQEAPSSSPDSWNNPVMMTLTKSRSFTSSYAISAANHVKAKKQSRPGALAKISPLSSPCSSPLQGTPASSLVSKISAVQFPESADTTAKQSLGSHRALTYTQSAPDLSPQILTPPVICSSCGRPYSQGNPADEPLERSGVATRTPSRTDDTAQVTSDYETNNNSDSSDIVQNEDETECLREPLRKASACSTYAPETMMFLDKPILAPEPLVMDNLDSIMEQLNTWNFPIFDLVENIGRKCGRILSQVSYRLFEDMGLFEAFKIPIREFMNYFHALEIGYRDIPYHNRIHATDVLHAVWYLTTQPIPGLSTVINDHGSTSDSDSDSGFTHGHMGYVFSKTYNVTDDKYGCLSGNIPALELMALYVAAAMHDYDHPGRTNAFLVATSAPQAVLYNDRSVLENHHAAAAWNLFMSRPEYNFLINLDHVEFKHFRFLVIEAILATDLKKHFDFVAKFNGKVNDDVGIDWTNENDRLLVCQMCIKLADINGPAKCKELHLQWTDGIVNEFYEQGDEEASLGLPISPFMDRSAPQLANLQESFISHIVGPLCNSYDSAGLMPGKWVEDSDESGDTDDPEEEEEEAPAPNEEETCENNESPKKKTFKRRKIYCQITQHLLQNHKMWKKVIEEEQRLAGIENQSLDQTPQSHSSEQIQAIKEEEEEKGKPRGEEIPTQKPDQ

SEQ ID NO: 1060 - DNA, 1839 bp, Homo sapiens
tatttttttttttttatctgtgaaaaacatttattctgagaatctaaaatctggacaaagtactggactttagaaaaagcctacacaaaattgtctcattcttccctaatacattaataatctaagaataaggaggtgaaaaaaaaccctttaaaaataacattgctccagtttgtctgcaggtatgtgatttaaaatatccctgttttattgaggtataggctgcaaactttggtaaaattagaaaaattaacaaaccctttcaaaaaaaaaatacaaaaacaaaaacaaccaaaccctaacgttatatctttcttggtacatatacagtaactacaaaaaaattcatttagaaaatgtgttcattaagagaaaaaaaaattaaaaaaaaaaccctcttgtaagttctcacttgctgagttaaaaaaattgaatgtaaatgatctataaggctcaaacggttcccaagcacccatccggtgtcaggaagaactggatgaccgcagtttctagaatctggttgacattttcaataattcagtgctaacaacaaagactgtcgtctttagaaagaaggaacgaatcaaaggcacttgcacgtgacttcatgtgctggcgtccgtccgtggccgccttcgtcggacagcgtcagccacacgcctggccccacgtggagcggagtccccttgaggccatttctgcgtggccccaactccctgctctcgtgggcagaggacttttcacgcggatctcagacgctaagcagtctggtgggggatggctttgaggcaaaggtttgaactaggcccgagatgtttcctcttttccttgcaacaacttcaacagacagctgagccacgccatgccacgggctgccacgggccaccacggggaaccatgtcactggactttagatgacaaaatgctgtcaggaagatgcttgctctgaccttgggggccagaacccgagagaaggactgatcctgtcgccttcttaaagagttggtggcagcaacttctgagaacttgacaccagaaacatcaacagcctccacaccacgtagtttctgattccatctttaaaaaatcttgtgttgttttgtcgagaaattgcaggcttttatgttttcaaagaactaaacacaatactgagaagtccaacttttagccagaatacataaattcctgaaaatgtatagatttgaaaaataaaaataaaaaaaaaaaaaggaagacaaacctttttagggaacggaggaaacactacctgtttaagttaagcccactaagaacaaaatcagtgccgatgaacgagccctccgacacgttttcagcaaaacgcctgtcgagaagtgcttggagatcaccggccattgccgtagccggggaagagctggttgaggacggtctgcagaggctggttcacctgcatggcatagctgcggcccaggtcgtagcggcaggcagggcagctgaacacctgtgcccgaaaggatctgtccaggcagtccttgcacacgttgtgctggcacacggtcgtgatgggccggaacaccagctcctgacagcagatacactggaacgtctcctccactttactcaggaacaactggaacgggctgccgctcgccggccggtccttgagtgacgccaggacctcattccacagcttggcgttgctcttgtcctctctgatgaggctgctctgctgggccgtgagactgtagggctccaccttggttttcttggatgtccggcgcggggacccggccctgctcgggccacctcctgccgacttccgcttccacttgcccttgcccgtcctgggggacgcgaagc

SEQ ID NO: 1061 - protein, 113 aa, Homo sapiens [sequence omitted]

SEQ ID NO: 1062 - DNA, 2343 bp, Homo sapiens
gtgaagtatgtttttatgagcaaatttacctttctctccaagttctcccaaatttggaaaccctgagaaaccctgaaaatactctgtcctgggcttatatgccttagacacaactgggattgctgagctcaagggttgcagagcatcctactatgggaagaatgaggacataactcagattgttctggatatttccctcattgctgagaatgcagaatgtttctgaccaagaattgcaagcaagaacaggaaagagtggagtcggccaagatgtttctgttggcaataacatgtgcatttgtatccaaaacactgtctggatcttatatgaattccatgctcacacaaatagagagacaattcaacatcccaacatctctagttggattcattaatggaagctttgagattggaaatcttttgttgattatatttgtgagttattttggaaccaaactgcatagacctataatgattggcattggatgtgtggttatgggcttaggctgtttcttaaaatcactacctcatttcctcatgaaccaatatgaatatgaatctacagtttcagtttcaggcaacttgtcctcaaacagtttcttgtgtatggaaaatggaacccagattttaagaccaacgcaggatccatcagagtgtacaaaggaagttaaatcattaatgtgggtgtacgtcctagtaggcaatattgtacgtggaatgggtgaaactcccatcctgcctttgggtatttcctatatagaagattttgccaaatttgaaaattctcctttatatattgggcttgtagaaacaggagctattattggtcctttgattggacttttgttggcatcattctgtgcaaatgtttatgttgacactggatttgtgaacacagatgatctgatcataactcccactgacactcgttgggtcggtgcatggtggtttggctttctgatttgtgcaggagttaacgtgctcactgccattccttttttctttttgcccaacacacttccaaaggaaggactagagactaatgctgacatcattaaaaatgaaaatgaagacaaacaaaaagaagaggtcaagaaggaaaaatatggaatcactaaagattttctacctttcatgaaaagtctttcctgcaatccaatttatatgcttttcatacttgtaagtgtgatacagttcaatgcattcgttaacatgatctccttcatgcctaaatacctagaacagcaatatggaatatcatcttcagatgcaatctttctaatgggtatttataacttacctccaatatgtattggatatataattggtggtttaattatgaagaagttcaagattactgtcaaacaagctgcccacataggatgttggttatccttacttgagtatcttctctattttttatcttttctcatgacttgtgaaaattcttcagttgttggaataaatacctcttatgaaggaattccacaagatttatatgtggaaaatgacatctttgctgattgcaatgtggattgcaactgtccatctaaaatatgggatcctgtgtgtggaaacaatggcttgtcatatctgtcagcttgtcttgctggttgtgagacatccattggaacgggaataaacatggtgttccaaaattgcagctgtattcaaacatcaggaaattcatctgcagttcttgggctgtgcgacaaaggacctgactgttccttgatgctccagtacttcctaatcttgtcagcgatgagcagtttcatttattctttggctgccatacctggatatatggttctcttgaggtgtatgaaatctgaagagaagtcccttggtgtgggattacatacattttgcacaagagtatttggtaaaaatagttattttttcccacatcctatcagaacaatattattattattattttttattacactttaagttttagggtacatgtgcacaacgtgcaggtttgttacatatgtatacatgtgccatgttggtgtgctgcacccattaactcatcatttaacattaggtgaatctcctaatgctatccctccccccttcccccaccccacaacaggccctggtgtgtgatgttccccttcctgtgtccatgtgcagaacaatattaaatactagataaacaaggtaatattatttcagaaaagcagtctagcaaatgtcccttctgtatgtaaaaagcacgttataaatatgagaatgcagcacacaaagagatagagaatctcttttacttgaaaaggccctgtctgaccttaattacactattctttgtttgaagatttgaaaataaaaaaaaaa

SEQ ID NO: 1063 - protein, 579 aa, Homo sapiens
MFLTKNCKQEQERVESAKMFLLAITCAFVSKTLSGSYMNSMLTQIERQFNIPTSLVGFINGSFEIGNLLLIIFVSYFGTKLHRPIMIGIGCVVMGLGCFLKSLPHFLMNQYEYESTVSVSGNLSSNSFLCMENGTQILRPTQDPSECTKEVKSLMWVYVLVGNIVRGMGETPILPLGISYIEDFAKFENSPLYIGLVETGAIIGPLIGLLLASFCANVYVDTGFVNTDDLIITPTDTRWVGAWWFGFLICAGVNVLTAIPFFFLPNTLPKEGLETNADIIKNENEDKQKEEVKKEKYGITKDFLPFMKSLSCNPIYMLFILVSVIQFNAFVNMISFMPKYLEQQYGISSSDAIFLMGIYNLPPICIGYIIGGLIMKKFKITVKQAAHIGCWLSLLEYLLYFLSFLMTCENSSVVGINTSYEGIPQDLYVENDIFADCNVDCNCPSKIWDPVCGNNGLSYLSACLAGCETSIGTGINMVFQNCSCIQTSGNSSAVLGLCDKGPDCSLMLQYFLILSAMSSFIYSLAAIPGYMVLLRCMKSEEKSLGVGLHTFCTRVFGKNSYFFPHPIRTILLLLFFITL

SEQ ID NO: 1064 - DNA, 2919 bp, Homo sapiens
tttgaaatagaaaaccaacaactaaatcttctctaacaccatgattttctaatctgtattaaagcgttccaggtatttttgtaatgcaatggatttcaattatgttgttcattttcagcacttacttcaaaagaatgatgctttacaattttgtagttaatttaacatatttttttgtttgcttgaaagggtagaagtaagacatatcaagatttaaaacataaatagcttggaacaccctgaagagcaacatgggagaaactgagaaaagaattgaaacccatagaataagatgtctttccaagttgaagatgtttctgttggcaataacatgtgcatttgtatccaaaacactgtctggatcttatatgaattccatgctcacacaaatagagagacaattcaacatcccaacatctctagttggattcattaatggaagctttgagattggaaatcttttgttgattatatttgtgagttattttggaaccaaactgcatagacctataatgattggcattggatgtgtggttatgggcttaggctgtttcttaaaatcactacctcatttcctcatgaaccaatatgaatatgaatctacagtttcagtttcaggcaacttgtcctcaaacagtttcttgtgtatggaaaatggaacccagattttaagaccaacgcaggatccatcagagtgtacaaaggaagttaaatcattaatgtgggtgtacgtcctagtaggcaatattgtacgtggaatgggtgaaactcccatcctgcctttgggtatttcctatatagaagattttgccaaatttgaaaattctcctttatatattgggcttgtagaaacaggagctattattggtcctttgattggacttttgttggcatcattctgtgcaaatgtttatgttgacactggatttgtgaacacagatgatctgatcataactcccactgacactcgttgggtcggtgcatggtggtttggctttctgatttgtgcaggagttaacgtgctcactgccattccttttttctttttgcccaacacacttccaaaggaaggactagagactaatgctgacatcattaaaaatgaaaatgaagacaaacaaaaagaagaggtcaagaaggaaaaatatggaatcactaaagattttctacctttcatgaaaagtctttcctgcaatccaatttatatgcttttcatacttgtaagtgtgatacagttcaatgcattcgttaacatgatctccttcatgcctaaatacctagaacagcaatatggaatatcatcttcagatgcaatctttctaatgggtatttataacttacctccaatatgtattggatatataattggtggtttaattatgaagaagttcaagattactgtcaaacaagctgcccacataggatgttggttatccttacttgagtatcttctctattttttatcttttctcatgacttgtgaaaattcttcagttgttggaataaatacctcttatgaaggaattccacaagatttatatgtggaaaatgacatctttgctgattgcaatgtggattgcaactgtccatctaaaatatgggatcctgtgtgtggaaacaatggcttgtcatatctgtcagcttgtcttgctggttgtgagacatccattggaacgggaataaacatggtgttccaaaattgcagctgtattcaaacatcaggaaattcatctgcagttcttgggctgtgcgacaaaggacctgactgttccttgatgctccagtacttcctaatcttgtcagcgatgagcagtttcatttattctttggctgccatacctggatatatggttctcttgaggtgtatgaaatctgaagagaagtcccttggtgtgggattacatacattttgcacaagagtatttgctggcattcctgcacctatatattttggcgctttaatggattccacatgtttacactggggaactttgaaatgtggtgagtcaggggcatgcaggatatatgattccaccaccttcagatacatctacctcggattgccggcagcactaagaggatcaagctttgttccagccttaatcatcttaattcttttgaggaagtgtcatctacctggtgaaaatgcctcttcaggaacagagcttatagagacaaaagtcaaagggaaggaaaatgagtgcaaagatatataccaaaagtccacggttttgaaagatgatgaattgaaaactaaattgtaattgtcctattatattacttttttcagaattagagaacatgctgtacaacttaattgttttaaaaatcagtagagatataatagataactttttcttgtctttaagaacctaaaaaacctcttaactcaaaataataaaatgttcactaatgatatttctaaggtatcagtgacacttgagttttcctaggagggacatcaataacagccccctaaagaagattcttagagccagctttatttttatgttgaaacagcaatttcccttaattcatcgaagtaagggtgtacttcctacatctccttctactaatacttctaaaaattttctgttatgaaaacctatttaattccactaaatttgttctttgatattggaattattcagatgcctaaattctcattctgttatgtgaagatttaaatattttattcaagtttatcgcttccatgtgagagaagcctacatcttcttattctatttaggaatcgttctttaactcttcttattcattctaggcatgactcctatataatagattactcataaatataccctcctactttcaattttttcttttctttattactcatacatttgctcaatttgtacagaatactgacaaacttaagcaggttattaaacatcatgaggc

SEQ ID NO: 1065 - protein, 670 aa, Homo sapiens
MGETEKRIETHRIRCLSKLKMFLLAITCAFVSKTLSGSYMNSMLTQIERQFNIPTSLVGFINGSFEIGNLLLIIFVSYFGTKLHRPIMIGIGCVVMGLGCFLKSLPHFLMNQYEYESTVSVSGNLSSNSFLCMENGTQILRPTQDPSECTKEVKSLMWVYVLVGNIVRGMGETPILPLGISYIEDFAKFENSPLYIGLVETGAIIGPLIGLLLASFCANVYVDTGFVNTDDLIITPTDTRWVGAWWFGFLICAGVNVLTAIPFFFLPNTLPKEGLETNADIIKNENEDKQKEEVKKEKYGITKDFLPFMKSLSCNPIYMLFILVSVIQFNAFVNMISFMPKYLEQQYGISSSDAIFLMGIYNLPPICIGYIIGGLIMKKFKITVKQAAHIGCWLSLLEYLLYFLSFLMTCENSSVVGINTSYEGIPQDLYVENDIFADCNVDCNCPSKIWDPVCGNNGLSYLSACLAGCETSIGTGINMVFQNCSCIQTSGNSSAVLGLCDKGPDCSLMLQYFLILSAMSSFIYSLAAIPGYMVLLRCMKSEEKSLGVGLHTFCTRVFAGIPAPIYFGALMDSTCLHWGTLKCGESGACRIYDSTTFRYIYLGLPAALRGSSFVPALIILILLRKCHLPGENASSGTELIETKVKGKENECKDIYQKSTVLKDDELKTKL

SEQ ID NO: 1066 - DNA, 4832 bp, Homo sapiens
ctcgctgctgccttgcagtttgatctcagactgctgtgctagcaatcagcgagactccatgggcgtaggaccctccgagccaggtgcgggatataatcttgtggcgcgccgttttttaagcctgttggaagagcgcagtattcgggtgggagtgacccgattttccaggtgcgtccgtcacccctttctttgactcagaaagggaactccctgaccccttgagcttcccaagtgaggcaatgcctcaccctgctttggcttgcgcacggtgcgcgcacccactgacctgcgcccattgtctggcactccctagtgagatgaacccggtacctcagatggaaatgcagaaatcacccgtcttctgcgtcgctcacgctgggagctgtgcaccggagctgttcctatttggccatcttggctcctctccccttgttcctgattttaatgggactaccttggttatttcacagcacacttacggtgctttgtgaagtgcctgctatgttactatcatcatcttcctgacaagatggtgctgtagaaatctttgcatattgctatgggcttccaagaaaaactacctcgaaggaaaacaaagacaagatgacgatcattctaatgagaagaattataatatgacatgcacactctttacaaagggtagaagtaagacatatcaagatttaaaacataaatagcttggaacaccctgaagagcaacatgggagaaactgagaaaagaattgaaacccatagaataagatgtctttccaagttgaagatgtttctgttggcaataacatgtgcatttgtatccaaaacactgtctggatcttatatgaattccatgctcacacaaatagagagacaattcaacatcccaacatctctagttggattcattaatggaagctttgagattggaaatcttttgttgattatatttgtgagttattttggaaccaaactgcatagacctataatgattggcattggatgtgtggttatgggcttaggctgtttcttaaaatcactacctcatttcctcatgaaccaatatgaatatgaatctacagtttcagtttcaggcaacttgtcctcaaacagtttcttgtgtatggaaaatggaacccagattttaagaccaacgcaggatccatcagagtgtacaaaggaagttaaatcattaatgtgggtgtacgtcctagtaggcaatattgtacgtggaatgggtgaaactcccatcctgcctttgggtatttcctatatagaagattttgccaaatttgaaaattctcctttatatattgggcttgtagaaacaggagctattattggtcctttgattggacttttgttggcatcattctgtgcaaatgtttatgttgacactggatttgtgaacacagatgatctgatcataactcccactgacactcgttgggtcggtgcatggtggtttggctttctgatttgtgcaggagttaacgtgctcactgccattccttttttctttttgcccaacacacttccaaaggaaggactagagactaatgctgacatcattaaaaatgaaaatgaagacaaacaaaaagaagaggtcaagaaggaaaaatatggaatcactaaagattttctacctttcatgaaaagtctttcctgcaatccaatttatatgcttttcatacttgtaagtgtgatacagttcaatgcattcgttaacatgatctccttcatgcctaaatacctagaacagcaatatggaatatcatcttcagatgcaatctttctaatgggtatttataacttacctccaatatgtattggatatataattggtggtttaattatgaagaagttcaagattactgtcaaacaagctgcccacataggatgttggttatccttacttgagtatcttctctattttttatcttttctcatgacttgtgaaaattcttcagttgttggaataaatacctcttatgaaggaattccacaagatttatatgtggaaaatgacatctttgctgattgcaatgtggattgcaactgtccatctaaaatatgggatcctgtgtgtggaaacaatggcttgtcatatctgtcagcttgtcttgctggttgtgagacatccattggaacgggaataaacatggtgttccaaaattgcagctgtattcaaacatcaggaaattcatctgcagttcttgggctgtgcgacaaaggacctgactgttccttgatgctccagtacttcctaatcttgtcagcgatgagcagtttcatttattctttggctgccatacctggatatatggttctcttgaggtgtatgaaatctgaagagaagtcccttggtgtgggattacatacattttgcacaagagtatttgctggcattcctgcacctatatattttggcgctttaatggattccacatgtttacactggggaactttgaaatgtggtgagtcaggggcatgcaggatatatgattccaccaccttcagatacatctacctcggattgccggcagcactaagaggatcaagctttgttccagccttaatcatcttaattcttttgaggaagtgtcatctacctggtgaaaatgcctcttcaggaacagagcttatagagacaaaagtcaaagggaaggaaaatgagtgcaaagatatataccaaaagtccacggttttgaaagatgatgaattgaaaactaaattgtaattgtcctattatattacttttttcagaattagagaacatgctgtacaacttaattgttttaaaaatcagtagagatataatagataactttttcttgtctttaagaacctaaaaaacctcttaactcaaaataataaaatgttcactaatgatatttctaaggtatcagtgacacttgagttttcctaggagggacatcaataacagccccctaaagaagattcttagagccagctttatttttatgttgaaacagcaatttcccttaattcatcgaagtaagggtgtacttcctacatctccttctactaatacttctaaaaattttctgttatgaaaacctatttaattccactaaatttgttctttgatattggaattattcagatgcctaaattctcattctgttatgtgaagatttaaatattttattcaagtttatcgcttccatgtgagagaagcctacatcttcttattctatttaggaatcgttctttaactcttcttattcattctaggcatgactcctatataatagattactcataaatataccctcctactttcaattttttcttttctttattactcatacatttgctcaatttgtacagaatactgacaaacttaagcaggttattaaacatcatgaggcaaagattgttggattttttttcagtaattcaaatccagtgactaaagtttttcttacaaacaagtgtctgaatcaaaggatgaaaggacaatattataaaaactccagttcttaaaggctgtttgtaatgtcagatattgtcaaagaaccactttctaagattcaggactctttagaccgatgtttatatcacccattgtgtcctaaggtagaacacaaacactaattttcccaaaataatcttagacaatagcttctgttatgaaacagaggttagtaaaggctaaggtacatattaaaagctaaatctacttatattattattttgtaaattatggataaaattaaaaattgaaggattttagacatagaagaggacttattgattaatatagggcttctggtaaaagagaatagaatgaacagacaaatacctgtttgtctactccttactctccttcctgttgaaatgacagtcaatatataagaatgacataaatccctaatggatgaagagaatggagtaaggaagggtgggagaagtgggtgtcaatacactatggttatttatgtgtactataaatggagtgagagtgtctgcagggatacaacagagtggaggaagctgaaatacagaatatacctagaaggagcctggaatggaagtgtgaaactgagttgccagttcaaagtgtgagttggtagctggacagaaagcaggccagttaactgaaggactttgtacagatgctttacaggttaatatgatttcctaaatgatcagatgcatcatatgaaaaaagaaagcaaatgagaagagaaaggctgtatagaacaggtttagggggaaggatgaaaagttaagtttcagtttcatgaagtttgagacttcaactctgggcatataaaaaataaccaaggttcaaaccaagactggctttgaaacaagagagaggaactaaaatcattggaaagggggagtttaactttgatgtaggtatgactgcagcagtgagatatcgtattaagatctgatgacatgaaatttggagccacttcctttgtggtgggaggaagtgaggagaatggcctggaaactaaaacaaggagaagagacttacctatattcacagagcagcaagaaaaagtaaacagccactgcatgagaaggtttcaggggaatcagattttgctgagtgtgcgatggtgaagagaatgctcatttctgaactggaatctgagctaaaaagaagcaaataggatatatatggaagttagacttatggaaattagaagaaggggaatgagagatagtttggaattctgtggctatttaggtgactgacataaatgggggcagaggacataatgaggttagttcttacggattcaaggcagatagtgttggtgaaacagtgagtgtcaaaattaggcgaggtggtg

SEQ ID NO: 1067 - protein, 670 aa, Homo sapiens; identical to SEQ ID NO: 1065

SEQ ID NO: 1068 - DNA, 8191 bp, Homo sapiens
tttgcttgcaacactggcacctctgccctgcaccccgggagtgagcagtgagtgaggctcgggtctgggcgctggctccgaatcttcgggctgggagagactccaccatctgggggcggcctgggggagcagccttagtgtcttcctgctgatgcaatccgctaggtcgcgagtctccgccgcgagagggccggtctgcaatccagcccgccacgtgtactcgccgccgcctcgggcactgccccaggtcttgctgcagccgggaccgcgctctgcagccgcagacccggtccacacggccaggggctacgacccttgggatctgccctccgctcagctcgagcttccctcgtggccgacggaacaatgaaggattgcagtaacggatgctccgcagagtgtaccggagaaggaggatcaaaagaggtggtggggacttttaaggctaaagacctaatagtcacaccagctaccattttaaaggaaaaaccagaccccaataatctggtttttggaactgtgttcacggatcatatgctgacggtggagtggtcctcagagtttggatgggagaaacctcatatcaagcctcttcagaacctgtcattgcaccctggctcatcagctttgcactatgcagtggaattatttgaaggattgaaggcatttcgaggagtagataataaaattcgactgtttcagccaaacctcaacatggatagaatgtatcgctctgctgtgagggcaactctgccggtatttgacaaagaagagctcttagagtgtattcaacagcttgtgaaattggatcaagaatgggtcccatattcaacatctgctagtctgtatattcgtcctacattcattggaactgagccttctcttggagtcaagaagcctaccaaagccctgctctttgtactcttgagcccagtgggaccttatttttcaagtggaacctttaatccagtgtccctgtgggccaatcccaagtatgtaagagcctggaaaggtggaactggggactgcaagatgggagggaattacggctcatctctttttgcccaatgtgaagcagtagataatgggtgtcagcaggtcctgtggctctatggagaggaccatcagatcactgaagtgggaactatgaatctttttctttactggataaatgaagatggagaagaagaactggcaactcctccactagatggcatcattcttccaggagtgacaaggcggtgcattctggacctggcacatcagtggggtgaatttaaggtgtcagagagatacctcaccatggatgacttgacaacagccctggaggggaacagagtgagagagatgtttggctctggtacagcctgtgttgtttgcccagtttctgatatactgtacaaaggcgagacaatacacattccaactatggagaatggtcctaagctggcaagccgcatcttgagcaaattaactgatatccagtatggaagagaagagagcgactggacaattgtgctatcctgaatggaaaatagaggatacaatggaaaatagaggataccaactgtatgctactgggacagactgttgcatttgaattgtgatagatttctttggctacctgtgcataatgtagtttgtagtatcaatgtgttacaagagtgattgtttcttcatgccagagaaaatgaattgcaatcatcaaatggtgtttcataacttggtagtagtaacttaccttaccttacctagaaaaacattaatgtaagccatataacatgggattttcctcaatgattttagtgcctccttttgtacttcactcagatactaaatagtagtttattctttaatataagttacattctgctcctcaaacaaatgcaattttttgtgtgtgtttgaaagctaatttgagaaaatttcataggttacatttcctgcagcctatctttatccacagaaagtgttttcttttttttaaatcaagacttttaaaactggatttcctcccatcactgttttttgaaggtcctccaagtccgtgttaaggtaaatatctgttttcttcctgatgtcacagcctgagcatactctgtgcattaggaagacctgagtgcatttcccaccattgtcctttccacattatgttgtagctggctggctgtcaggcgactacaagactgagggtcttgtgccttatagatctttgtatcccccatggctgacatatagtaggtactcagtaaatggttttataatgaatcagtgaacattttgcttctatagaagtgtaccttctttgtttctatattatgaaacctctttattagaatttgtgattgattctgacagtgtatagatttaccttatattgtctttattttccatgagctactaagtcattagagatactctgaagcatagttagtttaggaaatcacttcatattgattgtattagaattatcttggaattgaagatatatccctagagcaggggaccccaacccccaggccatgggccacacagcaggaagaggtgagtggtgggccattgaggagcttcatctgtatttatggctacttcccatcactcgaattaccacctgaactccacctcttgtcagctcagtggcagcattagattctcataggagcacaaatcctattgtgaactctgcatgcaagggatctaggctatgcgctccttatgagaatctaatgcttgatgacctgaggtgtaacagtttcatcctgaaaccacccttcaccctgcagtctgtggaaaaattgtcttccacaaaactggtccctggtgccaaaaatgttggggaccactgctctagagagaggtcatgatatcataccaaccaaatggaaatgacaaatgttttatgtcaagtgttaattgcagaaataaatcttttttttttttttttggtagaaaacaaagaggcatactctgatttttatactctgtttttgcaggtgctcttttctttgaatggagatttgatgagcaagtggttaggatgcagggagagctactatgggtgatattttccttgtttaggagctgtgagttaaaattgtatcctttgtggtttatctaaggaaagtcaaatcttgacagaaaacatttttccttggaaggtcaactctcagacattgtattttggtttccctcagtcctcataacttccttcttgctgaacatattttattctcttttcagagaaggaaaataaaaaggattctaaaagtttgatgcattggaaaaatttccttgaggcatttagcaacacatagaaaatgggctttgattcttttccaaaacttttagccatagggtcttttatagacagggatagtaaaatgaaaattgagaaatataagatgaaaaggaatgataaaaatatcttttagggggcttttaattggtgatctgaaatcttgggagaagctgttcttttcaggcctgaggtgctcttgactgtcgcctgcgcactgtgtaccccgagcaacattctaagggtgtgctttcgccttggctaactcctttgacctcattcttcatatagtagtctaggaaaaagttgcaggtaatttaaactgtctagtggtacatagtaactaaatttctattcctatgagaaatgagaattatttatttgccatcaacacattttatactttgcatctccaaatttattgtggcgagacttgtccattgtgaaagttagagaacattatgtttgtatcatttctttcataaaacctcaagagcatttttaagcccttttcatcagacccagtgaaaactaaggatagatgtttaaaaactggaggtctcctgataaggagaacacaatccaccattgtcatttaagtaataagacaggaaattgaccttgacgctttcttgttaaatagatttaacaggaacatctgcacatcttttttccttgtgcactatttgtttaattgcagtggattaatacagcaagagtgccacattataactaggcaattatccattcttcaagacttagttattgtcacactaattgatcgtttaaggcataagatggtctagcattaggaacatgtgaagctaatctgctcaaaaagatcaacaaattaatattgttgctgatatttgcataattggctgcaattatttaatgtttaattgggttgatcaaatgagattcagcaattcacaagtgcattaatataaacagaactggtggcacttaaaatgataatgattaacttatattgcatgttctcttcctttcacttttttcagtttctacatttcagaccgagcttgtcagcttttttgaaaacacatcagtagaaaccaagattttaaaatgaagtgtcaagacaaaggcaaaacctgagcagttcctaaaaagatttgctgttagaaattttctttgtggcagtcatttattaaggattcaactcgtgatacaccaaaagaagagttgacttcagagatgtgttccatgctctctagcacaggaatgaataaatttataacacctgctttagcctttgttttcaaaagcacaaaggaaaagtgaaagggaaagagaaacaagtgactgagaagtcttgttaaggaatcaggttttttctacctggtaaacattctctattcttttctcaaaagattgctgtaagaaaaaatgtaagacaaaaaaaaaaaaaaaaaacaaacagaggcagaggcaggcagtagcaagaaagcagagcgtaacatcagctagatggtaacatgcaatgtcagctctcttgaagacatgggaaacctaagttacaccttgggttaaaattcttcaccatattagttttgttgcttcataaaatttacctaagcaagtggtcttgcttgcctcaaatccaagcagtcttgaacacttggaggcaattaatgagtatatcttagtcaaaagaattgttggagctttttattaaagctacagtttcagttctgcttttggggaattgtgctatgaaagcagctgccaaaataagctcatttattttcttcaatcccactcagtgctcagtcactatattctgtttcctttttttttttcaagttgcatatttggtttccccttatgattgggaaagatgaattttcagcagaaaacattgtttgttcactttcaaagagtgatagtttctaaaacatttagagcaataaatattcatcagaggtaccaagtaagccggcagaagagttaagggttagagaaatcccttatttcatgtcttgactctaaaattatcaaagtacttttccttgtaatgtggatttcttcttatgcggatatgcaaaaacttcagttatacgtagtaatgctagcaggtaattttagtagacattttataacaactgtcactttgtttcgccacatgtagagtttgttcagctattttccagatatctccccacaaaaggaggcaaagggtaccagcttttcaatgagcattacctattacttggcaaagatgatgaagactctattaatagttcatttgataaatgttgacataaccaacaatagagattaggaagttagttttaagaaatcaatggcatatagacattaccctcatggagtttgtattctactacttgaactgattgtagctataaaagcatagttagatagctgaatagttagatcataagcaaagaaggccagaacacatctcttatcaagaaatcaatgaatagtttatctcatttttaaagcaactttatccttctttaattccttcctttcttctagtgcaaaactacttaataaggttggtgtttaggttagtgttcacaccattcctcatctggtgtgaattaccttctctttctttactatttactaccaacctagtacatgtgttgactgaattcttttcaaacaatgttgagttatcatggtgcacctaataaattaacaccacagattacagcatccttgctgattttctcagcaaagccagattagatggaaataaacaaagaaaatgatcctagagtgaatttttctagaaaatatctattatgaaccatgctgtttaaagtattagcttgaaggtgatggatccagctattcagaaaataactttcatataaccatgattttgcacagtatgaggtcttaaatgtgtggaaagagataaattttttatcattaccacaaaccccttttaaagattcaaaggtggaagaaagtgatttattttttctcttcagcatacatatataaaagacttgtcagatgtttaatttggggaggttgataatgaaacatatcaacagagtatagtagttatagtagtgtttgtgggtaaataatttcctggggtcagacatatataaacatatttgcttcaaaatgataaaggcatgaaatcagtcttaaaaattgaaatgggggtgatgggggagaaaaagaagaacaaatttgaagtgccctttcaaatctgctggatacaagtattgaagttttaagtcatcttattctgtctgaaagtgtatttttcattctacaatagacccaatcaacaagacgtataacttgagttgcatgatgttcagtttatgtaatctactgttgggatggtaagaattgatgtaggctgtggtgtaagaatgaattaaaatatagtttcactggcttttctctacatatccactatcacaatggctaggtttcctgttgctcactattggattctggagaaaaatttaatgaaagatgatatcagaggaagaataagtggaggtagagaagaaaggaatgatagaggaggggaaaaaaacaaaacatatttttgtgttatccaaaggagctttttccttattctgtcaagcattgagatcttcttcagctttcaatgtagttgctaaatacaaataatgctactaggtagtgactaaatatagcaaacacttcatcagatattagaattaggtcacactattgaggttataatctgaaggttgtgttacatagaaaccactttagattattatcaacttggactaggctttattttataatagcatagtaagtaatatctattgtgtcatttcttcaaccattttattctaagatccatgaagcttcttgaggccaaataaaataataagtttagacaagaagtagattgtgacttttttcccttagagatactatttactatctcctatcctgataggtggaaggtttactgaattggaaattggttgactattagtttttaactaaaatgtgcaataacacattgcagtttcctcaaactagtttcctatgatcattaaactcattctcagggttaagaaaggaatgtaaatttctgcctcaatttgtacttcatcaataagtttttgaagagtgcagatttttagtcaggtcttaaaaataaactcacaaatctggatgcatttctaaattctgcaaatgtttcctggggtgacttaacaaggaataatcccacaatatacctagctacctaatacatggagctggggctcaacccactgtttttaaggatttgcgcttacttgtggctgaggaaaaataagtagttcgaggaagtagtttttaaatgtgagcttatagatagaaacagaatatcaacttaattatgaaattgttagaacctgttctcttgtatctgaatctgattgcaattactattgtactgatagactccagccattgcaagtctcagatatcttagctgtgtagtgattcttgaaattctttttaagaaaaattgagtagaaagaaataaaccctttgtaaatgaggcttggcttttgtgaaagatcatccgcaggctatgttaaaaggattttagctcactaaaagtgtaataatggaaatgtggaaaatatcgtaggtaaaggaaactacctcatgctctgaaggttttgtagaagcacaattaaacatctaaaatggctttgttacaccagagccatctggtgtgaagaactctatatttgtatgttgagagggcatggaataattgtattttgctggcaatagacacattctttattatttgcagattcctcatcaaatctgtaattatgcacagtttctgttatcaataaaacaaaagaatcctgtttgtgtggtttcatgaaa

SEQ ID NO: 1069 - protein, 386 aa, Homo sapiens
MKDCSNGCSAECTGEGGSKEVVGTFKAKDLIVTPATILKEKPDPNNLVFGTVFTDHMLTVEWSSEFGWEKPHIKPLQNLSLHPGSSALHYAVELFEGLKAFRGVDNKIRLFQPNLNMDRMYRSAVRATLPVFDKEELLECIQQLVKLDQEWVPYSTSASLYIRPTFIGTEPSLGVKKPTKALLFVLLSPVGPYFSSGTFNPVSLWANPKYVRAWKGGTGDCKMGGNYGSSLFAQCEAVDNGCQQVLWLYGEDHQITEVGTMNLFLYWINEDGEEELATPPLDGIILPGVTRRCILDLAHQWGEFKVSERYLTMDDLTTALEGNRVREMFGSGTACVVCPVSDILYKGETIHIPTMENGPKLASRILSKLTDIQYGREESDWTIVLS

SEQ ID NO: 1070 - DNA, 2931 bp, Homo sapiens
attatccttgctgggctgggaagtggggaaagcaggggagcctgtgctgggtgagattatctgcaatggaccgggttaatgggaggcttgctttggctcgctggaagaacaaatgaagggagttttacttcaaccatttgtgacttctggccaagaggaataaattcagcttttataaggcagcagtacctgtccaaagatcgctttagttccaccttgctccacaagcagcacaaccacactggttggtgagaatgtatctgaagaagaggctcagggagtaaatgggaacaggccagcaaaacactcagctgcaagtccaaagccacaagtgcctccaaagccattacacctgcagaattcaccttcgtccaatatacaccaaacccccaggcataaagctttacctagtgcaaaaccaaggatggaggaaattaaacctgcctctgcttcttgtgtctcaaaagaaaaacccagtaaggtatcagatctcatcagtcgctttgaaggaggcagctcattatcaaattatagtgatttgaagaaagagtctgctgtgaacctaaatgctcctagaaccccaggaaggcatggattgacaaccacacctcaacaaaaactcctctcccagcacttgccacagaggcagggaaatgatgcagataagactcagggtgcacagacttgtgtggccaacggtgtaatggcagcacaaaaccagatggaatgtgaggaggagaaagctgccactcttagctcagatacttctattcaagcttctgaacccttgcttgatacgcacatagtgaatggagaaagagatgaaactgccacagctcctgcatcacccacaacagatagctgtgatggaaatgcttctgacagtagctacaggactccaggcataggcccagtgctccccctagaagaaagaggggcagaaacagaaaccaaggtacaagagagggaaaatggggaaagccctctggaactggagcagctggaccagcaccatgagatgaaggagactaatgagcaaaaacttcacaaaatagccaatgaacttttgcttactgaaagagcttatgtcaaccgacttgacctcttagatcaggtattttattgcaaactgttggaagaagcaaaccgaggctcgtttccagcagagatggtgaataaaatcttttccaatatttcatcaataaatgccttccatagtaaattcctcttgccagagctggagaaacgaatgcaagaatgggaaactactcctagaattggagacatccttcagaaattggcaccattccttaagatgtatggagaatatgtgaaaggatttgataatgcaatggaattggttaaaaacatgacagaacgtattccccagttcaaatcagtggttgaagaaattcagaaacagaaaatctgtgggagcttaactttgcagcatcacatgctagaacctgttcagcggattccccggtatgagatgctccttaaggactatctaaggaaattgcctcctgattccctggactggaatgatgctaaaaaatcacttgaaattatatctacagcagcaagccattctaatagtgcaataaggaaaatggagaacctaaagaaactcttagagatttatgaaatgttgggagaagaagaagacattgtaaacccttcaaatgaactaataaaagaaggacagatcctcaaactagctgctcggaacacttcagcacaagaacgctaccttttcttattcaacaacatgttgctgtactgtgtgcccaaattcagcttggtaggctctaaattcacagttcgaaccagggttggcattgatggaatgaaaattgtagagactcaaaatgaagaatatccacatactttccaggtgtctgggaaagagagaacactggaactgcaggccagttctgcgcaagacaaagaagaatggatcaaggcccttcaagaaaccatcgatgcttttcatcaaaggcatgaaaccttcagaaatgcaattgcaaaggataatgacattcactcagaggtttctactgctgagctagggaaaagagccccaagatggatccgagataatgaagtgacaatgtgtatgaaatgtaaagaacctttcaatgcactgacacgaaggaggcatcattgtcgagcatgtggatatgtggtttgttggaaatgctccgactacaaagctcaacttgaatatgatggtggtaaattgagcaaagtttgtaaagactgttatcaaatcataagtggattcacagacagtgaagaaaagaaaagaaaaggaattttagagattgaatcagcagaagtatctggaaacagtgtggtgtgcagctttcttcagtatatggagaagtcaaaaccttggcagaaagcttggtgtgtgatccccaagcaagaccctcttgtgctgtacatgtatggtgccccccaggacgtcagagcccaggccaccattccacttctgggctatgtggtggatgaaatgccaaggagcgcagacctgccacacagtttcaaactgacccagtctaagtccgtgcacagctttgctgcagacagtgaggaactgaagcagaagtggctgaaagtcatccttttagctgtcacaggtgagacaccaggtggtccaaatgagcatccagccaccttggatgatcatcctgaacctaagaaaaaatcagaatgctgaactcctccaggaccagccatggtgtggaggtctcaggacttacagctcaagacattcccagctcttcttacacatctgctagcactttatgttgaaaaatataggcccataaatgcatcttttgaggactattttcctatgtttatgtactcttagtgaaattagtgtgcagagtcattctaccgataaagttttgaaataatgtg

SEQ ID NO: 1071 - protein, 766 aa, Homo sapiens
MEEIKPASASCVSKEKPSKVSDLISRFEGGSSLSNYSDLKKESAVNLNAPRTPGRHGLTTTPQQKLLSQHLPQRQGNDADKTQGAQTCVANGVMAAQNQMECEEEKAATLSSDTSIQASEPLLDTHIVNGERDETATAPASPTTDSCDGNASDSSYRTPGIGPVLPLEERGAETETKVQERENGESPLELEQLDQHHEMKETNEQKLHKIANELLLTERAYVNRLDLLDQVFYCKLLEEANRGSFPAEMVNKIFSNISSINAFHSKFLLPELEKRMQEWETTPRIGDILQKLAPFLKMYGEYVKGFDNAMELVKNMTERIPQFKSVVEEIQKQKICGSLTLQHHMLEPVQRIPRYEMLLKDYLRKLPPDSLDWNDAKKSLEIISTAASHSNSAIRKMENLKKLLEIYEMLGEEEDIVNPSNELIKEGQILKLAARNTSAQERYLFLFNNMLLYCVPKFSLVGSKFTVRTRVGIDGMKIVETQNEEYPHTFQVSGKERTLELQASSAQDKEEWIKALQETIDAFHQRHETFRNAIAKDNDIHSEVSTAELGKRAPRWIRDNEVTMCMKCKEPFNALTRRRHHCRACGYVVCWKCSDYKAQLEYDGGKLSKVCKDCYQIISGFTDSEEKKRKGILEIESAEVSGNSVVCSFLQYMEKSKPWQKAWCVIPKQDPLVLYMYGAPQDVRAQATIPLLGYVVDEMPRSADLPHSFKLTQSKSVHSFAADSEELKQKWLKVILLAVTGETPGGPNEHPATLDDHPEPKKKSEC

SEQ ID NO: 1072 - DNA, 4669 bp, Homo sapiens
ctgcttgtcaaaaggcggcagcggagccgtgtgcgccgggagcgcggaacagcttgtccacccgccggccggaccagaagcctttgggtctgaagtgtctgtgagacctcacagaagagcacccctgggctccacttacctgccccctgctccttcagggatggaggcaatggcggccagcacttccctgcctgaccctggagactttgaccggaacgtgccccggatctgtggggtgtgtggagaccgagccactggctttcacttcaatgctatgacctgtgaaggctgcaaaggcttcttcaggcgaagcatgaagcggaaggcactattcacctgccccttcaacggggactgccgcatcaccaaggacaaccgacgccactgccaggcctgccggctcaaacgctgtgtggacatcggcatgatgaaggagttcattctgacagatgaggaagtgcagaggaagcgggagatgatcctgaagcggaaggaggaggaggccttgaaggacagtctgcggcccaagctgtctgaggagcagcagcgcatcattgccatactgctggacgcccaccataagacctacgaccccacctactccgacttctgccagttccggcctccagttcgtgtgaatgatggtggagggagccatccttccaggcccaactccagacacactcccagcttctctggggactcctcctcctcctgctcagatcactgtatcacctcttcagacatgatggactcgtccagcttctccaatctggatctgagtgaagaagattcagatgacccttctgtgaccctagagctgtcccagctctccatgctgccccacctggctgacctggtcagttacagcatccaaaaggtcattggctttgctaagatgataccaggattcagagacctcacctctgaggaccagatcgtactgctgaagtcaagtgccattgaggtcatcatgttgcgctccaatgagtccttcaccatggacgacatgtcctggacctgtggcaaccaagactacaagtaccgcgtcagtgacgtgaccaaagccggacacagcctggagctgattgagcccctcatcaagttccaggtgggactgaagaagctgaacttgcatgaggaggagcatgtcctgctcatggccatctgcatcgtctccccagatcgtcctggggtgcaggacgccgcgctgattgaggccatccaggaccgcctgtccaacacactgcagacgtacatccgctgccgccacccgcccccgggcagccacctgctctatgccaagatgatccagaagctagccgacctgcgcagcctcaatgaggagcactccaagcagtaccgctgcctctccttccagcctgagtgcagcatgaagctaacgccccttgtgctcgaagtgtttggcaatgagatctcctgactaggacagcctgtggcggtgcctgggtggggctgctcctccagggccacgtgccaggcccggggctggcggctactcagcagccctcctcaccccgtctggggttcagcccctcctctgccacctcccctatccacccagcccattctctctcctgtccaacctaacccctttcctgcgggcttttccccggtcccttgagacctcagccatgaggagttgctgtttgtttgacaaagaaacccaagtgggggcagagggcagaggctggaggcagggccttgcccagagatgcctccaccgctgcctaagtggctgctgactgatgttgagggaacagacaggagaaatgcatccattcctcagggacagagacacctgcacctccccccactgcaggccccgcttgtccagcgcctagtggggtctccctctcctgcctactcacgataaataatcggcccacagctcccaccccacccccttcagtgcccaccaacatcccattgccctggttatattctcacgggcagtagctgtggtgaggtgggttttcttcccatcactggagcaccaggcacgaacccacctgctgagagacccaaggaggaaaaacagacaaaaacagcctcacagaagaatatgacagctgtccctgtcaccaagctcacagttcctcgccctgggtctaaggggttggttgaggtggaagccctccttccacggatccatgtagcaggactgaattgtccccagtttgcagaaaagcacctgccgacctcgtcctccccctgccagtgccttacctcctgcccaggagagccagccctccctgtcctcctcggatcaccgagagtagccgagagcctgctcccccaccccctccccaggggagagggtctggagaagcagtgagccgcatcttctccatctggcagggtgggatggaggagaagaattttcagaccccagcggctgagtcatgatctccctgccgcctcaatgtggttgcaaggccgctgttcacccacagggctaagagctagcgctgccgcaccccagagtgtgggaagggagagcggggcagtctcgggtggctagtcagagagagtgtttgggggttccgtgatgtagggtaaggtgccttcttattctcactccaccacccaaaagtcaaaaggtgcctgtgaggcaggggcggagtgatacaacttcaagtgcatgctctctgcagccagcccagcccagctggtgggaagcgtctgtccgtttactccaaggtggggtctttgtgagagtgagctgtaggtgtgcgggaccggtacagaaaggcgttcttcgaggtggatcacagaggcttcttcagatcagtgcttgagtttggggaatgcggccgcattccctgagtcaccaggaatgttaaagtcagtgggaacgtgactgccccaactcctggaagctgtgtccttgcacctgcatccgtagttccctgaaaacccagagaggaatcagacttcacactgcaagagccttggtgtccacctggccccatgtctctcagaattcttcaggtggaaaaacatctgaaagccacgttccttactgcagaatagcatatatatcgcttaatcttaaatttattagatatgagttgttttcagactcagactccatttgtattatagtctaatatacagggtagcaggtaccactgatttggagatatttatggggggagaacttacattgtgaaacttctgtacattaattattattgctgttgttattttacaagggtctagggagagacccttgtttgattttagctgcagaacgtattggtccagcttgctcttcagtgggagaaaacacttgtaagttgctaaacgagtcaatcccctcattcaggaaaactgacagaggagggcgtgactcacccaagcatatataactagctagaagtgggccaggacaggcccggcgcggtggctcacgcctgtaatcccagcagtttgggaggtcgaggtaggtggatcacctgaggtcgggagttcgagaccaacctgaccaacatggagaaaccctgtctctattaaaaatacaaaaaaaaaaaaaaaaaaaatagccgggcatggtggcgcaagcctgtaatcccagctactcaggaggctgaggcagaagaattgaacccaggaggtggaggttgcagtgagctgagatcgtgccgttactctccaacctggacaacaagagcgaaactccgtcttagaagtggaccaggacaggaccagattttggagtcatggtccggtgtccttttcactacaccatgtttgagctcagacccccactctcattccccaggtggctgacccagtccctgggggaagccctggatttcagaaagagcaagtctggatctgggaccctttccttccttccctggcttgtaactccaccaacccatcagaaggagaaggaaggagactcacctctgcctcaatgtgaatcagaccctaccccaccacgatgtggccctggcctgctgggctctccacctcagccttggataatgctgttgcctcatctataacatgcatttgtctttgtaatgtcaccaccttcccagctctccctctggccctgccttcttcggggaactcctggaaatatcagttactcagccctgggccccaccacctaggccactcctccaaaggaagtctaggagctgggaggaaaagaaaagaggggaaaatgagtttttatggggctgaacggggagaaaaggtcatcatcgattctactttagaatgagagtgtgaaatagacatttgtaaatgtaaaacttttaaggtatatcattataactgaaggagaaggtgccccaaaatgcaagattttccacaagattcccagagacaggaaaatcctctggctggctaactggaagcatgtaggagaatccaagcgaggtcaacagagaaggcaggaatgtgtggcagatttagtgaaagctagagatatggcagcgaaaggatgtaaacagtgcctgctgaatgatttccaaagagaaaaaaagtttgccagaagtttgtcaagtcaaccaatgtagaaagctttgcttatggtaataaaaatggctcatacttatatagcacttactttgttgcaagtactgctgtaaataaatgctttatgcaaaccaaaaaaaaaaaaaaaaaa

SEQ ID NO: 1073 - protein, 427 aa, Homo sapiens
MEAMAASTSLPDPGDFDRNVPRICGVCGDRATGFHFNAMTCEGCKGFFRRSMKRKALFTCPFNGDCRITKDNRRHCQACRLKRCVDIGMMKEFILTDEEVQRKREMILKRKEEEALKDSLRPKLSEEQQRIIAILLDAHHKTYDPTYSDFCQFRPPVRVNDGGGSHPSRPNSRHTPSFSGDSSSSCSDHCITSSDMMDSSSFSNLDLSEEDSDDPSVTLELSQLSMLPHLADLVSYSIQKVIGFAKMIPGFRDLTSEDQIVLLKSSAIEVIMLRSNESFTMDDMSWTCGNQDYKYRVSDVTKAGHSLELIEPLIKFQVGLKKLNLHEEEHVLLMAICIVSPDRPGVQDAALIEAIQDRLSNTLQTYIRCRHPPPGSHLLYAKMIQKLADLRSLNEEHSKQYRCLSFQPECSMKLTPLVLEVFGNEIS

SEQ ID NO: 1074 - DNA, 4791 bp, Homo sapiens
ctgcttgtcaaaaggcggcagcggagccgtgtgcgccgggagcgcggaacagcttgtccacccgccggccggaccagggctcctgaacctagcccagctggacggagaaatggactctagcctcctctgatagcctcatgccaggccccgtgcacattgctttgcttgcctccctcaatcctcatagcttctctttgggaagcctttgggtctgaagtgtctgtgagacctcacagaagagcacccctgggctccacttacctgccccctgctccttcagggatggaggcaatggcggccagcacttccctgcctgaccctggagactttgaccggaacgtgccccggatctgtggggtgtgtggagaccgagccactggctttcacttcaatgctatgacctgtgaaggctgcaaaggcttcttcaggcgaagcatgaagcggaaggcactattcacctgccccttcaacggggactgccgcatcaccaaggacaaccgacgccactgccaggcctgccggctcaaacgctgtgtggacatcggcatgatgaaggagttcattctgacagatgaggaagtgcagaggaagcgggagatgatcctgaagcggaaggaggaggaggccttgaaggacagtctgcggcccaagctgtctgaggagcagcagcgcatcattgccatactgctggacgcccaccataagacctacgaccccacctactccgacttctgccagttccggcctccagttcgtgtgaatgatggtggagggagccatccttccaggcccaactccagacacactcccagcttctctggggactcctcctcctcctgctcagatcactgtatcacctcttcagacatgatggactcgtccagcttctccaatctggatctgagtgaagaagattcagatgacccttctgtgaccctagagctgtcccagctctccatgctgccccacctggctgacctggtcagttacagcatccaaaaggtcattggctttgctaagatgataccaggattcagagacctcacctctgaggaccagatcgtactgctgaagtcaagtgccattgaggtcatcatgttgcgctccaatgagtccttcaccatggacgacatgtcctggacctgtggcaaccaagactacaagtaccgcgtcagtgacgtgaccaaagccggacacagcctggagctgattgagcccctcatcaagttccaggtgggactgaagaagctgaacttgcatgaggaggagcatgtcctgctcatggccatctgcatcgtctccccagatcgtcctggggtgcaggacgccgcgctgattgaggccatccaggaccgcctgtccaacacactgcagacgtacatccgctgccgccacccgcccccgggcagccacctgctctatgccaagatgatccagaagctagccgacctgcgcagcctcaatgaggagcactccaagcagtaccgctgcctctccttccagcctgagtgcagcatgaagctaacgccccttgtgctcgaagtgtttggcaatgagatctcctgactaggacagcctgtggcggtgcctgggtggggctgctcctccagggccacgtgccaggcccggggctggcggctactcagcagccctcctcaccccgtctggggttcagcccctcctctgccacctcccctatccacccagcccattctctctcctgtccaacctaacccctttcctgcgggcttttccccggtcccttgagacctcagccatgaggagttgctgtttgtttgacaaagaaacccaagtgggggcagagggcagaggctggaggcagggccttgcccagagatgcctccaccgctgcctaagtggctgctgactgatgttgagggaacagacaggagaaatgcatccattcctcagggacagagacacctgcacctccccccactgcaggccccgcttgtccagcgcctagtggggtctccctctcctgcctactcacgataaataatcggcccacagctcccaccccacccccttcagtgcccaccaacatcccattgccctggttatattctcacgggcagtagctgtggtgaggtgggttttcttcccatcactggagcaccaggcacgaacccacctgctgagagacccaaggaggaaaaacagacaaaaacagcctcacagaagaatatgacagctgtccctgtcaccaagctcacagttcctcgccctgggtctaaggggttggttgaggtggaagccctccttccacggatccatgtagcaggactgaattgtccccagtttgcagaaaagcacctgccgacctcgtcctccccctgccagtgccttacctcctgcccaggagagccagccctccctgtcctcctcggatcaccgagagtagccgagagcctgctcccccaccccctccccaggggagagggtctggagaagcagtgagccgcatcttctccatctggcagggtgggatggaggagaagaattttcagaccccagcggctgagtcatgatctccctgccgcctcaatgtggttgcaaggccgctgttcacccacagggctaagagctagcgctgccgcaccccagagtgtgggaagggagagcggggcagtctcgggtggctagtcagagagagtgtttgggggttccgtgatgtagggtaaggtgccttcttattctcactccaccacccaaaagtcaaaaggtgcctgtgaggcaggggcggagtgatacaacttcaagtgcatgctctctgcagccagcccagcccagctggtgggaagcgtctgtccgtttactccaaggtggggtctttgtgagagtgagctgtaggtgtgcgggaccggtacagaaaggcgttcttcgaggtggatcacagaggcttcttcagatcagtgcttgagtttggggaatgcggccgcattccctgagtcaccaggaatgttaaagtcagtgggaacgtgactgccccaactcctggaagctgtgtccttgcacctgcatccgtagttccctgaaaacccagagaggaatcagacttcacactgcaagagccttggtgtccacctggccccatgtctctcagaattcttcaggtggaaaaacatctgaaagccacgttccttactgcagaatagcatatatatcgcttaatcttaaatttattagatatgagttgttttcagactcagactccatttgtattatagtctaatatacagggtagcaggtaccactgatttggagatatttatggggggagaacttacattgtgaaacttctgtacattaattattattgctgttgttattttacaagggtctagggagagacccttgtttgattttagctgcagaacgtattggtccagcttgctcttcagtgggagaaaacacttgtaagttgctaaacgagtcaatcccctcattcaggaaaactgacagaggagggcgtgactcacccaagcatatataactagctagaagtgggccaggacaggcccggcgcggtggctcacgcctgtaatcccagcagtttgggaggtcgaggtaggtggatcacctgaggtcgggagttcgagaccaacctgaccaacatggagaaaccctgtctctattaaaaatacaaaaaaaaaaaaaaaaaaaatagccgggcatggtggcgcaagcctgtaatcccagctactcaggaggctgaggcagaagaattgaacccaggaggtggaggttgcagtgagctgagatcgtgccgttactctccaacctggacaacaagagcgaaactccgtcttagaagtggaccaggacaggaccagattttggagtcatggtccggtgtccttttcactacaccatgtttgagctcagacccccactctcattccccaggtggctgacccagtccctgggggaagccctggatttcagaaagagcaagtctggatctgggaccctttccttccttccctggcttgtaactccaccaacccatcagaaggagaaggaaggagactcacctctgcctcaatgtgaatcagaccctaccccaccacgatgtggccctggcctgctgggctctccacctcagccttggataatgctgttgcctcatctataacatgcatttgtctttgtaatgtcaccaccttcccagctctccctctggccctgccttcttcggggaactcctggaaatatcagttactcagccctgggccccaccacctaggccactcctccaaaggaagtctaggagctgggaggaaaagaaaagaggggaaaatgagtttttatggggctgaacggggagaaaaggtcatcatcgattctactttagaatgagagtgtgaaatagacatttgtaaatgtaaaacttttaaggtatatcattataactgaaggagaaggtgccccaaaatgcaagattttccacaagattcccagagacaggaaaatcctctggctggctaactggaagcatgtaggagaatccaagcgaggtcaacagagaaggcaggaatgtgtggcagatttagtgaaagctagagatatggcagcgaaaggatgtaaacagtgcctgctgaatgatttccaaagagaaaaaaagtttgccagaagtttgtcaagtcaaccaatgtagaaagctttgcttatggtaataaaaatggctcatacttatatagcacttactttgttgcaagtactgctgtaaataaatgctttatgcaaaccaaaaaaaaaaaaaaaaaa

SEQ ID NO: 1075 - protein, 427 aa, Homo sapiens; identical to SEQ ID NO: 1073

SEQ ID NO: 1076 - DNA, 318 bp, Homo sapiens
atggacatcaccaagacagagagcattgctgcagctgcccagtggcctcctaagctggggagggtcctggcagtgggatctgagctggagattgaggatccccacctggcagccttgaacagaaatgggggaatgacttttgtcttcagcccagacctagggggagcctcagctgcctgcctgtgctgtggggtcctcatgaggagggagctctcccactttggagtgaaggtgtctgtgattgaacctggtcacttcaggaccagtatggccggctctgagaggcatttacagaacctcaaggagctgtcggactag

SEQ ID NO: 1077 - protein, 105 aa, Homo sapiens
MDITKTESIAAAAQWPPKLGRVLAVGSELEIEDPHLAALNRNGGMTFVFSPDLGGASAACLCCGVLMRRELSHFGVKVSVIEPGHFRTSMAGSERHLQNLKELSD

SEQ ID NO: 1078 - DNA, 1738 bp, Homo sapiens
aaatatgttgcagaaaggcagtcatcagggaggaaagtgaggattccctgccaaaatgcctgagggcttccctgcctaccacagccctctgtgttcttaaatcctcctgtctgaacagaggccagactctggtttcccccacagcctgtctgtgtctgtcctctgcaaagccatgtggctctacctggcggttttcgtgggcctgtactaccttctgcactggtaccgggagaggcaggtgctgagccacctgagagataagtatgtgttcatcacgggctgtgactctggcttcgggaaactgctggccagacagctggatgcacgaggcttgcgggtgctggctgcatgtctgacggagaaaggagccgagcagctgaggggccagacttcagacaggctggagacggtgaccctggatgttaccaagacagagagcgttgctgcagccgcccagtgggtgaaggagtgcgtgagagacaaaggactctggggcctggtgaataatgctggcatctccttgcccacggctcccaatgagttgctcaccaagcaggacttcgtgaccatactggacgtgaacttgttgggggtgattgatgtgactctgagcctgctgcccttagtgaggagggccaggggccgtgtggtcaacgtctccagtgtcatgggccgggtgtcactttttggtggaggctactgcatctccaagtatggcgtggaagccttctctgactccctcaggagggaactctcctactttggggtgaaggtggctatgattgaacctggctatttcaagactgctgtgaccagtaaggagagattcttaaagagcttcctggagatttgggaccggtccagtccagaggtcaaggaggcctatggcgagaagtttgttgcagactataagaaatcagctgaacaaatggagcagaagtgcacacaggatctgtcgttggtgaccaactgcatggagcatgcgctgattgcctgccacccccgtactcgctactcagctggctgggatgccaagcttctctacctccccatgagctacatgcccaccttcctggtggatgccattatgtactgggtctctccaagcccggccaaggctctatgaagctaaggttggatgcatggttgcatggatttggggtgtgctatgaggggtggtgtatccttgggagagatataaagtggagggagggagccgtccggtcagtagggcaccaatcccacctccttcattacctcctggccatgattctcctgggagataattctgctctctggagatgttggtaggaaagtttcaagttacgcagctgagaaacagggaccaaatagtgctcctgggtgcattgtcaccgtgggtggccactcaagggtccaagcctctagggccatccttgggctaacaactggggtgggtgtgagcaggtggaaggagcctcagcccatgccattacctcctgcttccttatcaggctgtgtgttaattctgggccagtctacaccctcccacggggtggaaatggcctggaggatgtgagggcacccctcctctgaagatccctgtacacgtggtgttgggactggaaccattatgcggccccataggcctcaggagtcatcccagaagcagtggctgggaggtggtgtcctaagtaaggatctgtgcagaggacaaataaatcagtttttgatttgtcttgaaaaaaaaaaaaaaaaa

SEQ ID NO: 1079 - protein, 317 aa, Homo sapiens
MWLYLAVFVGLYYLLHWYRERQVLSHLRDKYVFITGCDSGFGKLLARQLDARGLRVLAACLTEKGAEQLRGQTSDRLETVTLDVTKTESVAAAAQWVKECVRDKGLWGLVNNAGISLPTAPNELLTKQDFVTILDVNLLGVIDVTLSLLPLVRRARGRVVNVSSVMGRVSLFGGGYCISKYGVEAFSDSLRRELSYFGVKVAMIEPGYFKTAVTSKERFLKSFLEIWDRSSPEVKEAYGEKFVADYKKSAEQMEQKCTQDLSLVTNCMEHALIACHPRTRYSAGWDAKLLYLPMSYMPTFLVDAIMYWVSPSPAKAL

SEQ ID NO: 1080 - DNA, 927 bp, Homo sapiens
atgtggctctacctggcggtcctcctgggcctatactaccttctgcactggtactgggagaggcaggtggtgagtcacctgagagacaagtacgtgttcatcatgagctgtgactcacgcttcaggaagctactggccagacaactgaatgcacaggcttgcgggagctgcatgtaggacagagaaggggaccaagcagctgaggggccagacttcagacaggctggagacggtgaccatggacatcaccaagacagagagcattgctgcagctgcccagtgggtgaaggagtgtgtgggggacagagggaccacctcaatccctcctagactctggggcctggtgaataactctggcatctgcctgccctccagctgcaatgagtagttgaaagtgaccaactttgtgatggaactggacatgaacctgttggggatgattgatgtgactctgatcctgctgccctaatgaggaaggccaggggctgcatggtcaacctctccagcatcgcaggccgggtttcactttttggtgcaggctactgcatctccaagtacagcgtggaggccttctccgactccctctggagggagctctcccactttggagtgaaggtgtctgtgattgaacctggtcacttcaggaccagtatggccggctctgagaggcatttacagaacctcaaggagctgtcggactaggccagccccgaggtcaaggagacgtatggggagaagtttctgatatcccgtgagagcctttggtcaaaatgcaatacaaatctatcattggtgactgactgcatggagcatgtgctgaccgcctgccacccctgcacttgctacacagctggctgggacaccaagcttctctacctccccatgacctacatgtctaccttcctggcggatgccatgctccactag

SEQ ID NO: 1081 - DNA, 1620 bp, Homo sapiens
cagcctcctcacagctccccatagcctggacctgccggccctccctccaggaccgaggggctcccaagggaaactcaggcgtgtgctggtcccaatgtcagtgaaacccagctgggggcctggcccctcggagggggtcaccgcagtgcctaccagtgaccttggagagatccacaactggaccgagctgcttgacctcttcaaccacactttgtctgagtgccacgtggagctcagccagagcaccaagcgcgtggtcctctttgccctctacctggccatgtttgtggttgggctggtggagaacctcctggtgatatgcgtcaactggcgcggctcaggccgggcagggctgatgaacctctacatcctcaacatggccatcgcggacctgggcattgtcctgtctctgcccgtgtggatgctggaggtcacgctggactacacctggctctggggcagcttctcctgccgcttcactcactacttctactttgtcaacatgtatagcagcatcttcttcctggtgtgcctcagtgtcgaccgctatgtcaccctcaccagcgcctccccctcctggcagcgttaccagcaccgagtgcggcgggccatgtgtgcaggcatctgggtcctctcggccatcatcccgctgcctgaggtggtccacatccagctggtggagggccctgagcccatgtgcctcttcatggcaccttttgaaacgtacagcacctgggccctggcggtggccctgtccaccaccatcctgggcttcctgctgcccttccctctcatcacagtcttcaatgtgctgacagcctgccggctgcggcagccaggacaacccaagagccggcgccactgcctgctgctgtgcgcctacgtggccgtctttgtcatgtgctggctgccctatcatgtgaccctgctgctgctcacactgcatgggacccacatctccctccactgccacctggtccacctgctctacttcttctatgatgtcattgactgcttctccatgctgcactgtgtcatcaaccccatcctttacaactttctcagcccacacttccggggccggctcctgaatgctgtagtccattaccttcctaaggaccagaccaaggcgggcacatgcgcctcctcttcctcctgttccacccagcattccatcatcatcaccaagggtgatagccagcctgctgcagcagccccccaccctgagccaagcctgagctttcaggcacaccatttgcttccaaatacttcccccatctctcccactcagcctcttacacccagctgaggtagaggccagactcctccaacagtgaaggaaaaggcacaggtgagagtataggtgggagatttggggggatgtagaggggagggtcaaagcactcgtggtcaattttgaatctatcttaaaatactgaggtgtggagagagagacaggatcaggagcgatagagagcaggccctcagtgttgtactatttgtctcggtccttgtgtctaaggagcaatgcagaaaaaaaggtgaaataaatggaagagatagccatggaaaaaaaaaaaaaaaaaaaaaaaaaaaaaaaaaaaaaaaaaaaaaaaaaaa

SEQ ID NO: 1082 - protein, 404 aa, Homo sapiens
MSVKPSWGPGPSEGVTAVPTSDLGEIHNWTELLDLFNHTLSECHVELSQSTKRVVLFALYLAMFVVGLVENLLVICVNWRGSGRAGLMNLYILNMAIADLGIVLSLPVWMLEVTLDYTWLWGSFSCRFTHYFYFVNMYSSIFFLVCLSVDRYVTLTSASPSWQRYQHRVRRAMCAGIWVLSAIIPLPEVVHIQLVEGPEPMCLFMAPFETYSTWALAVALSTTILGFLLPFPLITVFNVLTACRLRQPGQPKSRRHCLLLCAYVAVFVMCWLPYHVTLLLLTLHGTHISLHCHLVHLLYFFYDVIDCFSMLHCVINPILYNFLSPHFRGRLLNAVVHYLPKDQTKAGTCASSSSCSTQHSIIITKGDSQPAAAAPHPEPSLSFQAHHLLPNTSPISPTQPLTPS

SEQ ID NO: 1083 - DNA, 6170 bp, Homo sapiens
gaagcggcggcggcgatggtgctcggggcgccgcagagccggattaactgtgctgataaggaggtaatttcataggagctgctaagatgggcatgaggatcaaactgcaaagcaccaaccaccccaacaacctgctgaaggaactcaacaagtgccggctctcagagaccatgtgcgacgtcaccattgtggtggggagccgctccttcccggcccacaaggctgtgctggcctgtgcagctggctacttccagaacctcttcctgaatactgggcttgatgctgccaggacctatgtggtggacttcatcacccctgccaactttgagaaggttctgagctttgtctacacttcagaactcttcacagacctgatcaatgttggggtcatctacgaggtagctgagcgtttgggtatggaggacctcctccaggcctgtcactctacctttcctgatctggagagcactgccagggccaagcccctgaccagcaccagtgagagccactctggtaccctgagttgtccttcggcagaacctgcccatccccttggagaactccgaggtggtggggactaccttggtgctgatagaaactatgtgttgcccagtgatgctggagggagctataaagaggaagagaagaatgttgccagtgacgctaaccatagcctgcatctgccgcaaccgcccccaccaccgccaaagacagaagaccatgacacccctgctcccttcacgtccattcctagcatgatgacccagccactcctaggcactgtcagcacgggcatccagaccagcacgagctcctgccagccatacaaagttcaaagcaatggagacttcagtaaaaacagcttcctcacccctgacaatgcagtagacattaccactgggaccaactcctgtctgagcaatagtgagcactccaaagatcctggctttgggcagatggatgagctccagctcgaggacctgggggatgatgacttgcagtttgaagaccctgctgaggatataggcacaactgaggaggtgattgagctgagtgatgacagtgaggatgagttggcttttggagagaatgacaatcgggagaataaggccatgccctgccaggtgtgcaagaaagttctagagcccaacattcaactgatccggcagcatgctcgggaccatgtggacctgctgacgggcaactgcaaggtctgcgagacccacttccaggaccgaaactcccgggtaactcatgtcctgtcccacattggtattttccttttctcctgcgacatgtgtgaaactaagttctttacccagtggcagctgacccttcaccgacgggatggaatatttgagaacaacatcattgtccaccccaacgatcccctgccagggaagctgggtctcttttcaggggcagcctccccagagctgaaatgcgctgcctgtgggaaagtattggccaaagatttccatgtggtccggggccacatccttgaccatctaaacttgaagggccaggcctgcagtgtctgcgaccagcgtcaccttaacctctgcagcctcatgtggcacacgctgtcccatctcggcatctcagtcttctcctgttctgtctgtgcgaacagctttgtggactggcatcttctagagaagcacatggctgtgcaccaaagtctggaagacgccctcttccactgccgcttgtgcagccagagcttcaagtcagaggctgcctatcgctaccacgtcagccagcacaaatgcaacagtggccttgatgcacggcctggttttgggctgcagcacccagctctccagaagcggaagctgccagcagaggagtttctgggtgaagagctggcgctgcagggccaacctgggaacagcaagtatagctgcaaggtctgtggcaaaagatttgcccacacaagcgaattcaactaccaccggcggatccacacgggggagaagccataccaatgtaaggtgtgccacaagttctttcgaggccgctcgaccatcaagtgccacctaaagacacactcgggggccctcatgtaccgctgcacagtctgtgggcactacagttccacccttaacctcatgagcaaacatgttggtgtgcacaaaggcagcctcccccctgacttcaccatcgagcagaccttcatgtacatcatccattccaaagaggcggataagaacccggacagttgactgggtcccggcagagccacggggagctcccaagcagcagccaggatgctgatatctaagaggtgttggtccctccccagctgaagttataattttgccttggtaggaattctgttctgtgttgtgtttaaagaagaaaagaagaagaaatagcacataagctgttactgttgttgagaagcaacagccctatcacatttacctccatacctgttcttgcccatgcagggctatgtttttcattcttttgaggctggttttgggatctagtcaagcagttggtgtccactagacccccttccccagcctctctagttttagtttactgataggttttatgctgctaagaatccaaccaacagcctcacttaacagaggaggtaaagggaggttttcactgtgggtgttactgcaggcctccaactgggatgaccagcaatgagaaagattttgggaatgtgatcattcagaaaagacaggtcagcagggcagtcccctcaggttccagccctcagcagggacaagacatcagggatgttggtgtctgcttatctacagccctaatctgctgattgaacagtgaaaatcttttggcagctagatccatactaggcacagagctttctatttaggtcagaaagctttgggatgaacccctgccagccagaaggggtgtcctgcagtgccaccagaagtggcagcctggatggacaggagaggtttctcttttctcctcatttccaaagaaacaggattttatggagtgatggcccgggacgtccggccttctgtggggcagagaggatagggaaccactttgatatagtcatctgttttggccacttctgttggccatgagtgtcttggtggagaggtggggatgtatctgacagcagcagccttgccttaatttatatctggtctcccgtccagaagtgtttggcccgtggtgtagatgagctgactccatgaagtggtggagtggcagaccgcgagcccttcaggattaaagggacctgagtaactggtggtgtgtagcagggtgtgcgttctgactgtctgtcctagtcgggtaacctgtttactttgtgctaacagtgccggagctttgtcagctcacctttgacctgctggaatttatcctgatctgtcgttgccatcacctccagggggcgctattggatggcagctggttcaggccctccgtgggtggctgcagagtgtgccggcacagcccacgcagctggttagctccactcttacttggttttctaaggggctttgcccaaagaagtcttgagggatagggccctcgatcttgcatacttgtgaggtgccacctcagtagctcatactacctcaccctgctcaggtgagctctgggagtccctggcctcagccctggcactgcccctggtgggattcagcaacaccccgggctgtttcacaagcaagtggttttcattaactcacaaagcctttttggacattaatatttatttatttttgtttttgtatacacattacccagcatctcttttgtataagagactttaggaaaatgagtttctccccagcaagtagccatattccagagaacagccttgaccagagatgtggagaaccaggggtataactaagggaagacatgtcaagcccttaagcaaattcttcttctccagattgtctctagcataataaacccagggaacactttaggccatgggtgtatgttctataaagttcgggacagttaaattccaggcctttcatcccccttccttcctgtgatggagtagattggggacagggttgaggggaacaagtgacatgaatgacctatttgcacagtttggaagcctcctgtctttatttatattgagatgtcagacaaaccaaagctccatccttgttggacctgctgcttgtccccagccctgaactgataaagcctcagagttggagtgcctggctctctggtggggtgaccattagatgaagggacttgtacagtggccagtttaaaggtccacctttgaccatctaaacccaccttgttcagtgtcctctgaggacatcctcatcaggaaagcagtgttgagactcttcattgctgactggcttctccctttcttactcacactgaccattagaatttaagaaggaaatgtgtaacagactacagtcaagtgtctgctacattttcaagcatgagcaatccctcccagactgttggtgaggactgatttttgaaatgctggtgtgagagaggtggtaattacaggaaccagccgagtggctgagagcagataaatgtgctggagaaacctttttccttaacagagggcatcatggatgctgggtggtctgtgtacttaacctgaaactgtgaagttttccctttttgccagtaaaccaaaaagcagatccttgaaacttggcccttgaaacacgaaacagaaaactgcatcccctgatcccccgggggctgatcagattgatcagggtggctcagttggtcccagtcagatacgtcataggatcagtagctcatgagatttgttgaccaaaccctctccctgttggtgacccctgtattcacacctgaacttcccgtttccccccaccccaccaaagtcatgtctgcttcctctgcctccagctcaccctcttctgaatggttttgcttgaaacactatattgtggcagagggcaccctgggatacctggtagaaggtattcattttattttgcatttttaattgttttgactttctgttcatttgattttgttgctccctctctcctggaacctagtttactactctcttctgtgttactctgaagttctgtttaagccttgaacatcctcttctcccattttcttggtatgtactcaggaccagctacatcatttgtggagccctcttattcataaattattaaaaatttcaaggtggtggtcatagagcattaaaccaaatatgaggccattcccaacttgttttccgaggggaaaatggtaatacttgtgtggcacccggggttaaacagcagaggctccatgtggccagaggcagagattagtatcctggcactccagtgacccactgggtgactcactgatgccacagcacccgctaggaagctctgctgaaccttagtatttggtcctaaattttatgactccatggagttcccgtagtccatggctagttaggaagaaaggaggtgggataagggtcaggcccaggtgacccctaagaaccaggagatgggtaaaagtttttttttatattctgcttttctgatctgtgagtacctgtttgtctccaggccaaacctttgggcttaaatatctttttcctagacaggtttttgctagtgttgaattttcttcttcctctggcctccttctgtgcccctttccccaagcccaagactgcttaacttccaaagcaaattctagatagacactgtatttattggtatgggagtgggctctatggggtggtctgcacccatctgggactcttttccctaaatcctgcaccaaatgagtcaggaggcagggtgcacagcattagtttcaatgtggttatgcatcataagcttaacatcagaatgaaaatgaaactcgattttgatgtttctttaaaacccttcccctgtccaatccactcgccgcccccaccttgaatagctaaagtctcttatgaaacagagaagagttgttgacgtctaactccttccattaaattaataagtactgacctcctaatatttaagtgtttactatctattgctgtaaagttttgtatattttgtaaacttttttccccaaatagtagatgtctaaaatcattgtacatctgattcttttatattccattgttcagcacaaagtgtggtttttatttagaataaaaaaagaaatttgaaatg

SEQ ID NO: 1084 - protein, 712 aa, Homo sapiens
MGMRIKLQSTNHPNNLLKELNKCRLSETMCDVTIVVGSRSFPAHKAVLACAAGYFQNLFLNTGLDAARTYVVDFITPANFEKVLSFVYTSELFTDLINVGVIYEVAERLGMEDLLQACHSTFPDLESTARAKPLTSTSESHSGTLSCPSAEPAHPLGELRGGGDYLGADRNYVLPSDAGGSYKEEEKNVASDANHSLHLPQPPPPPPKTEDHDTPAPFTSIPSMMTQPLLGTVSTGIQTSTSSCQPYKVQSNGDFSKNSFLTPDNAVDITTGTNSCLSNSEHSKDPGFGQMDELQLEDLGDDDLQFEDPAEDIGTTEEVIELSDDSEDELAFGENDNRENKAMPCQVCKKVLEPNIQLIRQHARDHVDLLTGNCKVCETHFQDRNSRVTHVLSHIGIFLFSCDMCETKFFTQWQLTLHRRDGIFENNIIVHPNDPLPGKLGLFSGAASPELKCAACGKVLAKDFHVVRGHILDHLNLKGQACSVCDQRHLNLCSLMWHTLSHLGISVFSCSVCANSFVDWHLLEKHMAVHQSLEDALFHCRLCSQSFKSEAAYRYHVSQHKCNSGLDARPGFGLQHPALQKRKLPAEEFLGEELALQGQPGNSKYSCKVCGKRFAHTSEFNYHRRIHTGEKPYQCKVCHKFFRGRSTIKCHLKTHSGALMYRCTVCGHYSSTLNLMSKHVGVHKGSLPPDFTIEQTFMYIIHSKEADKNPDS

SEQ ID NO: 1085 - DNA, 949 bp, Homo sapiens
ctgagtgactgcagccttcctagatcccctccactcggtttctctctttgcaggagcaccggcagcaccagtgtgtgaggggagcaggcagcggtcctagccagttccttgatcctgccagaccacccagcccccggcacagagctgctccacaggcaccatgaggatcatgctgctattcacagccatcctggccttcagcctagctcagagctttggggctgtctgtaaggagccacaggaggaggtggttcctggcgggggccgcagcaagagggatccagatctctaccagctgctccagagactcttcaaaagccactcatctctggagggattgctcaaagccctgagccaggctagcacagatcctaaggaatcaacatctcccgagaaacgtgacatgcatgacttctttgtgggacttatgggcaagaggagcgtccagccagagggaaagacaggacctttcttaccttcagtgagggttcctcggccccttcatcccaatcagcttggatccacaggaaagtcttccctgggaacagaggagcagagacctttataagactctcctacggatgtgaatcaagagaacgtccccagctttggcatcctcaagtatcccccgagagcagaataggtactccacttccggactcctggactgcattaggaagacctctttccctgtcccaatccccaggtgcgcacgctcctgttaccctttctcttccctgttcttgtaacattcttgtgctttgactccttctccatcttttctacctgaccctggtgtggaaactgcatagtgaatatccccaaccccaatgggcattgactgtagaataccctagagttcctgtagtgtcctacattaaaaatataatgtctctctctattcctcaacaataaaggatttttgcatatgaaaaaaaaaaaaaaaaaa

SEQ ID NO: 1086 - protein, 135 aa, Homo sapiens
MRIMLLFTAILAFSLAQSFGAVCKEPQEEVVPGGGRSKRDPDLYQLLQRLFKSHSSLEGLLKALSQASTDPKESTSPEKRDMHDFFVGLMGKRSVQPEGKTGPFLPSVRVPRPLHPNQLGSTGKSSLGTEEQRPL

SEQ ID NO: 1087 - DNA, 832 bp, Homo sapiens
ctgagtgactgcagccttcctagatcccctccactcggtttctctctttgcaggagcaccggcagcaccagtgtgtgaggggagcaggcagcggtcctagccagttccttgatcctgccagaccacccagcccccggcacagagctgctccacaggcaccatgaggatcatgctgctattcacagccatcctggccttcagcctagctcagagctttggggctgtctgtaaggagccacaggaggaggtggttcctggcgggggccgcagcaagagggatccagatctctaccagctgctccagagactcttcaaaagccactcatctctggagggattgctcaaagccctgagccaggctagcacagatcctaaggaatcaacatctcccgagaaacgtgacatgcatgacttctttgtgggacttatgggcaagaggagcgtccagccagactctcctacggatgtgaatcaagagaacgtccccagctttggcatcctcaagtatcccccgagagcagaataggtactccacttccggactcctggactgcattaggaagacctctttccctgtcccaatccccaggtgcgcacgctcctgttaccctttctcttccctgttcttgtaacattcttgtgctttgactccttctccatcttttctacctgaccctggtgtggaaactgcatagtgaatatccccaaccccaatgggcattgactgtagaataccctagagttcctgtagtgtcctacattaaaaatataatgtctctctctattcctcaacaataaaggatttttgcatatgaaaaaaaaaaaaaaaaaa

SEQ ID NO: 1088 - protein, 121 aa, Homo sapiens
MRIMLLFTAILAFSLAQSFGAVCKEPQEEVVPGGGRSKRDPDLYQLLQRLFKSHSSLEGLLKALSQASTDPKESTSPEKRDMHDFFVGLMGKRSVQPDSPTDVNQENVPSFGILKYPPRAE

SEQ ID NO: 1089 - DNA, 3624 bp, Homo sapiens
cagggagcctgggctggaagaggcagcaaaagggaaaatcagaagagtggacactggcaagaggagggcagcctttttcccagcttccttgcaccatggacagctcccattaagccacctctccatcctggggccaggactcttatgccccattcctgtcaaattgagatttcatccaccattctccaaggacagtgaagttataccctagttccagtgttgggatcagtggcccctctggacatgcctctcctggaaggttctgtgggggtggaggatcttgtcctcctggaacccttggtggaggagtcactgctcaagaatcttcagcttcgctatgaaaacaaggagatttatacctacattgggaatgtggtgatctcagtgaatccctatcaacagcttcccatctatgggccagagttcattgccaaatatcaagactatactttctatgagctgaagccccatatctacgcattggcaaatgtggcgtaccagtcactgagggacagggaccgagaccagtgtatcctcatcacaggcgagagtggatcagggaagactgaggccagcaagctggtgatgtcttatgtggctgccgtctgtgggaaaggagagcaggtgaactctgtgaaggagcagctgctacagtctaacccagtgctggaggcttttggcaatgccaagaccattcgcaacaacaattcctcccgatttggaaaatacatggatattgaatttgacttcaagggatcccccctcggtggtgtcatcacaaactatctgcttgagaaatcccgattagtgaagcagctcaaaggagaaaggaacttccacatcttctatcagctgctggctggagcagatgaacagctgctgaaggccctgaagcttgagcgggatacaactggctatgcctatctgaatcatgaagtatccagagtggatggcatggacgacgcctccagcttcagggctgtacagagtgcaatggcagtgattgggttctcggaggaggagattcgacaagtgctagaggtgacatccatggtgctaaagctggggaacgtgttggtggctgatgagttccaggccagtgggataccagcaagtggcatccgtgatgggagaggtgttcgggagattggggagatggtgggcttgaattcagaagaagtagagagagctttgtgctcgaggaccatggaaacagccaaggaaaaggtggtcactgcactgaatgttatgcaggctcagtatgctcgggacgccctggctaagaacatctacagccgcctctttgactggatagtgaatcgaatcaatgagagcatcaaggtgggcatcggggaaaagaagaaggtaatgggagtccttgatatctacggttttgagatattagaggataatagctttgagcaatttgtgatcaactactgcaatgagaagctgcagcaggtgttcatagagatgaccctgaaagaagagcaagaggaatataagagagaaggcataccgtggacaaaggtggactactttgataatggcatcatttgtaagctcattgagcataatcagcgaggtatcctggccatgttggatgaggagtgcctgcggcctggggtggtcagtgactccactttcctagcaaagctgaaccagctcttctccaagcatggccactacgagagcaaagtcacccagaatgcccagcgtcagtatgaccacaccatgggcctcagctgcttccgcatctgccactatgcgggcaaggtgacatacaacgtgaccagctttattgacaagaataatgacctactcttccgagacctgttgcaggccatgtggaaggcccagcaccccctccttcggtccttgtttcctgagggcaatcctaagcaggcatctctcaaacgccccccgactgctggggcccagttcaagagttctgtggccatcctcatgaagaatctgtattccaagagccccaactacatcaggtgcataaagcccaatgagcatcagcagcgaggtcagttctcttcagacctggtggcaacccaggctcggtacctgggactgctggagaacgtacgggtgcgacgggcaggctatgcccaccgccagggttatgggcccttcctggaaaggtaccgattgctgagccggagcacctggcctcactggaatgggggagaccgggaaggtgttgagaaggtcctgggggagctgagcatgtcctcgggggagctggcctttggcaagacaaagatcttcattagaagccccaagactcttttctacctcgaagaacagaggcgcctgagactccagcagctggccacactcatacagaagatttaccgaggctggcgctgccgcacccactaccaactgatgcgaaagagtcagatcctcatctcctcttggtttcggggaaacatgcaaaagaaatgctatgggaagataaaggcatccgtgttattgatccaggcttttgtgagagggtggaaggcccgaaagaattatcgcaaatatttccggtcagaggctgccctcaccttggcagatttcatctacaagagcatggtacagaaattcctactggggctgaagaacaatttgccatccacaaacgtcttagacaagacatggccagccgccccctacaagtgcctcagcacagcaaatcaggagctgcagcagctcttctaccagtggaagtgcaagaggttccgggatcagctgtccccgaagcaggtagagatcctgagggaaaagctctgtgccagtgaactgttcaagggcaagaaggcttcatatccccagagtgtccccattccattctgtggtgactacattgggctgcaagggaaccccaagctgcagaagctgaaaggcggggaggaggggcctgttctgatggcagaggccgtgaagaaggtcaatcgtggcaatggcaagacttcttctcggattctcctcctgaccaagggccatgtgattctcacagacaccaagaagtcccaggccaaaattgtcattgggctagacaatgtggctggggtgtcagtcaccagcctcaaggatgggctctttagcttgcatctgagtgagatgtcatcggtgggctccaagggggacttcctgctggtcagcgagcatgtgattgaactgctgaccaaaatgtaccgggctgtgctggatgccacgcagaggcagcttacagtcaccgtgactgagaagttctcagtgaggttcaaggagaacagtgtggctgtcaaggtcgtccagggccctgcaggtggtgacaacagcaagctacgctacaaaaaaaaggggagtcattgcttggaggtgactgtgcagtgaggagggggcaccatgcagagatggcagttgcttcctcctgaaccagcactaatccccctctgccctcctgtgtgggaggatctctaacccctctgatcgtggcgcatggcttggggattaaactacccttgaagaggacccttgtcccaaacccttcttgttctctcctccaaaagtagcttcctccaacccgcagcctctctgcacactaataaaacatgtggcttggaaaggttcaaaaaaaaaaaa

SEQ ID NO: 1090 - protein, 1043 aa, Homo sapiens
MPLLEGSVGVEDLVLLEPLVEESLLKNLQLRYENKEIYTYIGNVVISVNPYQQLPIYGPEFIAKYQDYTFYELKPHIYALANVAYQSLRDRDRDQCILITGESGSGKTEASKLVMSYVAAVCGKGEQVNSVKEQLLQSNPVLEAFGNAKTIRNNNSSRFGKYMDIEFDFKGSPLGGVITNYLLEKSRLVKQLKGERNFHIFYQLLAGADEQLLKALKLERDTTGYAYLNHEVSRVDGMDDASSFRAVQSAMAVIGFSEEEIRQVLEVTSMVLKLGNVLVADEFQASGIPASGIRDGRGVREIGEMVGLNSEEVERALCSRTMETAKEKVVTALNVMQAQYARDALAKNIYSRLFDWIVNRINESIKVGIGEKKKVMGVLDIYGFEILEDNSFEQFVINYCNEKLQQVFIEMTLKEEQEEYKREGIPWTKVDYFDNGIICKLIEHNQRGILAMLDEECLRPGVVSDSTFLAKLNQLFSKHGHYESKVTQNAQRQYDHTMGLSCFRICHYAGKVTYNVTSFIDKNNDLLFRDLLQAMWKAQHPLLRSLFPEGNPKQASLKRPPTAGAQFKSSVAILMKNLYSKSPNYIRCIKPNEHQQRGQFSSDLVATQARYLGLLENVRVRRAGYAHRQGYGPFLERYRLLSRSTWPHWNGGDREGVEKVLGELSMSSGELAFGKTKIFIRSPKTLFYLEEQRRLRLQQLATLIQKIYRGWRCRTHYQLMRKSQILISSWFRGNMQKKCYGKIKASVLLIQAFVRGWKARKNYRKYFRSEAALTLADFIYKSMVQKFLLGLKNNLPSTNVLDKTWPAAPYKCLSTANQELQQLFYQWKCKRFRDQLSPKQVEILREKLCASELFKGKKASYPQSVPIPFCGDYIGLQGNPKLQKLKGGEEGPVLMAEAVKKVNRGNGKTSSRILLLTKGHVILTDTKKSQAKIVIGLDNVAGVSVTSLKDGLFSLHLSEMSSVGSKGDFLLVSEHVIELLTKMYRAVLDATQRQLTVTVTEKFSVRFKENSVAVKVVQGPAGGDNSKLRYKKKGSHCLEVTVQ

SEQ ID NO: 1091 - DNA, 5388 bp, Homo sapiens
agatggcttgaggcaaccatggcgggaggaatgaaagtggcggtctcgccggcagttggtcccgggccctggggctcgggagtcgggggcggtgggacagtgcggctactcttgatcctctccggctgcttggtctacggcacagctgaaactgatgtaaatgtggtcatgcttcaggaatcccaagtttgtgaaaagcgtgccagccaacaattctgttacacaaatgtgcttatcccaaaatggcatgatatatggacacggatacagatccgagtaaatagttccagattggttcgagtcacccaggtggagaatgaggagaaactgaaggagctagagcaaagtcaaattttctactactctactgggatgactgtgggaattgtggcctctctgctaatcatcatttttatactatctaagtttatgcctaagaaaagtcccatttacgtcatcctggtgggaggctggtctttttctctgtacctcattcaactagtttttaaaaatttacaagagatctggaggtgttactggcagtatcttttaagttatgtcctcacagttggattcatgagttttgcagtatgttacaagtatgggcccttggagaatgaacgaagtatcaacctgctgacctggaccttgcagctgatgggcctgtgtttcatgtattctggcatccagataccacatattgcccttgccattatcatcattgctctttgtactaagaacctggaacaccctattcagtggctgtacatcacctgcagaaaggtgtgtaagggagcagaaaagcctgttccccctcgtctcctgacagaagaagaatatcggatacaaggagaggtagaaacccgaaaggctttagaggagctccgagaattttgtaacagtccagactgctctgcttggaagactgtttctcgaatccagtctccaaaaagatttgctgactttgtggaaggctcttcccacctcacgccaaatgaagtttctgtccatgagcaggagtatggattagggagcattattgcccaggatgaaatctatgaggaagcatcctctgaggaggaggactcatattctcggtgtcctgctatcacacagaacaaccttctaacctaggtagtggtcagttatctttacgtggactggcttggtgccttggtccatgttgcatgtgttgtgcaattgctttcaaccctttgaaacagagtgagatagatagggtagaaattctcctactgaaataagaggcctaaaaaggcctccctttggaaatgggaggtctctatgggatccctgaggaaggagagtggataaagtagtgaatgctgggtagttcacttcccattggttaagctaacagcccacttttatgtttccagagaaattggatggccacagctagcatggcattctagctccttcttgaaagttgattcaatcatggcatttctgtcactggctggctctccaaagtaagaactgttgttaagtgcaggaatgcttttagactataggctgcaacttccagagagaaatccacaaatctgagcctccttcactccagcttttatttcagtgactttagaataattattgatttaactgttttgggaggaaaatagatttttattgttttgttttttaaatgaatgtcttttaaaaaacataacaaactcatgttccagaaccagcaagtgctccagagtgacacaccccctaggcccctacatatttattaatatggattatccattaaagccccaggagctgttgttttaagctttgatttagttctcatacatatgatagaaagtcctatttgcctttaggaacatgcctgtaggctcttctgcaggtgagatgtactgggctttttattatattcaactttcaattccatcttaaaaaacatttgtattcttctcttcccattcttccttaccctgcctttgccctttcaggaagggtcagttcccttacctgtgaactatgtatgttcagagtagcattattcctgctagctaggagaagtcatcttgtttaggggatttggatgctttttatacgttctccattttcctgtcattgggtcatgttatctttgagttgctatgaaatcaggaaactgtctccttttcctttcccttcctttgtctacatgctctgtccattcctttcagccttttctcaccgcccatactcccccaaatctgggtaatttttaagccttgaaactatgtagtttcttgatacacaatttgtagttatgcagcagccacaatttgcattgccaggaaataggctccaggttatcttcatgcctctgggtgctcattcagctgtcaagtttccatgaacttacacttatttatgattgcgtttctgacctgagatgtatgctgcctgttattgcagtagcattagtttcagattcttttgccattgcaaagtaccccttataaaccagcaatgtcatctgtgaggaagcaaattctcaagtgtctgtcatttacttggttctttttctttgtggtcttcacccttataccctggaaaagtctgtaattaccttagccaggaagatagatggtcatggcaagcgcacagcaccagacttactggctcaccaagatgatggaaaaaggcagatgattttttaaaaagccgtaatgactcctttagaccagccatttagcgtggtaattttgaaaggcctagctccattgcagacttccaaagggtcagctctgagactgccctccaggtgggcagttgattatttccaccagtgttttccagagccttaaactgtcctaagtgacaactacctcagttggcaggaaagagacatatagtagaaagtgaaaaatgagcagtatttgggcagatgctatgggttacagttgaagggtaaaaggaactttacattgggaaacctttatacccttgtgaattatgtacatggtaaaatgttctctctctacaaagaactattaaaacttctgaaatatactattttttaccttatttatagaaattgagacctagcatatttaagcataagtttattttaaaaaataattcaactcgtgcaagtggtctcaggattctctggagattttggtgcctcccctacttagggaggtgatagcttgcctataagggtgacttttcctgatcatgtctttatttcaatgagaaagcactgtgaaattgtgaaagattctcctctttctctgtttaataaacccccatgaaatatagtttccatctctagaccagttttttttccaccgtgtttagacttgaggtgaataaaatcaaactgttttttactccctatctggtagttggagacctgagctgtaggcagtggagatggcaattggttctgcagcctgagagttgctctcacacagtgaaggacggtgctgctctggtgtgctgtgtgtccttgccctgcctgcctgtggctctgcccagatgcttcagatcctctgtgttccggagattgcttgacttcaaccttctttaggagctgctcttgtctccctcttggccacttagtttgctggctcagtcactacttgaagaccccatttaatttttctctggcagttatagctcttgtgatttcagtacagtctcatctctcagaccaatctcatcaagaaggattgaagggataactatgaggtaagctggacattggagccgtgtttgctgccacgtcagcgtcttgctgggtgaatgtcaagccataaatgggctccagggctctggatctcatcagcattggaaatctattgcctctcatcagtctgaccaaattatgtagagcattaatgtagagactcccattaatgggaatacaagaggcagctggcataaaacatttctttcactttcctttcccactcagattgcttcaagagaccaacagaacacagggatcaaaaacaaggaaaatttagcaacttcattaccttctaataagtaattcctgttagccactgcatcccaccaaaactagtttatttttcccctcaaattcatgatttttacgtctgttacaaagggaattttgctgatagctctttgggtcccactgttccattttatgctaatagattccattctagggcccagccgtctcttgactgatggtgttccctttaacccttggcatgtataatagaattttggtgaatgaaagaacccaaataggccagatagtccccccaggccctgatatccataaaaggcttgggaatgcattatgtaattgtccttagtctttttgttgttttagaaaaaaaaaacaagatgggctcagatggatgcctacgtaaaaatggttcctagctgtgtactcataacttttctttgaattgagtagtgaaaggaaggaggaggaaaggaaattaaatgtccttctagtattctctggactcaagtctgacatatgagataataacctatattgaaatgccaagaattgtatctgaaacaagagaacagtttgacacatttatcatgccttcatattacatattaactgaaaccaattaataaacatatgaaatatccattgcacaaggcaaaggcacctaaaccttttgtttctttttctacatagcagaaattgattttttttttatttttttaggggaacctatataattatgacccagtgatgtcttttggtgacttaagcttatgaattcaggttacaattgagttgattctagatggttactaccttgaaaaggatgttggtgccttatgtgacacgagccagagcctgctgggaataaacaaagcagattcatgccaacaccaactcgtagctttagtggcagatgggagtggtcacagactcccaaaatgtggggctttggatttccacaccatcccacgtgtgtgtcatcttcctctttcacactcttgatgataatttgaaaatgatgaaatcacctctgaatttgcctatagcatgagcacattcttatgacaacataacaaatagctcataatgtgaatattagaaactgttacagcctgcagttaccataattttccatgtttgtggaattgatattgaaatagcagggctaaggaattactggcaagttttagcctgtgggtaataccttagggttatttaaatatttgtaattttatttaaatgttcatgaatgtttgaaaggaacaaaattatcagggatggctctttgccatgggtcttattttcaccctcttttctgtaagaaaaaagaacaatgtcttaatgtatttttaaagtttttggtatagtttctaattccaattttaataaaagttttatagataaaaaaaaaaaaaaaaaaa

SEQ ID NO: 1092 - protein, 371 aa, Homo sapiens
MAGGMKVAVSPAVGPGPWGSGVGGGGTVRLLLILSGCLVYGTAETDVNVVMLQESQVCEKRASQQFCYTNVLIPKWHDIWTRIQIRVNSSRLVRVTQVENEEKLKELEQSQIFYYSTGMTVGIVASLLIIIFILSKFMPKKSPIYVILVGGWSFSLYLIQLVFKNLQEIWRCYWQYLLSYVLTVGFMSFAVCYKYGPLENERSINLLTWTLQLMGLCFMYSGIQIPHIALAIIIIALCTKNLEHPIQWLYITCRKVCKGAEKPVPPRLLTEEEYRIQGEVETRKALEELREFCNSPDCSAWKTVSRIQSPKRFADFVEGSSHLTPNEVSVHEQEYGLGSIIAQDEIYEEASSEEEDSYSRCPAITQNNLLT

SEQ ID NO: 1093 - DNA, 2725 bp, Homo sapiens
ctctcccagtctctaagccgcggcgtctccgcggccgagaggccccagcgcccgcctccccggcccccgcccccacccccgcccccggctctgcccacgccctccgcccgccagcccggcagccagcgcagctccgggcctcgctccctgtgcgtcctgcgggggcggaggcgcggagaggcggcaagcgcagccggggagggtgggggggcagaggcacagacagaggcgcggaggctcggagagagaagacgtggagggagggacagagcctggacagcggtggacacggcatcgtgcgcggggaagagggcagcacgcagcaggcgccgagcgccgggcaccgagaagggcagcccgggtgatctccggccgtccatgcacagagcgccttcccccacagccgagcagccgccgggcggaggggacagcgcccgccggaccctgcagcccagactcaagcccagtgcccgagccatggcactgcctcggacgctgggggagctgcagctgtaccgggtcctgcagcgcgccaacctcctttcctactatgagaccttcatccagcagggaggggacgacgtgcagcagctgtgtgaggcgggtgaggaggagtttctggagatcatggcacttgtgggcatggccaccaagcccctccatgtccggcgcctgcagaaggcactgagagagtgggccaccaatccagggctcttcagtcaaccagtgcctgctgttcccgtctccagcatcccgctcttcaagatctctgagactgcgggtacccggaaagggagcatgagcaatgggcatggcagcccaggggaaaaggcaggcagtgcccgcagttttagccccaagagcccccttgaacttggagagaagctatcaccactgcctgggggacctggggcaggggacccccggatctggccaggccggagcactccagagtcggacgttggggcaggaggagaagaggaggctggctcgccccccttctccccccctgcagggggaggagtccctgaggggactggggctggggggctggcagcaggtgggactgggggtggtccagaccgactggagccagagatggtacgcatggtggtggaaagtgtggagaggatcttccggagcttcccaaggggggatgctggggaggtcacatccctgctaaagctgaataagaagctggcacggagcgttgggcacatctttgagatggatgataatgacagccagaaggaagaggagatccgcaaatacagcatcatctatggccgtttcgactctaagcggcgggagggcaagcagctcagcctgcacgagctcaccatcaacgaggctgctgcccagttctgcatgagggacaacacgctcttattacggagagtggagctcttctctttgtcccgccaagtagcccgagagagcacctacttgtcctccttgaagggctccaggcttcaccctgaagaactgggaggccctccactgaagaagctgaaacaagaggttggagaacagagtcaccctgaaatccagcagcctcccccaggccctgagtcctatgtacccccataccgccccagcctggaggaggacagcgccagcctgtctggggagagtctggatggacatttgcaggctgtggggtcatgtccaaggctgacgccgccccctgctgacctgcctctggcattgccagcccatgggctatggagccgacacatcctgcagcagacactgatggacgaggggctgcggctcgcccgcctcgtctcccacgaccgcgtgggccgcctcagcccctgtgtgcctgcgaagccacctctcgcagagttcgaggaagggctgctggacagatgtcctgccccaggaccccatcccgcgctggtggagggtcgcaggagcagcgtgaaagtggaggctgaggccagccggcagtgagggttggactggtgtcttcagacccaggacctcagacttctggctcacacagacccccacgctctccatccccggaatctagtcacaaccctggatccttcctctgcccttctcctgcctccccacctgctccatgggcataagactgtggggcttcaagcaataacaagcagaggcctggagagaggacacaaggagggtgcgtggtgccctcacccctgcccagagcgagggggcaaggactctgcctccagggcatctggggttttcccctccctcacacaacacactcccattctctttaggtttgcaccagtggtgtgagcagttggactcagtttggacaagggggaaagggggacttccctgggaaggtccagctaaaagtggcaacatttgcccccagaattgggggcctgggaacactggacctgctccttctcccctctccttccccgtttttgtgcttctggtttgtttctttaattaatttaacaagtgctgcagtttgccctcccattcccatctatcccccaagtcctttgcaatttcttccctgccctacataggggcggtgggtgtgggatcccttcactggccccctcgggaggcctgggttggactcagggtctcctccagctgggggctggaccgcagcacctatctgagcagttagagcgtctttcttttcagattgtgtacagtagattatttattttgttattttggaataaaatttattttatggcttaggaaaaaaaaaaaaaaa

SEQ ID NO: 1094 - protein, 525 aa, Homo sapiens
MHRAPSPTAEQPPGGGDSARRTLQPRLKPSARAMALPRTLGELQLYRVLQRANLLSYYETFIQQGGDDVQQLCEAGEEEFLEIMALVGMATKPLHVRRLQKALREWATNPGLFSQPVPAVPVSSIPLFKISETAGTRKGSMSNGHGSPGEKAGSARSFSPKSPLELGEKLSPLPGGPGAGDPRIWPGRSTPESDVGAGGEEEAGSPPFSPPAGGGVPEGTGAGGLAAGGTGGGPDRLEPEMVRMVVESVERIFRSFPRGDAGEVTSLLKLNKKLARSVGHIFEMDDNDSQKEEEIRKYSIIYGRFDSKRREGKQLSLHELTINEAAAQFCMRDNTLLLRRVELFSLSRQVARESTYLSSLKGSRLHPEELGGPPLKKLKQEVGEQSHPEIQQPPPGPESYVPPYRPSLEEDSASLSGESLDGHLQAVGSCPRLTPPPADLPLALPAHGLWSRHILQQTLMDEGLRLARLVSHDRVGRLSPCVPAKPPLAEFEEGLLDRCPAPGPHPALVEGRRSSVKVEAEASRQ

SEQ ID NO: 1095 - DNA, 3993 bp, Homo sapiens
ccggaaacagcgggctggggcagccactgcttacactgaagagggaggacgggagaggagtgtgtgtgtgtgtgtgtgtgtgtgtgtgtatgtatgtgtgtgctttatcttatttttctttttggtggtggtggtggaaggggggaggtgctagcagggccagccttgaactcgctggacagagctacagacctatggggcctggaagtgcccgctgagaaagggagaagacagcagaggggttgccgaggcaacctccaagtcccagatcatgtctctgtggggtctggtctccaagatgcccccagaaaaagtgcagcggctctatgtcgactttccccaacacctgcggcatcttctgggtgactggctggagagccagccctgggagttcctggtcggctccgacgccttctgctgcaacttggctagtgccctactttcagacactgtccagcaccttcaggcctcggtgggagagcagggggaggggagcaccatcttgcaacacatcagcacccttgagagcatatatcagagggaccccctgaagctggtggccactttcagacaaatacttcaaggagagaaaaaagctgttatggaacagttccgccacttgccaatgcctttccactggaagcaggaagaactcaagtttaagacaggcttgcggaggctgcagcaccgagtaggggagatccaccttctccgagaagccctgcagaagggggctgaggctggccaagtgtctctgcacagcttgatagaaactcctgctaatgggactgggccaagtgaggccctggccatgctactgcaggagaccactggagagctagaggcagccaaagccctagtgctgaagaggatccagatttggaaacggcagcagcagctggcagggaatggcgcaccgtttgaggagagcctggccccactccaggagaggtgtgaaagcctggtggacatttattcccagctacagcaggaggtaggggcggctggtggggagcttgagcccaagacccgggcatcgctgactggccggctggatgaagtcctgagaaccctcgtcaccagttgcttcctggtggagaagcagcccccccaggtactgaagactcagaccaagttccaggctggagttcgattcctgttgggcttgaggttcctgggggccccagccaagcctccgctggtcagggccgacatggtgacagagaagcaggcgcgggagctgagtgtgcctcagggtcctggggctggagcagaaagcactggagaaatcatcaacaacactgtgcccttggagaacagcattcctgggaactgctgctctgccctgttcaagaacctgcttctcaagaagatcaagcggtgtgagcggaagggcactgagtctgtcacagaggagaagtgcgctgtgctcttctctgccagcttcacacttggccccggcaaactccccatccagctccaggccctgtctctgcccctggtggtcatcgtccatggcaaccaagacaacaatgccaaagccactatcctgtgggacaatgccttctctgagatggaccgcgtgccctttgtggtggctgagcgggtgccctgggagaagatgtgtgaaactctgaacctgaagttcatggctgaggtggggaccaaccgggggctgctcccagagcacttcctcttcctggcccagaagatcttcaatgacaacagcctcagtatggaggccttccagcaccgttctgtgtcctggtcgcagttcaacaaggagatcctgctgggccgtggcttcaccttttggcagtggtttgatggtgtcctggacctcaccaaacgctgtctccggagctactggtctgaccggctgatcattggcttcatcagcaaacagtacgttactagccttcttctcaatgagcccgacggaacctttctcctccgcttcagcgactcagagattgggggcatcaccattgcccatgtcatccggggccaggatggctctccacagatagagaacatccagccattctctgccaaagacctgtccattcgctcactgggggaccgaatccgggatcttgctcagctcaaaaatctctatcccaagaagcccaaggatgaggctttccggagccactacaagcctgaacagatgggtaaggatggcaggggttatgtcccagctaccatcaagatgaccgtggaaagggaccaaccacttcctaccccagagctccagatgcctaccatggtgccttcttatgaccttggaatggcccctgattcctccatgagcatgcagcttggcccagatatggtgccccaggtgtacccaccacactctcactccatccccccgtatcaaggcctctccccagaagaatcagtcaacgtgttgtcagccttccaggagcctcacctgcagatgccccccagcctgggccagatgagcctgccctttgaccagcctcacccccagggcctgctgccgtgccagcctcaggagcatgctgtgtccagccctgaccccctgctctgctcagatgtgaccatggtggaagacagctgcctgagccagccagtgacagcgtttcctcagggcacttggattggtgaagacatattccctcctctgctgcctcccactgaacaggacctcactaagcttctcctggaggggcaaggggagtcggggggagggtccttgggggcacagcccctcctgcagccctcccactatgggcaatctgggatctcaatgtcccacatggacctaagggccaaccccagttggtgatcccagctggagggagaacccaaagagacagctcttctactacccccacagacctgctctggacacttgctcatgccctgccaagcagcagatggggagggtgccctcctatccccacctactcctgggtcaggaggaaaagactaacaggagaatgcacagtgggtggagccaatccactccttcctttctatcattcccctgcccacctccttccagcactgactggaagggaagttcaggctctgagacacgccccaacatgcctgcacctgcagcgcgcacacgcacgcacacacacatacagagctctctgagggtgatggggctgagcaggaggggggctgggtaagagcacaggttagggcatggaaggcttctccgcccattctgacccagggcctaggacggataggcaggaacatacagacacatttacactagaggccagggatagaggatattgggtctcagccctaggggaatgggaagcagctcaagggaccctgggtgggagcataggaggggtctggacatgtggttactagtacaggttttgccctgattaaaaaatctcccaaagccccaaattcctgttagccaggtggaggcttctgatacgtgtatgagactatgcaaaagtacaagggctgagattcttcgtgtatagctgtgtgaacgtgtatgtacctaggatatgttaaatgtatagctggcaccttagttgcatgaccacatagaacatgtgtctatctgcttttgcctacgtgacaacacaaatttgggagggtgagacactgcacagaagacagcagcaagtgtgctggcctctctgacatatgctaacccccaaatactctgaatttggagtctgactgtgcccaagtgggtccaagtggctgtgacatctacgtatggctccacacctccaatgctgcctgggagccagggtgagagtctgggtccaggcctggccatgtggccctccagtgtatgagagggccctgcctgctgcatcttttctgttgccccatccaccgccagcttcccttcactcccctatcccattctccctctcaaggcaggggtcatagatcctaagccataaaataaattttattccaaaataacaaaataaataatctactgtacacaatctgaaaaaaaaaaaaaaaaaa

SEQ ID NO: 1096 - protein, 847 aa, Homo sapiens
MSLWGLVSKMPPEKVQRLYVDFPQHLRHLLGDWLESQPWEFLVGSDAFCCNLASALLSDTVQHLQASVGEQGEGSTILQHISTLESIYQRDPLKLVATFRQILQGEKKAVMEQFRHLPMPFHWKQEELKFKTGLRRLQHRVGEIHLLREALQKGAEAGQVSLHSLIETPANGTGPSEALAMLLQETTGELEAAKALVLKRIQIWKRQQQLAGNGAPFEESLAPLQERCESLVDIYSQLQQEVGAAGGELEPKTRASLTGRLDEVLRTLVTSCFLVEKQPPQVLKTQTKFQAGVRFLLGLRFLGAPAKPPLVRADMVTEKQARELSVPQGPGAGAESTGEIINNTVPLENSIPGNCCSALFKNLLLKKIKRCERKGTESVTEEKCAVLFSASFTLGPGKLPIQLQALSLPLVVIVHGNQDNNAKATILWDNAFSEMDRVPFVVAERVPWEKMCETLNLKFMAEVGTNRGLLPEHFLFLAQKIFNDNSLSMEAFQHRSVSWSQFNKEILLGRGFTFWQWFDGVLDLTKRCLRSYWSDRLIIGFISKQYVTSLLLNEPDGTFLLRFSDSEIGGITIAHVIRGQDGSPQIENIQPFSAKDLSIRSLGDRIRDLAQLKNLYPKKPKDEAFRSHYKPEQMGKDGRGYVPATIKMTVERDQPLPTPELQMPTMVPSYDLGMAPDSSMSMQLGPDMVPQVYPPHSHSIPPYQGLSPEESVNVLSAFQEPHLQMPPSLGQMSLPFDQPHPQGLLPCQPQEHAVSSPDPLLCSDVTMVEDSCLSQPVTAFPQGTWIGEDIFPPLLPPTEQDLTKLLLEGQGESGGGSLGAQPLLQPSHYGQSGISMSHMDLRANPSW

SEQ ID NO: 1097 - DNA, 3818 bp, Homo sapiens
atggaccgcttcctgggttttgtcaaggcgataagaagatctaggagaagaaaggggaaaaagtaccgaccagaagaggattaccacgagggctatgaggatgtctattattacgcttcagagcattttcgaaatgagagtccctacactaaatccgccagccagacaaagccgcctgatggagcgttggctgtgaggagacagagcatcccagaggaattcaagggctccacagtcgtcgagctgatgaagaaggaaggcactaccctgggtctgacggtatcgggaggaattgataaggatggcaagccaagagtatctaatctgcggcaaggaggaattgctgctagaagtgaccagctggatgtgggtgactacatcaaagcagtgaatggaatcaacctggccaaattccgccatgacgagatcatcagcttgctgaagaatgtgggagaaagagtggttcttgaagtagagtacgagcttccaccggtctctgtgcaaggatcaagtgttattttccgaacagtggaggtcacattacataaagaaggcaatacctttggttttgtaattcgagggggagcacatgatgatagaaataaatctcgtccagttgtgataacatgtgttcgtcctggagggcctgctgacagagagggcacgatcaaacccggtgacaggttgctcagtgtggatggaattcggcttcttggaactacgcatgctgaagccatgagtattcttaaacaatgtggacaagaagcagcactgctgatagaatatgatgtctcagtaatggactctgtggcaacagcatccgggccactactagtcgaagttgccaaaactcctggtgccagccttggggttgccctaactacctcgatgtgctgtaacaaacaagtcattgtcatagacaaaatcaaatctgcaagtattgcagacagatgtggcgcattgcatgtgggagatcacatcctctccatcgatggaaccagcatggagtactgtacacttgcagaagcaacccagttcctggccaacaccactgaccaggtcaagcttgagatccttccccatcatcagacccggctggccctaaaggggcccgaccatgtgaaaattcagaggagcgacaggcaacttacctgggattcctgggccagcaaccacagcagccttcacaccaaccatcactataacacgtaccaccctgaccattgcagagtaccagccctgacattcccgaaagcacctcctccaaacagccctcctttggtgtcttcatccttctctcctacctccatgagtgcatacagcctgagttccctgaacatggggactctacctcgaagcctctactccaccagcccacgtggaaccatgatgaggaggagactgaaaaagaaagacttcaaaagctcattgtccttagcctccagcacagtaggattggctgggcaggttgttcacacagaaaccacagaggttgtgctgacggcagatcctgtcacaggatttgggatccaactgcagggcagtgtgtttgccacagaaactctctcttctccacctctgatttcctatatcgaagctgacagcccagcagagagatgtggggtgctacagattggagacagagtgatggccatcaatggaattccaacagaagacagcaccttcgaagaagccagtcagctcctccgagactcttcaatcacgagcaaggtcacactggaaatcgagtttgatgttgcagagtctgtcatcccaagtagtggaacatttcatgtaaagctgcctaagaagcacaatgtggaacttggaataaccataagttcaccatccagtagaaaaccaggagaccccctcgtcatttcagatatcaagaaagggagtgtggcacacagaactgggaccctggaacttggggataaattgctcgcaatagataatatccggctggacaactgttccatggaagatgcagttcagatcctccagcaatgtgaagacctggtgaagctcaaaatccgcaaagatgaagataattcagatgagcaagaaagttccggagcaattatttacaccgtggagcttaaacgctacggggggccccttggcatcacaatttcaggaactgaagagccgtttgatcctataatcatttcaagcctcactaaagggggattagctgaaagaactggcgcaatccacataggagaccgaatcctagccatcaatagcagcagcttgaaagggaagcctctgagtgaagccatccatttgttacagatggcaggagagactgtcaccttgaaaattaagaaacagacagatgcatcgagccccaagaagttccctatttctagccatttgagtgacctgggggatgtggaggaggactcctcaccagcacagaagccaggcaagctctccgacatgtacccctccacggtgcccagtgtggacagtgctgtggattcatgggatgggtctgcaatagacaccagctatggaactcaaggcactagttttcaggcctcaggatacaatttcaacacctatgactggaggagtccaaaacagagaggcagcttgtccccagtcactaagcctcgaagccagacttacccagatgtggggctgagttatgaagactgggaccggtccacagccagtggttttgcaggggctgccgatagtgcagagacagaacaagaggagaacttctggtctcaagcgctggaggatttggaaacctgcggacagtcaggaattctgagagaactggaggcaacaatcatgtcggggagcacgatgagtttgaatcatgaggctccaacacctcgcagtcagctggggcgacaggccagcttccaggagcgcagcagctcgcggccgcactacagccaaacaactcggagcaacaccctgccttcagatgtgggtaggaagtcagtaaccctgagaaaaatgaaacaagaaataaaggagatcatgtctccaactcctgtggagctgcacaaggtgaccttgtacaaggactctgacatggaggactttgggttcagtgtagcagatggcttactggagaaaggagtgtatgtcaaaaatattcgcccagctgggccaggagatcttggtggcttaaagccctatgacaggctcttacaggtgaatcatgtccgaaccagagactttgactgctgccttgttgtgcccctcatagcagaatccgggaataagctggacctggttattagtagaaacccactggcttcacagaagtctatagaccaacagagtctaccaggagattggagtgaacagaacagtgcttttttccagcagcctagccacggtggtaatttggagacacgagaacccactaatacattatagcaacgctttttataaagcaggacaaaagacaatatctacatggtgctaaaaatcctttaagatttctgtgacctttgaagcacagataatcaatcaacgtggcattaactgcaagcacaggggtcttttaaatctctctcatggctcatgttcacttcccttttcaagttgaagaggtttcttttttggtgaccactatggtatatggtgggcaatgccctgccagtcccaacggtagagaaaaataggccgtcccccacaactctacaattaacatcagaggaaattttttacaagttcatcttactatcactttttaaaaagagaaacatctgtttgaaaatattctctgtgatgatttccttaattcactttgaaatcagtttcttactatgaagtcattaatgtaa

SEQ ID NO: 1098 - protein, 1135 aa, Homo sapiens
MDRFLGFVKAIRRSRRRKGKKYRPEEDYHEGYEDVYYYASEHFRNESPYTKSASQTKPPDGALAVRRQSIPEEFKGSTVVELMKKEGTTLGLTVSGGIDKDGKPRVSNLRQGGIAARSDQLDVGDYIKAVNGINLAKFRHDEIISLLKNVGERVVLEVEYELPPVSVQGSSVIFRTVEVTLHKEGNTFGFVIRGGAHDDRNKSRPVVITCVRPGGPADREGTIKPGDRLLSVDGIRLLGTTHAEAMSILKQCGQEAALLIEYDVSVMDSVATASGPLLVEVAKTPGASLGVALTTSMCCNKQVIVIDKIKSASIADRCGALHVGDHILSIDGTSMEYCTLAEATQFLANTTDQVKLEILPHHQTRLALKGPDHVKIQRSDRQLTWDSWASNHSSLHTNHHYNTYHPDHCRVPALTFPKAPPPNSPPLVSSSFSPTSMSAYSLSSLNMGTLPRSLYSTSPRGTMMRRRLKKKDFKSSLSLASSTVGLAGQVVHTETTEVVLTADPVTGFGIQLQGSVFATETLSSPPLISYIEADSPAERCGVLQIGDRVMAINGIPTEDSTFEEASQLLRDSSITSKVTLEIEFDVAESVIPSSGTFHVKLPKKHNVELGITISSPSSRKPGDPLVISDIKKGSVAHRTGTLELGDKLLAIDNIRLDNCSMEDAVQILQQCEDLVKLKIRKDEDNSDEQESSGAIIYTVELKRYGGPLGITISGTEEPFDPIIISSLTKGGLAERTGAIHIGDRILAINSSSLKGKPLSEAIHLLQMAGETVTLKIKKQTDASSPKKFPISSHLSDLGDVEEDSSPAQKPGKLSDMYPSTVPSVDSAVDSWDGSAIDTSYGTQGTSFQASGYNFNTYDWRSPKQRGSLSPVTKPRSQTYPDVGLSYEDWDRSTASGFAGAADSAETEQEENFWSQALEDLETCGQSGILRELEATIMSGSTMSLNHEAPTPRSQLGRQASFQERSSSRPHYSQTTRSNTLPSDVGRKSVTLRKMKQEIKEIMSPTPVELHKVTLYKDSDMEDFGFSVADGLLEKGVYVKNIRPAGPGDLGGLKPYDRLLQVNHVRTRDFDCCLVVPLIAESGNKLDLVISRNPLASQKSIDQQSLPGDWSEQNSAFFQQPSHGGNLETREPTNTL

SEQ ID NO: 1099 - DNA, 3989 bp, Homo sapiens
agtgcttagcgttagatttatggaatggctcctcacacagtgtcgtccctgctttgtacaatttggtgctttgttgctatcgaaacggcattactttctaagccattgtgattgtgaagggggaggaggctgtggcaggcaggggtggtagtagtagtgaatgacacagatttgccagatgacatgtagcggacctctgcatcagccaagaggaattaagctttgtcactccccactgggactacctttctcctggtatgtgcgcaaggaattcatatgctgctgctgctgcagccaccagagcagagagccttgagtacactttgccacagaaagcagtgagcaagaatgatagctgtctcttttaaatgccgttgtcaaattctgaggcgacttactaaagatgagagtccctacactaaatccgccagccagacaaagccgcctgatggagcgttggctgtgaggagacagagcatcccagaggaattcaagggctccacagtcgtcgagctgatgaagaaggaaggcactaccctgggtctgacggtatcgggaggaattgataaggatggcaagccaagagtatctaatctgcggcaaggaggaattgctgctagaagtgaccagctggatgtgggtgactacatcaaagcagtgaatggaatcaacctggccaaattccgccatgacgagatcatcagcttgctgaagaatgtgggagaaagagtggttcttgaagtagagtacgagcttccaccggtctctgtgcaaggatcaagtgttattttccgaacagtggaggtcacattacataaagaaggcaatacctttggttttgtaattcgagggggagcacatgatgatagaaataaatctcgtccagttgtgataacatgtgttcgtcctggagggcctgctgacagagagggcacgatcaaacccggtgacaggttgctcagtgtggatggaattcggcttcttggaactacgcatgctgaagccatgagtattcttaaacaatgtggacaagaagcagcactgctgatagaatatgatgtctcagtaatggactctgtggcaacagcatccgggccactactagtcgaagttgccaaaactcctggtgccagccttggggttgccctaactacctcgatgtgctgtaacaaacaagtcattgtcatagacaaaatcaaatctgcaagtattgcagacagatgtggcgcattgcatgtgggagatcacatcctctccatcgatggaaccagcatggagtactgtacacttgcagaagcaacccagttcctggccaacaccactgaccaggtcaagcttgagatccttccccatcatcagacccggctggccctaaaggggcccgaccatgcagctttggtgtcttcatccttctctcctacctccatgagtgcatacagcctgagttccctgaacatggggactctacctcgaagcctctactccaccagcccacgtggaaccatgatgaggaggagactgaaaaagaaagacttcaaaagctcattgtccttagcctccagcacagtaggattggctgggcaggttgttcacacagaaaccacagaggttgtgctgacggcagatcctgtcacaggatttgggatccaactgcagggcagtgtgtttgccacagaaactctctcttctccacctctgatttcctatatcgaagctgacagcccagcagagagatgtggggtgctacagattggagacagagtgatggccatcaatggaattccaacagaagacagcaccttcgaagaagccagtcagctcctccgagactcttcaatcacgagcaaggtcacactggaaatcgagtttgatgttgcagagtctgtcatcccaagtagtggaacatttcatgtaaagctgcctaagaagcacaatgtggaacttggaataaccataagttcaccatccagtagaaaaccaggagaccccctcgtcatttcagatatcaagaaagggagtgtggcacacagaactgggaccctggaacttggggataaattgctcgcaatagataatatccggctggacaactgttccatggaagatgcagttcagatcctccagcaatgtgaagacctggtgaagctcaaaatccgcaaagatgaagataattcagatgagcaagaaagttccggagcaattatttacaccgtggagcttaaacgctacggggggccccttggcatcacaatttcaggaactgaagagccgtttgatcctataatcatttcaagcctcactaaagggggattagctgaaagaactggcgcaatccacataggagaccgaatcctagccatcaatagcagcagcttgaaagggaagcctctgagtgaagccatccatttgttacagatggcaggagagactgtcaccttgaaaattaagaaacagacagatgcccagtcagcatcgagccccaagaagttccctatttctagccatttgagtgacctgggggatgtggaggaggactcctcaccagcacagaagccaggcaagctctccgacatgtacccctccacggtgcccagtgtggacagtgctgtggattcatgggatgggtctgcaatagacaccagctatggaactcaaggcactagttttcaggcctcaggatacaatttcaacacctatgactggaggagtccaaaacagagaggcagcttgtccccagtcactaagcctcgaagccagacttacccagatgtggggctgagttatgaagactgggaccggtccacagccagtggttttgcaggggctgccgatagtgcagagacagaacaagaggagaacttctggtctcaagcgctggaggatttggaaacctgcggacagtcaggaattctgagagaactggaggagaaagctgacaggcgtgtgtctttgagaaacatgactctcttggcaacaatcatgtcggggagcacgatgagtttgaatcatgaggctccaacacctcgcagtcagctggggcgacaggccagcttccaggagcgcagcagctcgcggccgcactacagccaaacaactcggagcaacaccctgccttcagatgtgggtaggaagtcagtaaccctgagaaaaatgaaacaagaaataaaggagatcatgtctccaactcctgtggagctgcacaaggtgaccttgtacaaggactctgacatggaggactttgggttcagtgtagcagatggcttactggagaaaggagtgtatgtcaaaaatattcgcccagctgggccaggagatcttggtggcttaaagccctatgacaggctcttacaggtgaatcatgtccgaaccagagactttgactgctgccttgttgtgcccctcatagcagaatccgggaataagctggacctggttattagtagaaacccactggcttcacagaagtctatagaccaacagagtctaccaggagattggagtgaacagaacagtgcttttttccagcagcctagccacggtggtaatttggagacacgagaacccactaatacattatagcaacgctttttataaagcaggacaaaagacaatatctacatggtgctaaaaatcctttaagatttctgtgacctttgaagcacagataatcaatcaacgtggcattaactgcaagcacaggggtcttttaaatctctctcatggctcatgttcacttcccttttcaagttgaagaggtttcttttttggtgaccactatggtatatggtgggcaatgccctgccagtcccaacggtagagaaaaataggccgtcccccacaactctacaattaacatcagaggaaattttttacaagttcatcttactatcactttttaaaaagagaaacatctgtttgaaaatattctctgtgatgatttccttaattcactttgaaatcagtttcttactatgaagtcattaatgtaa

SEQ ID NO: 1100 - protein, 1076 aa, Homo sapiens
MIAVSFKCRCQILRRLTKDESPYTKSASQTKPPDGALAVRRQSIPEEFKGSTVVELMKKEGTTLGLTVSGGIDKDGKPRVSNLRQGGIAARSDQLDVGDYIKAVNGINLAKFRHDEIISLLKNVGERVVLEVEYELPPVSVQGSSVIFRTVEVTLHKEGNTFGFVIRGGAHDDRNKSRPVVITCVRPGGPADREGTIKPGDRLLSVDGIRLLGTTHAEAMSILKQCGQEAALLIEYDVSVMDSVATASGPLLVEVAKTPGASLGVALTTSMCCNKQVIVIDKIKSASIADRCGALHVGDHILSIDGTSMEYCTLAEATQFLANTTDQVKLEILPHHQTRLALKGPDHAALVSSSFSPTSMSAYSLSSLNMGTLPRSLYSTSPRGTMMRRRLKKKDFKSSLSLASSTVGLAGQVVHTETTEVVLTADPVTGFGIQLQGSVFATETLSSPPLISYIEADSPAERCGVLQIGDRVMAINGIPTEDSTFEEASQLLRDSSITSKVTLEIEFDVAESVIPSSGTFHVKLPKKHNVELGITISSPSSRKPGDPLVISDIKKGSVAHRTGTLELGDKLLAIDNIRLDNCSMEDAVQILQQCEDLVKLKIRKDEDNSDEQESSGAIIYTVELKRYGGPLGITISGTEEPFDPIIISSLTKGGLAERTGAIHIGDRILAINSSSLKGKPLSEAIHLLQMAGETVTLKIKKQTDAQSASSPKKFPISSHLSDLGDVEEDSSPAQKPGKLSDMYPSTVPSVDSAVDSWDGSAIDTSYGTQGTSFQASGYNFNTYDWRSPKQRGSLSPVTKPRSQTYPDVGLSYEDWDRSTASGFAGAADSAETEQEENFWSQALEDLETCGQSGILRELEEKADRRVSLRNMTLLATIMSGSTMSLNHEAPTPRSQLGRQASFQERSSSRPHYSQTTRSNTLPSDVGRKSVTLRKMKQEIKEIMSPTPVELHKVTLYKDSDMEDFGFSVADGLLEKGVYVKNIRPAGPGDLGGLKPYDRLLQVNHVRTRDFDCCLVVPLIAESGNKLDLVISRNPLASQKSIDQQSLPGDWSEQNSAFFQQPSHGGNLETREPTNTL

SEQ ID NO: 1101 - DNA, 270 bp, Homo sapiens
atggactctctacgtgagtgtagaatgaatcaagccgactcaaacacagcagctattccacatgcagtggaagatattcaaggagacgacagatggatatctcagcacaacagatttgtcctggatggtaaagacaaaaagcctaacgttgtgtttgtgggagaccccatggtgcagttaatgcagcaacacgagatatggcgagagcttttttccccgtttcacgcactgaattttagaactgaggaagatacaagacatgttttatag

SEQ ID NO: 1102 - protein, 89 aa, Homo sapiens [sequence omitted]

SEQ ID NO: 1103 - DNA, 1116 bp, Homo sapiens
cagaattgtcaatttattaatgaaatatgacgtgtgttgaacaagacaagctgggtcaagcatttgaagatgcttttgaggttctgaggcaacattcaactggagatcttcagtactcgccagattacagaaattacctggctttaatcaaccatcgtcctcatgtcaaaggaaattccagctgctatggagtgttgcctacagaggagcctgtctataattggagaacggtaattaacagtgctgcggacttctattttgaaggaaatattcatcaatctctgcagaacataactgaaaaccagctggtacaacccactcttctccagcaaaaggggggaaaaggcaggaagaagctccgactgtttgaataccttcacgaatccctgtataatccggagatggcatcttgtattcagtgggtagataaaaccaaaggcatctttcagtttgtatcaaaaaacaaagaaaaacttgccgagctttgggggaaaagaaaaggcaacaggaagaccatgacttaccagaaaatggccagggcactcagaaattacggaagaagtggggaaattaccaaaatccggaggaagctgacttaccagttcagtgaggccattctccaaagactctctccatcctatttcctggggaaagagatcttctattcacagtgtgttcaacctgatcaagaatatctcagtttaaataactggaatgcaaattataattatacatatgccaattaccatgagctaaatcaccatgattgctaaatatactttcatatttcatggtttactggcatcggaaatctctacaagttttaatgatttctccctccctctctttttttcctcctctgaagaaatttaggatttttctcttaaagcaaatactaaagaggaaaaaaaattaactttattgttgcttttatcaaagagtatgtaatctatactaacttgttgggaaattctgccaatgaacaacttttttataataaaaaaaaaaaaaaaaaaaaaaaaaaaaaaaaaaaaaaaaaaaaaaaaaaaaaaaaaaaaaaaaaaaaaaaaaaaaaaaaaaaaaaaaaaaaaaaaaaaaaaaaaaaaaaaaaaaaaa

SEQ ID NO: 1104 - protein, 248 aa, Homo sapiens
MTCVEQDKLGQAFEDAFEVLRQHSTGDLQYSPDYRNYLALINHRPHVKGNSSCYGVLPTEEPVYNWRTVINSAADFYFEGNIHQSLQNITENQLVQPTLLQQKGGKGRKKLRLFEYLHESLYNPEMASCIQWVDKTKGIFQFVSKNKEKLAELWGKRKGNRKTMTYQKMARALRNYGRSGEITKIRRKLTYQFSEAILQRLSPSYFLGKEIFYSQCVQPDQEYLSLNNWNANYNYTYANYHELNHHDC

SEQ ID NO: 1105 - DNA, 8266 bp, Homo sapiens
gccatttttcctttctgaaggcaggtctcacctatctcctggttcgatctaggaaaaaggaaaggaagggatttaaaagtaaacagtgaaatgagaaagaattcactgggagtttatcaaactaagttaaaatagctaagtcagcctgacaggtgcttggcacagagaaggagcaaatatttcctcatgatgctacaacatttagtaattttttgtcttggattggttgtacaaaatttctgctccccagctgaaaccacagggcaggcaagaagatgtgataggaagtctcttcttacaattaggaccgagtgccgatcctgcgctctcaaccttggagtcaagtgcccggatggttacaccatgattaccagtggctctgtaggggttcgagattgcaggtacacctttgaggtcagaacatactctctgtctctccccggatgccgccatatttgtaggaaggactatctccaacctcggtgttgtcctggccgctggggcccagactgtatagagtgcccaggtggagcggggtcaccctgcaatggcagaggcagttgtgctgaaggcatggaaggaaatggaacctgctcctgccaagaagggtttggtggaacagcctgtgaaacctgtgctgacgacaacttatttggacccagctgttcatcagtgtgcaactgtgtgcatggggtgtgcaacagtggactagatggcgatggaacctgtgagtgctactctgcgtacactggccccaagtgtgacaagcccatccctgaatgtgcagccttgctctgcccagaaaattccagatgttcgccttccactgaagatgaaaacaaactggaatgcaaatgccttcccaattaccgaggcgatggcaaatactgcgaccccatcaatccatgtttacgaaaaatctgccaccctcatgctcattgtacgtacctgggaccaaatcggcacagttgtacatgccaagaaggctaccgtggggatggccaagtgtgcttgcctgtggacccctgccaaattaactttggaaactgccctacaaagtctacagtgtgcaaatatgatgggcctggacagtctcactgcgagtgtaaggagcattaccagaatttcgtacctggagtggggtgcagtatgactgatatatgtaaatcagataacccgtgtcataggaatgcaaattgcaccaccgtcgcaccaggccgaactgaatgcatttgccagaaaggttacgtgggtgatggcttaacgtgttatggaaacattatggagcgactcagagaattaaatactgaacccagaggaaaatggcaaggaaggctgacctctttcatctcactcctagacaaagcttatgcctggccactgagtaagctgggacccttcacggtgctgttacctacagacaagggactgaaaggattcaatgtaaatgagcttttggtggataataaagctgctcaatactttgtgaaactccacataattgctggtcagatgaacatcgaatatatgaataacacagacatgttctacaccttgactggaaagtcgggggaaatcttcaacagcgataaggacaatcaaataaagcttaaactccatggaggcaaaaagaaggtaaaaattatacaaggggacatcattgcttccaatgggcttctgcacatccttgacagagccatggacaagttagaacccacatttgagagcaacaatgagcaaaccataatgacaatgctacaaccaaggtacagcaagttcagatctttgttagaggaaaccaatttgggacatgccttagatgaggatggagttggtggaccatacaccatttttgttccaaataatgaagcattgaataacatgaaggacggcactctcgattacctcctttctccagagggatctcggaagcttctggaactcgtcagataccacattgtcccatttacccagcttgaagtggccactctcatctccacccctcacatcaggagcatggccaaccagctcatacagttcaacaccaccgacaatggacagattctggcaaatgatgtggcaatggaagaaattgagatcactgccaaaaatggccgaatttacacactgacaggagttctcattcctccctccattgtcccgattctgccccatcgatgtgatgaaacaaagagagagatgaaactgggcacttgtgtgagctgttctctggtgtactggagcagatgtcctgctaactctgagcccacagcactcttcacacacagatgtgtctacagtggcaggtttgggagcctgaagagcggctgtgcccggtactgcaatgccactgtgaagattccaaagtgctgcaaaggcttctatggacctgactgcaaccagtgtccaggaggcttctcaaatccatgctcaggaaatggacagtgtgcagatagcctcggcggcaacgggacatgcatttgtgaggagggcttccaaggctcccagtgtcagttctgctctgatcccaataaatacggacctcggtgtaacaaaaaatgcctgtgcgttcacggaacatgcaataacaggatagacagcgatggggcctgcctcactggcacatgcagagacggctctgccgggagactctgtgataagcagacctcagcctgtgggccctacgtgcagttctgtcacatccacgccacctgtgaatacagcaatgggacagccagttgtatttgcaaagcaggatatgaaggagatggaactctgtgttctgagatggacccttgcacaggactaactccaggaggctgtagccgcaatgcagaatgcatcaaaactggcacgggcacccacacctgcgtgtgtcagcagggttggacagggaatgggagagactgctcggagatcaacaactgcctgctgcccagtgcaggcggctgccacgacaacgcatcctgtttgtatgtgggtcccgggcagaatgagtgtgagtgcaagaaaggatttcgaggaaatgggattgactgtgaaccaataacttcatgcttggaacaaaccgggaaatgtcatccattggcaagctgtcaatctacttcgtctggtgtctggagctgtgtttgtcaagagggctatgaaggagatggctttctgtgctatggaaacgcagcagtggaattgtcatttctctccgaagcagctatatttaaccgatggataaataatgcttctctacaacccacactgtcagccacctcaaacctcactgtcctcgtgccttcccaacaagctactgaggacatggaccaggatgagaaaagcttctggttgtcacagagcaatattccagccctaataaagtaccatatgctactaggcacatacagagtggcagatctgcagaccctgtcttcttctgacatgttggcaacatctttgcagggcaacttccttcacttggcaaaggtggatgggaatatcacaattgaaggggcctccattgtcgatggggacaacgcagccacaaatggagtgatacacatcatcaacaaggtgctggtcccacaaagacgtctaactggctccttaccaaacctgctcatgcggctggaacagatgcctgactattccatcttccggggctacatcattcaatataatctggcgaatgcaattgaggctgccgatgcctacacagtgtttgctccaaacaacaatgccatcgagaattacatcagggagaagaaagtcttgtctctagaggaggacgtcctccggtatcatgtggtcctggaggagaaactcctgaagaatgacctgcacaatggcatgcatcgtgagaccatgctgggtttctcctatttccttagcttctttctccataatgaccagctctatgtaaatgaggctccaataaactacaccaatgtagccactgataagggagtgatccatggcttgggaaaagttctggaaattcagaagaacagatgtgataataatgacactactattatacgaggaagatgtaggacatgctcctcagagctgacctgcccattcggaactaaatctctaggtaatgagaagaggagatgcatctatacctcctatttcatgggaagacgaaccctgtttattgggtgccagccaaaatgtgtgagaaccgtcattacgagagaatgctgtgccggcttctttggcccccaatgccagccctgcccagggaatgcccagaatgtctgctttggtaatggcatctgtttggatggagtgaatggcacaggtgtgtgtgagtgtggggagggcttcagcggcacagcctgcgagacctgcaccgagggcaagtacggcatccactgtgaccaagcatgttcttgtgtccatgggagatgcaaccaaggacccttgggagatggctcctgtgactgtgatgttggctggcgaggagtgcattgtgacaatgcaaccacagaagacaactgcaatgggacatgccataccagcgccaactgcctcaccaactcagatggtacagcttcatgcaagtgtgcagcaggattccaaggaaacgggaccatctgcacagcaatcaatgcctgtgagatcagcaatggaggttgctctgccaaggctgactgtaagagaaccaccccaggaaggcgagtgtgcacgtgcaaagcaggctacacgggtgatggcattgtgtgcctggaaatcaacccgtgtttggagaaccatggtggctgtgacaagaatgcggagtgcacacagacaggacccaaccaggctgcctgtaactgtttgccagcatacactggagatggaaaggtctgcacactcatcaatgtctgcttaactaaaaatggcggctgtagtgaatttgccatctgcaaccacactgggcaagtagaaaggacttgtacttgcaagccaaactacattggagatggatttacctgccgcggcagcatttatcaggagcttcccaagaacccgaaaacttcccagtatttcttccagttgcaggagcatttcgtgaaagatctggtcggcccaggccccttcactgtttttgcacctttatctgcagcctttgatgaggaagctcgggttaaagactgggacaaatacggtttaatgccccaggttcttcggtaccatgtggtcgcctgccaccagctgcttctggaaaacctgaaattgatctcaaatgctacttccctccaaggagagccaatagtcatctccgtctctcagagcacggtgtatataaacaataaggctaagatcatatccagtgatatcatcagtactaatgggattgttcatatcatagacaaattgctatctcccaaaaatttgcttatcactcccaaagacaactctggaagaattctgcaaaatcttacgactttggcaacaaacaatggctacatcaaatttagcaacttaatacaggactcaggtttgctgagtgtcatcaccgatcccatccacaccccagtcactctcttctggcccaccgaccaagccctccatgccctacctgctgaacaacaggacttcctgttcaaccaagacaacaaggacaagctgaaggagtatttgaagtttcatgtgatacgagatgccaaggttttagctgtggatcttcccacatccactgcctggaagaccctgcaaggttcagagctgagtgtgaaatgtggagctggcagggacatcggtgacctctttctgaatggccaaacctgcagaattgtgcagcgggagctcttgtttgacctgggtgtggcctacggcattgactgtctgctgattgatcccaccctggggggccgctgtgacacctttactactttcgatgcctcgggggagtgtgggagctgtgtcaatactcccagctgcccaaggtggagtaaaccaaagggtgtgaagcagaagtgtctctacaacctgcccttcaagaggaacctggaaggctgccgggagcggtgcagcctggtgatacagatccccaggtgctgcaagggctacttcgggcgagactgtcaggcctgccctggaggaccagatgccccgtgtaataaccggggtgtctgccttgatcagtactcggccaccggagagtgtaaatgcaacaccggcttcaatgggacggcgtgtgagatgtgctggccggggagattcgggcctgattgtctgccctgtggctgctcagaccacggacagtgcgatgatggcatcacgggctccgggcagtgcctctgtgaaacggggtggacaggcccctcgtgtgacactcaggcagttttgcctgcagtgtgtacgcctccttgttctgctcatgccacctgtaaggagaacaacacgtgtgagtgtaacctggattatgaaggtgacggaatcacatgcacagttgtggatttctgcaaacaggacaacgggggctgtgcaaaggtggccagatgctcccagaagggcacgaaggtctcctgcagctgccagaagggatacaaaggggacgggcacagctgcacagagatagacccctgtgcagacggccttaacggagggtgtcacgagcacgccacctgtaagatgacaggcccgggcaagcacaagtgtgagtgtaaaagtcactatgtcggagatgggctgaactgtgagccggagcagctgcccattgaccgctgcttacaggacaatgggcagtgccatgcagacgccaaatgtgtcgacctccacttccaggataccactgttggggtgttccatctacgctccccactgggccagtataagctgacctttgacaaagccagagaggcctgtgccaacgaagctgcgaccatggcaacctacaaccagctctcctatgcccagaaggccaagtaccacctgtgctcagcaggctggctggagaccgggcgggttgcctaccccacagccttcgcctcccagaactgtggctctggtgtggttgggatagtggactatggacctagacccaacaagagtgaaatgtgggatgtcttctgctatcggatgaaagatgtgaactgcacctgcaaggtgggctatgtgggagatggcttctcatgcagtgggaacctgctgcaggtcctgatgtccttcccctcactcacaaacttcctgacggaagtgctggcctattccaacagctcagctcgaggccgtgcatttctagaacacctgactgacctgtccatccgcggcaccctctttgtgccacagaacagtgggctgggggagaatgagaccttgtctgggcgggacatcgagcaccacctcgccaatgtcagcatgtttttctacaatgaccttgtcaatggcaccaccctgcaaacgaggctgggaagcaagctgctcatcactgccagccaggacccactccaaccgacggagaccaggtttgttgatggaagagccattctgcagtgggacatctttgcctccaatgggatcattcatgtcatttccaggcctttaaaagcaccccctgcccccgtgaccttgacccacactggcttgggagcagggatcttctttgccatcatcctggtgactggggctgttgccttggctgcttactcctactttcggataaaccggagaacaatcggcttccagcattttgagtcggaagaggacattaatgttgcagctcttggcaagcagcagcctgagaatatctcgaaccccttgtatgagagcacaacctcagctcccccagaaccttcctacgaccccttcacggactctgaagaacggcagcttgagggcaatgaccccttgaggacactgtgagggcctggacgggagatgccagccatcactcactgccacctgggccatcaactgtgaattctcagcaccagttgccttttaggaacgtaaagtcctttaagcactcagaagccatacctcatctctctggctgatctgggggttgtttctgtgggtgagagatgtgttgctgtgcccacccagtacagcttcctcctctgaccctttggctcttcttcctttgtactcttcagctggcacctgctccattctgccctacatgatgggtaactgtgatctttcttccctgttagattgtaagcctccgtctttgtatcccagcccctagcccagtgcctgacacaggaactgtgcacaataaaggtttatggaacagaaacaaagtcaaaaaaaaaaaaaaaaaaaaaaaaaaaaaaaaaaaaaa

SEQ ID NO: 1106 - protein, 2551 aa, Homo sapiens
MMLQHLVIFCLGLVVQNFCSPAETTGQARRCDRKSLLTIRTECRSCALNLGVKCPDGYTMITSGSVGVRDCRYTFEVRTYSLSLPGCRHICRKDYLQPRCCPGRWGPDCIECPGGAGSPCNGRGSCAEGMEGNGTCSCQEGFGGTACETCADDNLFGPSCSSVCNCVHGVCNSGLDGDGTCECYSAYTGPKCDKPIPECAALLCPENSRCSPSTEDENKLECKCLPNYRGDGKYCDPINPCLRKICHPHAHCTYLGPNRHSCTCQEGYRGDGQVCLPVDPCQINFGNCPTKSTVCKYDGPGQSHCECKEHYQNFVPGVGCSMTDICKSDNPCHRNANCTTVAPGRTECICQKGYVGDGLTCYGNIMERLRELNTEPRGKWQGRLTSFISLLDKAYAWPLSKLGPFTVLLPTDKGLKGFNVNELLVDNKAAQYFVKLHIIAGQMNIEYMNNTDMFYTLTGKSGEIFNSDKDNQIKLKLHGGKKKVKIIQGDIIASNGLLHILDRAMDKLEPTFESNNEQTIMTMLQPRYSKFRSLLEETNLGHALDEDGVGGPYTIFVPNNEALNNMKDGTLDYLLSPEGSRKLLELVRYHIVPFTQLEVATLISTPHIRSMANQLIQFNTTDNGQILANDVAMEEIEITAKNGRIYTLTGVLIPPSIVPILPHRCDETKREMKLGTCVSCSLVYWSRCPANSEPTALFTHRCVYSGRFGSLKSGCARYCNATVKIPKCCKGFYGPDCNQCPGGFSNPCSGNGQCADSLGGNGTCICEEGFQGSQCQFCSDPNKYGPRCNKKCLCVHGTCNNRIDSDGACLTGTCRDGSAGRLCDKQTSACGPYVQFCHIHATCEYSNGTASCICKAGYEGDGTLCSEMDPCTGLTPGGCSRNAECIKTGTGTHTCVCQQGWTGNGRDCSEINNCLLPSAGGCHDNASCLYVGPGQNECECKKGFRGNGIDCEPITSCLEQTGKCHPLASCQSTSSGVWSCVCQEGYEGDGFLCYGNAAVELSFLSEAAIFNRWINNASLQPTLSATSNLTVLVPSQQATEDMDQDEKSFWLSQSNIPALIKYHMLLGTYRVADLQTLSSSDMLATSLQGNFLHLAKVDGNITIEGASIVDGDNAATNGVIHIINKVLVPQRRLTGSLPNLLMRLEQMPDYSIFRGYIIQYNLANAIEAADAYTVFAPNNNAIENYIREKKVLSLEEDVLRYHVVLEEKLLKNDLHNGMHRETMLGFSYFLSFFLHNDQLYVNEAPINYTNVATDKGVIHGLGKVLEIQKNRCDNNDTTIIRGRCRTCSSELTCPFGTKSLGNEKRRCIYTSYFMGRRTLFIGCQPKCVRTVITRECCAGFFGPQCQPCPGNAQNVCFGNGICLDGVNGTGVCECGEGFSGTACETCTEGKYGIHCDQACSCVHGRCNQGPLGDGSCDCDVGWRGVHCDNATTEDNCNGTCHTSANCLTNSDGTASCKCAAGFQGNGTICTAINACEISNGGCSAKADCKRTTPGRRVCTCKAGYTGDGIVCLEINPCLENHGGCDKNAECTQTGPNQAACNCLPAYTGDGKVCTLINVCLTKNGGCSEFAICNHTGQVERTCTCKPNYIGDGFTCRGSIYQELPKNPKTSQYFFQLQEHFVKDLVGPGPFTVFAPLSAAFDEEARVKDWDKYGLMPQVLRYHVVACHQLLLENLKLISNATSLQGEPIVISVSQSTVYINNKAKIISSDIISTNGIVHIIDKLLSPKNLLITPKDNSGRILQNLTTLATNNGYIKFSNLIQDSGLLSVITDPIHTPVTLFWPTDQALHALPAEQQDFLFNQDNKDKLKEYLKFHVIRDAKVLAVDLPTSTAWKTLQGSELSVKCGAGRDIGDLFLNGQTCRIVQRELLFDLGVAYGIDCLLIDPTLGGRCDTFTTFDASGECGSCVNTPSCPRWSKPKGVKQKCLYNLPFKRNLEGCRERCSLVIQIPRCCKGYFGRDCQACPGGPDAPCNNRGVCLDQYSATGECKCNTGFNGTACEMCWPGRFGPDCLPCGCSDHGQCDDGITGSGQCLCETGWTGPSCDTQAVLPAVCTPPCSAHATCKENNTCECNLDYEGDGITCTVVDFCKQDNGGCAKVARCSQKGTKVSCSCQKGYKGDGHSCTEIDPCADGLNGGCHEHATCKMTGPGKHKCECKSHYVGDGLNCEPEQLPIDRCLQDNGQCHADAKCVDLHFQDTTVGVFHLRSPLGQYKLTFDKAREACANEAATMATYNQLSYAQKAKYHLCSAGWLETGRVAYPTAFASQNCGSGVVGIVDYGPRPNKSEMWDVFCYRMKDVNCTCKVGYVGDGFSCSGNLLQVLMSFPSLTNFLTEVLAYSNSSARGRAFLEHLTDLSIRGTLFVPQNSGLGENETLSGRDIEHHLANVSMFFYNDLVNGTTLQTRLGSKLLITASQDPLQPTETRFVDGRAILQWDIFASNGIIHVISRPLKAPPAPVTLTHTGLGAGIFFAIILVTGAVALAAYSYFRINRRTIGFQHFESEEDINVAALGKQQPENISNPLYESTTSAPPEPSYDPFTDSEERQLEGNDPLRTL

SEQ ID NO: 1107 - DNA, 7578 bp, Homo sapiens
tacgggaaatgtttggtgcagcatccagaatggacaccactgctgtctgcaccgggggagtgacagagagtcgagggattgtggatagcctgcagaagttttcctcgctccctgcttacctccccacgaacttgcacatctccaatgcagaggagtcctttttccttaaagaagccaaccaagacctcacaaggaactccagtctgcaggcccgggtggagccattcttcatctaccgagccaggacaccccctattatcaatgccagctatggcccattttcagtggagaagataatcccccaggagctcctgttgacatctacagcctttggaaacatggacaaatttcccttcaactggaaattgaaatcccacatccttgacagctccatctactccaacagacccaaagtgcagaccttgttttatgtcactggcatgggctgggatgacagtgaccttacggaagatctaccctgtgtcaagatgtttgctttccctgaggccagggaagtggcagccagctgtcggctgcaaggggccccagggctgtgtgtggctgagctggagctgctgcccgagtggttcagctcaggcctggacctggaaccagaggaggagatcccagccctgctcgggggcaccacgatggagctcttcttcacgctctacccagctgacaaggctggccagtgtcctctggaggaggaaggcaagtgggagaacaatatccactcgggcctggagagcccccagcaagcgtttccagcccgagagaggattgggagtgtggtggtctacccaacccaagatgatctgaagtggtccctggtgagcttggacgagaatgtggtcatctcggtacctctgaatctagtccgggaaggggacacggccacctttttggtctctctgaccagtagctctgtggcagaccagttcactcttagaattaaggcggcagcaggtgtgaagataacggcagtgagagtcagcagtgaggaccaatgggcagtccaggaggaaattgataatggcagcactcagacgtcggccaccctcacctgcatgggccatcgcccggacacgcagagcagggtaaatggatccttctatgagatcttgcaagtggactttggaattgataatagcagtgacctggctggggcccagcagattacctggcaggtggagtacccgattgaggactccatgagtgagctggtcgtctccgagatcttcgtcagccagacaaccttcgtgggcatcgtccctcttgccatggacaccgaggttttgaacactgccattctcactggaaagcctgtttcagttcctgtcaaagtcgtgggggtccaggaggatggttctgtggtcgatgtgtctgagtctgtggaatgcaagtctgccgatgaagatgtcattaaggtttccaacaactgtgattccatttttgtgaatgggaaggaaatgaagagcaaagtggacacgattgtgaacttcacccaccagcacttcacctcccagttcgaggtcactgtctgggcacccaggctccccctgcagattgagatctcagacaccgagctgagccagatcaagggctggaggatcccggttgctgccaacagaaggcctacccgggaaagcgatgacgaggacgatgaggagaagaagggacgaggctgctccctgcagtaccagcacgccacagtgcgtgtcctcacccagtttgtggccgagtcacctgacttagggcagctgacctacatgctgggccccgactggcagtttgacatcactgaccttgtgaccgagttcatgaaggtggaggagccgaaaatcgctcagttacaggacggcaggaccctggctggtcgggagccgggaataaccacggtgcaggtcctctcgccgttgtctgactccatcctggctgagaagacggtgattgtcctggatgaccgagtcaccatcgcggagctgggagtgcagctcgtagctggcatgtctctctccctgcagccacaccgagcagacaaaagggccatcgtctccacagctgctgccctggatgttcttcagtccccacagcaggaagcaatagtaagttcttggattttgttcagtgatggttcggtgacacctttagacatttacgatcctaaggattattctgttactgtctcatcattggatgaaatggtggtgtctgtccaggcaaaccttgagtccaaatggccaattgtggttgcagagggtgaaggacaagggcctttgattaagttagaaatgatgataagtgaaccttgtcagaagaccaagaggaagagtgttcttgccgtgggtaaaggaaatgtcaaggtcaaattcgaaccaagtagtgatgagcaccaaggaggcagcaatgatattgagggcataaatcgggaatataaagaccacctcagtaattccatagagcgcgaaggaaaccaggagagagcagtccaggaatggttccaccgtggcacacctgttggccaagaggaaagtaccaacaaaagcacaaccccccagtctcccatggaagggaagaataagttactcaaaagtggtggtccagatgcctttacaagcttccccactcaagggaagtcaccggaccccaataatcctagtgacctcacagtgacctcaagggggctaacggacttggagattggcatgtatgccttgctctgcgtcttctgtctggccattctggtcttcttgatcaactgcgtggcgtttgcctggaaatacagacacaaaaggtttgctgtgagtgagcagggcaacatcccccattcccacgactgggtctggcttgggaatgaagtggaacttttggagaaccctgttgacattacactcccatcagaggagtgcacaaccatgatagacaggggcctgcagttcgaggagaggaacttccttctgaatggcagttcccagaagacttttcatagtcaactactcagaccctctgactatgtctatgagaaagaaattaaaaatgaacctatgaattcttcgggcccaaagaggaagagagtcaagttcacttcctacaccaccatcctcccagaggacggcggcccatacaccaactccatcctgtttgacagcgatgataacatcaagtgggtctgccaagatatggggctgggggattcacaggactttagagactatatggaaagtctgcaagaccagatgtaaactcctttcttatgtttgtattcacctttatgccttctgttttttgaatgctggagcagtgagtttgatcagcaataggggatgatttaacaaagtttgatttgtggaggtctggtgggattcatttctaagcaggtaaaagaggtttggagagctatagaagctgggttttaagtttggaaatgcctctaaaacagccacatgtggggactggagaaattctaagacaacagttttatggactgcctggtacgagctcagtgcaaatgtattaaacctgaccccacagacattgttagtcatctcgtgacaaatggccatgtggaattagaaaagatttgggtgttgatttttctatttctagaccttttaaagcacagtggacacttattgccccttggcctgagtttagacatacatgaaagatgactgaatgtagctatcctgatttgtcatgagcgctgctcattatttttatatacatttgcacctgcacctgttcctttgacctctggaattctttttgaaacatgaagagaagaaatttcagtcttttccttgagctctgtttgatttacacatgagttttcttccctgggatttgccatgccatgttatttcctgggtctccatgcaggatgtcaggtttttccagttttctgcacttcatcatctagggatggtatccaagaagcttattctcactttgttttttccttccttttgttgttgaactttcttgtataacactgggacaaagggttttacttaaaatgttaatatacagtgagggagggccatctctttactgttttctatgtgaagtttcaaacatttggaaaaaagttgtcaatcacaaacatttatttttattctctgcttgttgaaaactcatggggaactcctggagtgcatttctgagggtaaaaaggccccaacatagctgtatttatacaagtgctttgtggccaacacaatttactatccaaactgaagtcttaaagtagaattgacctacacagaaaggaaattgcctaggcaatagatgcagattacactttccattttaccagaacaaaagtttttttttttttaaataagtagaatgacagttcaagttagcaatatatagaaatccatccatacaatgaccaaaataaataaataaataaaactcaatcatgactttggcagagataaaacattgacaagggtgtgcatttgtggagagaagcagtgggtttccccccaaaatccatacaaataaatgactattccagaactcaagaagcagctattatagaaaaaaaaattaaaaaccacagctattgaaaaattaaaacggcaagagaaaaaaagaaacaactcctgcataatgtttaaataaaaatgttattttaatagcatcatgaatggtcttaaggcaaaaatttcagattagcaaaatgtgatgacatatttattaagattgtattattggaaatgtagacactggactagtatgcctcattatgagctttactgagccatttgcatctctaagaaatatgattttaaaggcccaaagtaggaaggatctgcagggggtcacctgaagcagtgccctgactccaaatggctgataactgagctaatccaaggagaggcgttcagttgttctcttattatagatttccttgggtgggaacatgacaaccccgcctcctctagccatgacgtggcagccaaaaagttcttcctgtatctctggcccacaggactgtagtgtgtttgggaacagtgctgaaattgcaagtgatgtaggcctgacctccagagcccagcgttcagttagttgtataaaatggggcttaggaaccgaagctgatgaagttccaaaagtagttcagtttgatgggataaggaagcaaggagagccaggcattagctgcaaaaggagcttgcagagagatggctgacactttatgggaagattcctcagtcagccaaaagcttttcaaagagtttggtgcagaggtagctcagagccaaccatccaggaccgaagaaagctcatgtgctgattgacacatagctatccaggtgagtcggctccttctatgaggcttttcaatcgtctctccctttggatctctggcattccagaaagactgggaattcatttctgaaaatgatgaacctccgctgaaacggggaggaaatctcttacacacatacagcagggtcctgcccactggtaaagtgagacgttgggtagggggtgtaactggggaggaggtgaaggaaattatccctgccatggggagtgttattcaggaacataaaaattagagcattccctctgatggcagtgcttgacggggtgcagggaacaaactggggagcgttcaaacatgccagtggtttctcagcagggctggaaactggccacagtcctgaagatgcttcttgtgacaacttagagtcactgggagtcacacagctcctgtgtagccgcctttgctcctctgtgttaaaacccagtcagttcaaaataacaatcaaatggaaggccatgggggaagggttccttccaccatataacccacacccagatgtatataaacgcatatacatacatatacccgtgtgtgtgtgtgtgtgtgtgtgtgtgtgtgtgaatactgaagagccagacaacaaactatttagtaagaatcaacagtgactgtcaattgttctcagatttggcatggatactatttctcatgaaataatgtcattaaagtatttcctcctctaaatatttcctgaagatcataaaccatgggttatagcaccttgttttccagctagtcaatatacaactattaggtgctgtgccccaaaatatctaaaatgggggtaaagatataaactattaagccatgaaatctaattttctggggaccatgcatttgcctggattttccaggattttatggctgatagacccaaattattagtcttgataaacaacctgaaccaaacatttataaagtcccttcctctcccatgggaatggaatgctcagactcctgctgagggagacaccagcaagcctcttgagaaggcaccagacagtgaactctgtggtcacatgaagggaggttcagatgctagacgaccagcgtatgacctggaaccattgaggattgcaaccgctgcctccagggtccagatgtgctgcagtagagggcagagcacaggaatcaagaagcagctgccacaccaaagaactgatgcttaaacacacaggtgtgttgcatttgagagaaggcaagaagaaaagacaatagaaggttaccctggaaaaacaacacctagcaaacctcagaatactccatgtgtcccaagagaaggaataattgtctttctagctgttatatattgcacactggccaggataaattcccagactataataatcctgactatgtagacggaagtttctatttataaagtcatgcagggggaaagttgattaatttttgtcccattgccacatctgtagactaagtaatttttaacttgctaacttttagaatgtccacctttgtgcattttggtagcattcttgtttcattattttagaaaggggtcttcccattactgggatgtcggggccctgtcagagaactattattaaggctctgtgagggaactgttcagtctcacagcaaggaccacagagcgtggtttcatctgaaccctacaagtcagggacaccagtgtgttttctactcgagttacctaaaaatggtctcaattttccatttcattctctgtaaatgacacaatagatggtttatagactcagcagccctcaccttttattaaaattatatatgtgtgatgtaatgcatatcacctgtcatgtaaagggacggtatggatggtggaaaagttatgctaaaatatggattgcagatatttttgtatgtaatataggcaatataatgaaacaccgagttttttaaagtgaaagcatgcaaaatcgtagcttttaaatgtacagacatcccactcaaaaatatctaaactgatagtgggaaaaacatttgagacctagtaacatcatgaaatgcactgaatttggaattctggcctagaaaggctgtggcttatgttgggattgatgatggaatctgccagaacattttcatcttattcttcttgacttttggatttttttcttttctttttttctggaaatatttcggaaataaagtgacttcatttttcagcataaaagtatattctaaccacagggtaacacatcgtttttaacatgaaaataaacatttaaacattc

SEQ ID NO: 1108 - protein, 1078 aa, Homo sapiens
MFGAASRMDTTAVCTGGVTESRGIVDSLQKFSSLPAYLPTNLHISNAEESFFLKEANQDLTRNSSLQARVEPFFIYRARTPPIINASYGPFSVEKIIPQELLLTSTAFGNMDKFPFNWKLKSHILDSSIYSNRPKVQTLFYVTGMGWDDSDLTEDLPCVKMFAFPEAREVAASCRLQGAPGLCVAELELLPEWFSSGLDLEPEEEIPALLGGTTMELFFTLYPADKAGQCPLEEEGKWENNIHSGLESPQQAFPARERIGSVVVYPTQDDLKWSLVSLDENVVISVPLNLVREGDTATFLVSLTSSSVADQFTLRIKAAAGVKITAVRVSSEDQWAVQEEIDNGSTQTSATLTCMGHRPDTQSRVNGSFYEILQVDFGIDNSSDLAGAQQITWQVEYPIEDSMSELVVSEIFVSQTTFVGIVPLAMDTEVLNTAILTGKPVSVPVKVVGVQEDGSVVDVSESVECKSADEDVIKVSNNCDSIFVNGKEMKSKVDTIVNFTHQHFTSQFEVTVWAPRLPLQIEISDTELSQIKGWRIPVAANRRPTRESDDEDDEEKKGRGCSLQYQHATVRVLTQFVAESPDLGQLTYMLGPDWQFDITDLVTEFMKVEEPKIAQLQDGRTLAGREPGITTVQVLSPLSDSILAEKTVIVLDDRVTIAELGVQLVAGMSLSLQPHRADKRAIVSTAAALDVLQSPQQEAIVSSWILFSDGSVTPLDIYDPKDYSVTVSSLDEMVVSVQANLESKWPIVVAEGEGQGPLIKLEMMISEPCQKTKRKSVLAVGKGNVKVKFEPSSDEHQGGSNDIEGINREYKDHLSNSIEREGNQERAVQEWFHRGTPVGQEESTNKSTTPQSPMEGKNKLLKSGGPDAFTSFPTQGKSPDPNNPSDLTVTSRGLTDLEIGMYALLCVFCLAILVFLINCVAFAWKYRHKRFAVSEQGNIPHSHDWVWLGNEVELLENPVDITLPSEECTTMIDRGLQFEERNFLLNGSSQKTFHSQLLRPSDYVYEKEIKNEPMNSSGPKRKRVKFTSYTTILPEDGGPYTNSILFDSDDNIKWVCQDMGLGDSQDFRDYMESLQDQM

SEQ ID NO: 1109 - DNA, 309 bp, Homo sapiens
atgcagccctcactgcccatgacgcagccttccctgaccatgacgcagccttccctgaccatgacgcagcctttcctgaccatgacgcagccttccctgatcatgacgcagccttccctgaccatgacgcagccttcactgcccatgctgcagccttccctgaccatgacacagccctcactgcccgtgacgcagccctcactgcccatgacacagccttccctgaccatgacgcagccctcactgcccatgacgcagccttccctgaccatgatgcagccttcacccacaacgcagccgtctgcatag

SEQ ID NO: 1110 - protein, 102 aa, Homo sapiens
MQPSLPMTQPSLTMTQPSLTMTQPFLTMTQPSLIMTQPSLTMTQPSLPMLQPSLTMTQPSLPVTQPSLPMTQPSLTMTQPSLPMTQPSLTMMQPSPTTQPSA

SEQ ID NO: 1111 - DNA, 2823 bp, Homo sapiens
cacccattaggtctccaagacagctgtgtttcacaaacttaaggagacagaaattttctcccctggaacctgtgaaaatgtcccttttccaaggaagtgaaggttaagaggtcccgttctcacagaccctcaggaatttcacttggctccgagctttgacctccgagagagccatggaaaagctgctgcggctgtgctgctggtactcctggctgctgctattttattacaactttcaggtgcgtggcgtctactccagatcgcaggaccatccaggatttcaggtgttggcgtctgcttcccattactggccactggagaatgtggatgggatccatgaacttcaggatacaactggagatattgtggaagggaaggtcaacaaaggcatttacctgaaagaggaaaagggagtcacgcttctctattacggcaggtacaacagctcctgcatcagcaagccagagcagtgtggccctgaaggggtcacgttttcttttttctggaagacacaaggagaacagtctagaccaatcccttctgcgtatgggggacaggtcatctccaatgggttcaaagtctgctccagcggtggcagaggctctgtggagctgtacacgcgggacaattccatgacatgggaggcctccttcagccccccaggcccctattggactcatgtcctatttacatggaaatccaaggagggcctgaaagtctacgtcaacgggaccctgagcacctctgatccgagtggaaaagtgtctcgtgactatggagagtccaacgtcaacctcgtgatagggtctgagcaggaccaggccaagtgttatgagaacggtgctttcgatgagttcatcatctgggagcgggctctgactccggatgagatcgccatgtacttcactgctgccattggaaagcatgctttattgtcttcaacgctgccaagcctcttcatgacatccacagcaagccccgtgatgcccacagatgcctaccatcccatcataaccaacctgacagaagagagaaaaaccttccaaagtcccggagtgatactgagttacctccaaaatgtatccctcagcttacccagtaagtccctctcggagcagacagccttgaatctcaccaagaccttcttaaaagccgtgggagagatccttctactgcctggttggattgctctgtcagaggacagcgccgtggtactgagtctcatcgacactattgacaccgtcatgggccatgtatcctccaacctgcacggcagcacgccccaggtcaccgtggagggctcctctgccatggcagagttttccgtggccaaaatcctgcccaagaccgtgaattcctcccattaccgcttcccggcccacgggcagagcttcatccagatcccccacgaggccttccacaggcacgcctggagcaccgtcgtgggtctgctgtaccacagcatgcactactacctgaacaacatctggcccgcccacaccaagatcgcggaggccatgcatcaccaggactgcctgctgttcgccaccagccacctgatttccctggaggtgtccccaccacccaccctgtctcagaacctgtcgggctctccactcattacggtccacctcaagcacagattgacacgtaagcagcacagtgaggccaccaacagcagcaaccgagtcttcgtgtactgcgccttcctggacttcagctccggagaaggggtctggtcgaaccacggctgtgcgctcacgagaggaaacctcacctactccgtctgccgctgcactcacctcaccaactttgccatcctcatgcaggtggtcccgctggagcttgcacgcggacaccaggtggcgctgtcgtctatcagctatgtgggctgctccctctccgtgctctgcctggtggccacgctggtcaccttcgccgtgctgtcctccgtgagcaccatccggaaccagcgctaccacatccacgccaacctgtccttcgccgtgctggtggcccaggtcctgctgctcattagtttccgcctcgagccgggcacgaccccctgccaagtgatggccgtgctcctacactacttcttcctgagtgccttcgcatggatgctggtggaggggctgcacctctacagcatggtgatcaaggtctttgggtcggaggacagcaagcaccgttactactatgggatgggatggggttttcctcttctgatctgcatcatttcactgtcatttgccatggacagttacggaacaagcaacaattgctggctgtcgttggcgagtggcgccatctgggcctttgtagcccctgccctgtttgtcatcgtggtcaacattggcatcctcatcgctgtgaccagagtcatctcacagatcagcgccgacaactacaagatccatggagaccccagtgccttcaagttgacggccaaggcagtggccgtgctgctgcccatcctgggtacctcgtgggtctttggcgtgcttgctgtcaacggttgtgctgtggttttccagtacatgtttgccacgctcaactccctgcagggactgttcatattcctctttcattgtctcctgaattcagaggtgagagccgccttcaagcacaaaaccaaggtctggtcgctcacgagcagctccgcccgcacctccaacgcgaagcccttccactcggacctcatgaatgggacccggccaggcatggcctccaccaagctcagcccttgggacaagagcagccactctgcccaccgcgtcgacctgtcagccgtgtgagccgggaggctgccaaccaggccag

SEQ ID NO: 1112 - protein, 874 aa, Homo sapiens
MEKLLRLCCWYSWLLLFYYNFQVRGVYSRSQDHPGFQVLASASHYWPLENVDGIHELQDTTGDIVEGKVNKGIYLKEEKGVTLLYYGRYNSSCISKPEQCGPEGVTFSFFWKTQGEQSRPIPSAYGGQVISNGFKVCSSGGRGSVELYTRDNSMTWEASFSPPGPYWTHVLFTWKSKEGLKVYVNGTLSTSDPSGKVSRDYGESNVNLVIGSEQDQAKCYENGAFDEFIIWERALTPDEIAMYFTAAIGKHALLSSTLPSLFMTSTASPVMPTDAYHPIITNLTEERKTFQSPGVILSYLQNVSLSLPSKSLSEQTALNLTKTFLKAVGEILLLPGWIALSEDSAVVLSLIDTIDTVMGHVSSNLHGSTPQVTVEGSSAMAEFSVAKILPKTVNSSHYRFPAHGQSFIQIPHEAFHRHAWSTVVGLLYHSMHYYLNNIWPAHTKIAEAMHHQDCLLFATSHLISLEVSPPPTLSQNLSGSPLITVHLKHRLTRKQHSEATNSSNRVFVYCAFLDFSSGEGVWSNHGCALTRGNLTYSVCRCTHLTNFAILMQVVPLELARGHQVALSSISYVGCSLSVLCLVATLVTFAVLSSVSTIRNQRYHIHANLSFAVLVAQVLLLISFRLEPGTTPCQVMAVLLHYFFLSAFAWMLVEGLHLYSMVIKVFGSEDSKHRYYYGMGWGFPLLICIISLSFAMDSYGTSNNCWLSLASGAIWAFVAPALFVIVVNIGILIAVTRVISQISADNYKIHGDPSAFKLTAKAVAVLLPILGTSWVFGVLAVNGCAVVFQYMFATLNSLQGLFIFLFHCLLNSEVRAAFKHKTKVWSLTSSSARTSNAKPFHSDLMNGTRPGMASTKLSPWDKSSHSAHRVDLSAV

SEQ ID NO: 1113 - DNA, 493 bp, Homo sapiens
ggagacgccaggctgggatttccgctcgatctgggaatgagcaatgcaacctaatgacacccggagctcctgaatcacctggggaagatgaagagagacactctctggtgggaacgtctcctagaaacaaggcctaagatggggcgaccacagccccacagctgtgtccagatgcagggagcactcgcctgtgctgtgagggacggccggtgtcatcgttggagcttcctaagactcccagaggctgatgcacctcccagacccgcctccgcccggctccctgggccctgctccaggggcttcattgctccctgccccgggtcacccctcggctcaccgtctctcaggtgtggaatatcctgctccaatcaaagccatgtcacctgcgttgtccagtgaaacgtcagcggacaggcgctgcccgggctccagggagctcctcactgaggctcactccctgtgcctctgccatcagcacagggggacatgcctg

SEQ ID NO: 1114 - protein, 86 aa, Homo sapiens
MGRPQPHSCVQMQGALACAVRDGRCHRWSFLRLPEADAPPRPASARLPGPCSRGFIAPCPGSPLGSPSLRCGISCSNQSHVTCVVQ

SEQ ID NO: 1115 - DNA, 5219 bp, Homo sapiens
gggctgcagggatggcgatcagggcggggaggtcgggccctggcgcggggcgcacgcgtgaagcagcaccgcacgtgtgaaaggaattcttttcagagcggccgggagccctgctccggaggaacgcacccgggtcgccgccgcggcagagcggggttaggaatctgaagcaatgggcgactggagctttctgggaagactcttagaaaatgcacaggagcactccacggtcatcggcaaggtttggctgaccgtgctgttcatcttccgcatcttggtgctgggggccgcggcggaggacgtgtggggcgatgagcagtcagacttcacctgcaacacccagcagccgggctgcgagaacgtctgctacgacagggccttccccatctcccacatccgcttctgggcgctgcagatcatcttcgtgtccacgcccaccctcatctacctgggccacgtgctgcacatcgtgcgcatggaagagaagaagaaagagagggaggaggaggagcagctgaagagagagagccccagccccaaggagccaccgcaggacaatccctcgtcgcgggacgaccgcggcagggtgcgcatggccggggcgctgctgcggacctacgtcttcaacatcatcttcaagacgctgttcgaggtgggcttcatcgccggccagtactttctgtacggcttcgagctgaagccgctctaccgctgcgaccgctggccctgccccaacacggtggactgcttcatctccaggcccacggagaagaccatcttcatcatcttcatgctggcggtggcctgcgcgtccctgctgctcaacatgctggagatctaccacctgggctggaagaagctcaagcagggcgtgaccagccgcctcggcccggacgcctccgaggccccgctggggacagccgatcccccgcccctgccccccagctcccggccgcccgccgttgccatcgggttcccaccctactatgcgcacaccgctgcgcccctgggacaggcccgcgccgtgggctaccccggggccccgccaccagccgcggacttcaaactgctagccctgaccgaggcgcgcggaaagggccagtccgccaagctctacaacggccaccaccacctgctgatgactgagcagaactgggccaaccaggcggccgagcggcagcccccggcgctcaaggcttacccggcagcgtccacgcctgcagcccccagccccgtcggcagcagctccccgccactcgcgcacgaggctgaggcgggcgcggcgcccctgctgctggatgggagcggcagcagtctggaggggagcgccctggcagggacccccgaggaggaggagcaggccgtgaccaccgcggcccagatgcaccagccgcccttgcccctcggagacccaggtcgggccagcaaggccagcagggccagcagcgggcgggccagaccggaggacttggccatctagtgcccgggtgcctgcctccagacagctgtgtagtgatctttttcttagaaaccaaaaccaaagtgcacttcccaccagcagatagaacctgaaagtcccaggaggtgggagcgactggagtcccaggaggtggacgatggaggagagatcaggtttccgtgttcaatgcttgctgttcttagcactgtgagttacagtggggataactcccactttctgagtttgggggtggcggggacaagggttgtgggcctttaagatcttcacagcagcccagaaatctggtcgctgagggctgtctctgggggtaactgttctgtagtggtaaagcaacaggtatcctgcagtccctttagctcctgggcaattgggtttgctattcctaagctctccagagcctctgggcggcccagagggtcttagctctgggccagagcacttagctctatctctttgatacttttaacttagagttgaatttcatttgggatatttgccaaactgcactaaaaaaagatttacagcaagtctatgtagtgtcatttgagtttccgaaattgcatgtgaagcccaggatatcaagcttcaggcctcatgacaagtgacaaagagcagttgccctccagaggcaggctcagtgggcaagggccccagaggttgctggcagaaggcaggtggaaacgcagccacgcctgaggccatttttaaacagttgaggaaattgacataaaagtgtgtcgggtatgccgtaggtatttattttctaaatgattattttgtgctttgaatggtgcagctatgcctattttctcccactttctttcaggaaaaatgaaagaaaaatagtgtttttctttctttaaatactgttagaatgattgctgaccaagacagtgctaatttgccctaatgcatgctactagcatctttactaaagattttgaactttcttgtaaaagaaattctttaatttcatgagtcacctaattataatgagaatgtattatataaaacaaaagcaggggaaagttttaagtgcattcaaatagaagttctgaagattttgaatgggaagtgaaaagtgaactactgttgccaggaaaattatttatacagatgaatctatgacaatctacacttttaaaaagtacagaataaaacacttcaagcttcctaatcattctttgtgggcagcctgtttgctttctccagtgtaaataatataagtgtctggggatccctgcctgggggagggcgcgtgctcatgcaggctgtatgccccattctgcctccacaccagagctgtcctgacagggaaggctatttatgtgtgtgggcatggctggaagacggcagaattttctgtcctgcacacacagctgtagtatcttggtcaccatttgtttataaaatgaacgatggtcatgttgagcctgtttctactcacacttttcacctccaacttctactgagtatcattagcccttgttcagcgagaccaatgtaatacatttctttttataaattaacttctcgatgatgcatttgggaccacactccaaacatactttctgttttctatcataaagggtgctccactaacaatctgatgaaaggaatgcaatttccaagtctcagattcttgcatgcaactagtttttcatgtcagtcaaacacaaagaatttgttagtacattctgcttgctgtaggatgcactggacaggctcctaggcttgaaaaatgctaacttttccatacgtctcctcagagactttctcaaccagattgacaagagagaaattagccctttggaaaactgtgagtgactttctcactcctctccaggctggtgcataactacagccattctagatgcataacttctctccgaagttcactcattacatgcagtgtatgccataggcctagggcagcaggacttagttcttgtgagtgataagggctgctagaagatcctagtgtgagaagcattccgataaaaagctttggccattttagaaaatgcaatagcaatcatccaagagcacaagtacagctcaagtacaagtggatgtcaatacttggttctttaagttctaccataataaatgttcataacagtaacaagcttcttatttacccacaatttgattttgagtggggttggagatgagcatgagaactcaaattgtatctagtttttacattttaaaattgaatttagtcacaatatgtttatggaaatgccagtattgtaccattgaccatagtctagtgggtccatttagagtggataggagtgtagaattagattcacctacttgaaaatcactaatctataaagaagtgaggttttgcaatagaacagtgcctgtggtgttttttcaggttagcatactgatttcagttcatgtaagaaatgaacgcatgtttcacatccttttgctctttgaggtatccatgattctaaaggctgggtccttctctctcaggcagtgtggaattgttctctactcaactagtcctttaagacattgaaacatgcaataaaaatagaaattgcctctctctgtgggcaagattccagacctatttttttctagcctggaaatttcactgaaactattttgttcttgattcattagaaagttttaaaaaatctctaagcctattttaaaactcaaatgctatacctatagcatttgagtattatatttacatacatggtttttaagctgctgtatacaattacttcttatatccctgtttttataaaatgttaaacatcactatagttacagtaccaaaaatcattttttaaattctaaaactattacttatattatcactcactttctcctttttaaacttttaatggttattcttgtattttttaataaaattgacacgaataaatccttaaatttacaaaagaaaaatagcaagccagcatctttctcatttatcctggatttcttcggctctggacaagtaagtggataggtcatagaattcctacacaagaatacctggactaataactatgaatataatttaaacatcactttacaaaaaattaatccaatagggtttaggtctcctttcacgttaggctttttaaaaagtattattaacactttctttattttgtattactgaataaactccttttttctgaattttttgaacttctgatatttgtaacactaattcatgaatctccaccaaaataaatacttatagagagtattgcatgatttaagagagtaaatgtgttttccaaagatgaatagagtcctgccaccatcaccacccgccacccctacaaattgaggatatcctaaataacctttaatatagcatatggacattgtacatttaaggtcagggaaggcacttttcttcctaattttatattacagtgcaaatcttgggttgactcactttaaggtttctgactgcccaaaatattttttcccctttacgttacagaacattataataaggcaaacaagttagggatttgaataacactcaaagcaacaaactgtttccagaaagtaccatatttgaagctgtttggtgtgtaaatgttcatttagctcatgtatttacaaaactcttactaaaacttaatttttgtgccataacagtgtctttcctggattacattgtaactggaagtaagcattttctaaaataataaaagtgcccttaagtttaaaaaaaaaaaaaaaa

SEQ ID NO: 1116 - protein, 435 aa, Homo sapiens
MGDWSFLGRLLENAQEHSTVIGKVWLTVLFIFRILVLGAAAEDVWGDEQSDFTCNTQQPGCENVCYDRAFPISHIRFWALQIIFVSTPTLIYLGHVLHIVRMEEKKKEREEEEQLKRESPSPKEPPQDNPSSRDDRGRVRMAGALLRTYVFNIIFKTLFEVGFIAGQYFLYGFELKPLYRCDRWPCPNTVDCFISRPTEKTIFIIFMLAVACASLLLNMLEIYHLGWKKLKQGVTSRLGPDASEAPLGTADPPPLPPSSRPPAVAIGFPPYYAHTAAPLGQARAVGYPGAPPPAADFKLLALTEARGKGQSAKLYNGHHHLLMTEQNWANQAAERQPPALKAYPAASTPAAPSPVGSSSPPLAHEAEAGAAPLLLDGSGSSLEGSALAGTPEEEEQAVTTAAQMHQPPLPLGDPGRASKASRASSGRARPEDLAI

SEQ ID NO: 1117 - DNA, 5006 bp, Homo sapiens
acaggcgccggcggtccccgccagctagcagcccggcgaggcgctggcccacccatggtcctcgggcggcggcccctgcgcccagccctgcgcgtagcctccgtctctcgcccggggccgccgagcccccgacacgggcgagatgctgaacggcgcaggcctggacaaagctcttaagatgtccctgccgcggaggtcgaggatccgctcgtccgtgggacctgttcgttcttctttgggctataagaaggcagaggatgagatgtcccgggccacgtctgttggagaccagctggaggcacccgcccgcaccatttacctcaaccaaccgcatctcaacaaattccgcgacaaccagatcagtacggccaagtacagcgtgttgacatttctacctcgattcttgtatgagcagattagaagagctgctaatgccttctttctcttcattgccttattacagcaaattccagatgtatctccaacaggaagatataccaccctggtgccattgatcattattttaacaattgcaggcatcaaagagattgtagaagattttaagcgacacaaggcagacaatgcagttaacaaaaagaaaacaatagtgttaagaaatggtatgtggcataccattatgtggaaagaggtggcagtgggagacattgtgaaggtcgtcaatgggcagtatcttccagcagatgtggtcctgctgtcatccagtgaacctcaggcaatgtgttatgttgaaacagctaatctggatggggagacgaaccttaaaatacgtcagggtttgagtcacactgctgacatgcaaacacgtgaagttctgatgaagttatctggaactatagagtgtgaagggcccaaccgccacctctatgacttcactggaaacttgaacttagatgggaaaagccttgttgcccttgggcctgaccagatcttattaagaggtacacagcttagaaatactcagtgggtctttggcatagttgtttatactggacacgacaccaaactcatgcagaattcaaccaaagcgcctctcaagagatcaaatgttgagaaggtgactaacgtgcagatcctggtgttgtttggcatcctcttggtcatggccttggtgagctcggcgggggccctgtactggaacaggtctcatggtgaaaagaactggtacatcaagaagatggacaccacctcagataattttggatacaacctactgacgttcatcatcttatacaacaatcttattcccatcagtctgttggtgactcttgaggttgtgaagtatactcaagcccttttcataaactgggacacagatatgtattatataggaaatgacactcctgccatggccaggacatcaaaccttaatgaagagcttgggcaggtgaaatatctcttttctgacaagactggaacgcttacatgcaatatcatgaactttaagaagtgcagcattgccggagtaacctatggtcacttcccagaattggcaagagagccgtcttcagatgacttctgtcggatgcctcctccctgtagtgattcctgtgactttgatgaccccaggctgttgaagaacattgaggatcgccatcccacagccccttgcattcaggagttcctcacccttctggccgtgtgccacacggttgttcctgagaaggatggagataacatcatctaccaggcctcttccccagatgaagctgctttggtgaaaggagctaaaaagctgggctttgtcttcacagccagaacaccattctcagtcatcatagaagcgatgggacaggaacaaacattcggaatccttaatgtcctggaattttctagtgacagaaaaagaatgtctgtaattgttcgaactccttcaggacgacttcggctttactgtaaaggggctgataatgtgatttttgagagactttcaaaagactcaaaatatatggaggaaacattatgccatctggaatactttgccacggaaggcttgcggactctctgtgtggcttatgctgatctctctgagaatgagtatgaggagtggctgaaagtctatcaggaagccagcaccatattgaaggacagagctcaacggttggaagagtgttacgagatcattgagaagaatttgctgctacttggagccacagccatagaagatcgccttcaagcaggagttccagaaaccatcgcaacactgttgaaggcagaaattaaaatatgggtgttgacaggagacaaacaagaaactgcgattaatatagggtattcctgccgattggtatcgcagaatatggcccttatcctattgaaggaggactctttggatgccacaagggcagccattactcagcactgcactgaccttgggaatttgctgggcaaggaaaatgacgtggccctgatcatcgatggccacaccctgaagtacgcgctctccttcgaagtccggaggagtttcctggatttggcactctcgtgcaaagcggtcatatgctgcagagtgtctcctctgcagaagtctgagatagtggatgtggtgaagaagcgggtgaaggccatcaccctcgccatcggagacggcgccaacgatgtcgggatgatccagacagcccacgtgggtgtgggaatcagtgggaatgaaggcatgcaggccaccaacaactcggattacgccatcgcacagttttcctacttagagaagcttctgttggttcatggagcctggagctacaaccgggtgaccaagtgcatcttgtactgcttctataagaacgtggtcctgtatattattgagctttggttcgcctttgttaatggattttctgggcagattttatttgaacgttggtgcatcggcctgtacaatgtgattttcaccgctttgccgcccttcactctgggaatctttgagaggtcttgcactcaggagagcatgctcaggtttccccagctctacaaaatcacccagaatggcgaaggcttcaacacaaaggttttctggggtcactgcatcaacgccttggtccactccctcatcctcttctggtttcccatgaaagctctggagcatgatactgtgttgacaagtggtcatgctaccgactatttatttgttggaaatattgtttacacatatgttgttgttactgtttgtctgaaagctggtttggagaccacagcttggactaaattcagtcatctggctgtctggggaagcatgctgacctggctggtgttttttggcatctactcgaccatctggcccaccattcccattgctccagatatgagaggacaggcaactatggtcctgagctccgcacacttctggttgggattatttctggttcctactgcctgtttgattgaagatgtggcatggagagcagccaagcacacctgcaaaaagacattgctggaggaggtgcaggagctggaaaccaagtctcgagtcctgggaaaagcggtgctgcgggatagcaatggaaagaggctgaacgagcgcgaccgcctgatcaagaggctgggccggaagacgcccccgacgctgttccggggcagctccctgcagcagggcgtcccgcatgggtatgctttttctcaagaagaacacggagctgttagtcaggaagaagtcatccgtgcttatgacaccaccaaaaagaaatccaggaagaaataagacatgaattttcctgactgatcttaggaaagagattcagtttgttgcacccagtgttaacacatctttgtcagagaagactggcgtcagcagccaaaacaccaggaaacacatttctgtggccttagccaagcagtttgttagttacatattccctcgcaaacctggagtgcagaccacaggggaagctatctttgccctcccaactcgtctgcagtgcttagcctaacttttgtttatgtcgttatgaagcattcaactgtgctctgtgaggtgtgaaattaaaaacattatgtttcaccaatatttaaacatcagtactagttgtcctgggagaaagggaaaggagttttatgttgcgtgagaggcccatcctgtgtaattggagcagggcacacttgcttcctgttgagttaactcagaggttaagtccaacgggccacatgcagacttcactgtaggcaggttgctctcctgctttgattcctgttttgtgtgtaaaattggcataaacttcttgattgcagtgaaatcacaaaattctctatcggggtggtcaacctgagaacatttatttgaacctcttagccacatttccagcagggcaaaccaactgatgccctggaagagtcttccgcaccctctccaggtgcactcggcccagtcctgccgccgtgtccaggcgcccctcacccccacacctgctgcatggctggccacaccactcagtgcatggcggccgatgggcagccaacccaaacccgcgcctttccttgttccactgcagactcagatacagatgcgaaaaattccttcttccaccgcccttctcgttctgtaaagaaagaaaagaaacatagcctttctgcatatattctaaacgtctctctgcctctgtctgacatggggccaccccacaggtcagagtggtggtagaaccccttcaggactcccagccgtggtcaggctctgaatactcccttcccaacatccagactgctgggcctttggcatccacttacattagaacccacgtttgtttcagagcacattttggactttcactgttgggaaatgaatgaatttataacatgcctgcacagcgaaggaacacacctgtcgctcttagctctagagtcagaggatgagtaaacccagatgcaagagtataggacattgagtggggagaacaagacgaccacagaagtcctcagaaggagaaggaaggacacggagacactgagaggaggacacagaggaatcgccaccagatctttgcagtagaaactctgaaata

SEQ ID NO: 1118 - protein, 1188 aa, Homo sapiens
MLNGAGLDKALKMSLPRRSRIRSSVGPVRSSLGYKKAEDEMSRATSVGDQLEAPARTIYLNQPHLNKFRDNQISTAKYSVLTFLPRFLYEQIRRAANAFFLFIALLQQIPDVSPTGRYTTLVPLIIILTIAGIKEIVEDFKRHKADNAVNKKKTIVLRNGMWHTIMWKEVAVGDIVKVVNGQYLPADVVLLSSSEPQAMCYVETANLDGETNLKIRQGLSHTADMQTREVLMKLSGTIECEGPNRHLYDFTGNLNLDGKSLVALGPDQILLRGTQLRNTQWVFGIVVYTGHDTKLMQNSTKAPLKRSNVEKVTNVQILVLFGILLVMALVSSAGALYWNRSHGEKNWYIKKMDTTSDNFGYNLLTFIILYNNLIPISLLVTLEVVKYTQALFINWDTDMYYIGNDTPAMARTSNLNEELGQVKYLFSDKTGTLTCNIMNFKKCSIAGVTYGHFPELAREPSSDDFCRMPPPCSDSCDFDDPRLLKNIEDRHPTAPCIQEFLTLLAVCHTVVPEKDGDNIIYQASSPDEAALVKGAKKLGFVFTARTPFSVIIEAMGQEQTFGILNVLEFSSDRKRMSVIVRTPSGRLRLYCKGADNVIFERLSKDSKYMEETLCHLEYFATEGLRTLCVAYADLSENEYEEWLKVYQEASTILKDRAQRLEECYEIIEKNLLLLGATAIEDRLQAGVPETIATLLKAEIKIWVLTGDKQETAINIGYSCRLVSQNMALILLKEDSLDATRAAITQHCTDLGNLLGKENDVALIIDGHTLKYALSFEVRRSFLDLALSCKAVICCRVSPLQKSEIVDVVKKRVKAITLAIGDGANDVGMIQTAHVGVGISGNEGMQATNNSDYAIAQFSYLEKLLLVHGAWSYNRVTKCILYCFYKNVVLYIIELWFAFVNGFSGQILFERWCIGLYNVIFTALPPFTLGIFERSCTQESMLRFPQLYKITQNGEGFNTKVFWGHCINALVHSLILFWFPMKALEHDTVLTSGHATDYLFVGNIVYTYVVVTVCLKAGLETTAWTKFSHLAVWGSMLTWLVFFGIYSTIWPTIPIAPDMRGQATMVLSSAHFWLGLFLVPTACLIEDVAWRAAKHTCKKTLLEEVQELETKSRVLGKAVLRDSNGKRLNERDRLIKRLGRKTPPTLFRGSSLQQGVPHGYAFSQEEHGAVSQEEVIRAYDTTKKKSRKK

SEQ ID NO: 1119 - DNA, 1981 bp, Homo sapiens
atggcgggggagagcccccacggagcccaggggatgtatgacatcatagtcacagtcctacatcttcctctgtttccccagctaccctggctatctctgcagacaggaagagagctgccaagaattcccgaccgaggccatctgctctgcaggcagaaagtgaagcgaccgcagcctgatgcagccaggaaggcagaggctgagaggagggagtgtggcatcagaacagagtccgccggggctctggcttcctcctccgggatcaagggaaatgtgcgaagcacagtgcagaatcccgggcggctcatgcccactcacttgctgggggaacagataaaacacgaaacattgacaaccctcaagataacaggggcatctgagaaatgcaaggccagtcaagctgagccctctcagcagagccttttccagcagctgcagaagccgcctcacaacagccactggctggtgcttcttcctctctgtctcccctggacctaccctcctgggtcgcagcagaaggtggaacagagcagcagggacagctccttgctgggctgcccggagcagggaggcagtctcctctccctggatcgctgtagccttacgcgcttcagatgtccttccctactgcagctctgcggcgtgaagatcgggttctggctggcgttcacctacggccttcaccacagctccttggatcatgtcgcaagtcaggattcctgatccagagacaatggccctgatgggatggagcccaaaggtgtcatcgagagtaactggaatgaaattgttgacagctttgatgacatgaacctcttggagtcccttctccatggcatctacgcctatggttctgagaagccctctgccatccagcagcgagccattctaccttgtatcaggggttatgttgtgatcgttcaagcccaatctggcactgggaaaatggccacattttccatatcaattctgcatcagattgaattagatgtaaaagccacccaggccttggtcctagcacccacttgagaatcggctcagcagatacagaaggtggtcatagcactaggagaccacatggatgcctcctgtcacacctgtattgggggcaccaacgttcatgctgaggtacagaaactgcagatggaagctccccatataattgtgggtacccctggccatgtgtttgatatgcttaactggagatacctgtctcccaaatacatcaagatgtttgtgctggacaaaactgacgaaatgttaagccatggattcaaggaccagatctatggcatattccaagagctcaacagcaacacccaggtagttttgccatcagctacaatgccttctgatgtgcttgaggtgaccaagaagttcatgagggaacacatttggattctggtcaagaaggaagagttgaccctggagggtatctgccaattctacatcaacatggaacgagaagagtggaagctggacacactgggtgacttgtatgaaaccctgaccattgcccaggcagtcatcttcctcaacacccgcaggaaggcggactggcttaccaagaagatgcatgctcaagatttcactgtctctgccatgcatggagatatggaccagaaggaatgagacgggatcatgagggagtttcattctggctctagcagagttttgattatcactgacctgctggccagaggcattgatgtgcagcaggtttctttagtcatcaactatgaccttcccaccaacagggaaaactatatccacagaatcggtcgacgtggacagtttggccgtaaaggtgtggctattaacatggtgacagaagaagacaagaggactctttgagacatcgagaccttctataatacctccattgaggaaatgcccctcaatgttgctgacctcatctgaggggctgtcctgcttcctagccccagccagagttcaatcttgggggctgaggagcagcagg

SEQ ID NO: 1120 - DNA, 7248 bp, Homo sapiens
gcggccgcgggctcccgctaaccgcagcctccactcctctccccgcgcgccgcgcccccgccccgccccgcccggtctcgccggccgagcgtccgttggtccttgagcgcgtccgacagtctgtctgttcgcgatcctgccggagccccgccgccgccggcttggattctgaaaccttccttgtatccctcctgagacatctttgctgcaagatcgaggctgtcctctggtgagaaggtggtgaggcttcccgtcatattccagctctgaacagcaacatggggtgcaaagtcctgctcaacattgggcagcagatgctgcggcggaaggtggtggactgtagccgggaggagacgcggctgtctcgctgcctgaacacttttgatctggtggccctcggggtgggcagcacactgggtgctggtgtctacgtcctggctggagctgtggcccgtgagaatgcaggccctgccattgtcatctccttcctgatcgctgcgctggcctcagtgctggctggcctgtgctatggcgagtttggtgctcgggtccccaagacgggctcagcttacctctacagctatgtcaccgttggagagctctgggccttcatcaccggctggaacttaatcctctcctacatcatcggtacttcaagcgtagcgagggcctggagcgccaccttcgacgagctgataggcagacccatcggggagttctcacggacacacatgactctgaacgcccccggcgtgctggctgaaaaccccgacatattcgcagtgatcataattctcatcttgacaggacttttaactcttggtgtgaaagagtcggccatggtcaacaaaatattcacttgtattaacgtcctggtcctgggcttcataatggtgtcaggatttgtgaaaggatcggttaaaaactggcagctcacggaggaggattttgggaacacatcaggccgtctctgtttgaacaatgacacaaaagaagggaagcccggtgttggtggattcatgcccttcgggttctctggtgtcctgtcgggggcagcgacttgcttctatgccttcgtgggctttgactgcatcgccaccacaggtgaagaggtgaagaacccacagaaggccatccccgtggggatcgtggcgtccctcttgatctgcttcatcgcctactttggggtgtcggctgccctcacgctcatgatgccctacttctgcctggacaataacagccccctgcccgacgcctttaagcacgtgggctgggaaggtgccaagtacgcagtggccgtgggctccctctgcgctctttccgccagtcttctaggttccatgtttcccatgcctcgggttatctatgccatggctgaggatggactgctatttaaattcttagccaacgtcaatgataggaccaaaacaccaataatcgccacattagcctcgggtgccgttgctgctgtgatggccttcctctttgacctgaaggacttggtggacctcatgtccattggcactctcctggcttactcgttggtggctgcctgtgtgttggtcttacggtaccagccagagcagcctaacctggtataccagatggccagtacttccgacgagttagatccagcagaccaaaatgaattggcaagcaccaatgattcccagctggggtttttaccagaggcagagatgttctctttgaaaaccatactctcacccaaaaacatggagccttccaaaatctctgggctaattgtgaacatttcaaccagccttatagctgttctcatcatcaccttctgcattgtgaccgtgcttggaagggaggctctcaccaaaggggcgctgtgggcagtctttctgctcgcagggtctgccctcctctgtgccgtggtcacgggcgtcatctggaggcagcccgagagcaagaccaagctctcatttaaggttcccttcctgccagtgctccccatcctgagcatcttcgtgaacgtctatctcatgatgcagctggaccagggcacctgggtccggtttgctgtgtggatgctgataggcttcatcatctactttggctatggcctgtggcacagcgaggaggcgtccctggatgccgaccaagcaaggactcctgacggcaacttggaccagtgcaagtgacgcacagccccgccccccggaggtggcagcagccccgagggacgcccccagaggaccgggaggcaccccaccctccccaccagtgcaacagaaaccacctgcgtccacaccctcactgcagccaaaggtgcaattacttgacctgcagccccagcccaccctcggctctgcagccggttctccgggccctggtcacctccagacagctgcctggccggggccactaggctgcggctggccactgtgtctcctcacttctctgaacaaagcagttcctcccctaccagctcagccccgagctgccgcagcctcaggcagaacggaggtcaccttctctccttatcttgggaaccaggccttcctcccggggactgttctgggattgaaattgtgcatactccaaactttcgcagccatcttcccgctcagccccagacacccagcaatcaagccagatgagtaccacaaaacagtgtgtccccagcagctccccaccccagagccaaatgacagtagtgcacttaaaaaggaaaatcaggcctgttgtccttctccggttgcattcagatgggtcattagggccggaccctgcctgccccttggcttctcagggctttgctctgacaccatgacagctgcccggggctgagggcagctggctccactcaaatgaggaagaagggatcactcccattagggcctgctttgcttatgcatgtgtgtgcacatgcatgtaaaccagggaccttcagctcacggcctccaggcctgggccagttcttgctgctcctgccgtctcccccgactggctgtgtcctgagtaactggaacatgagacagtatctgcaggactggccccatggtggccgagtcagaagtctgtttcctgtgagtcgccaccgttcactcagtcttgccctcccatgctttggagccagtctggtggctcctgtaaggttctcaaggctggtggcagctcagtctggggtcaggacatgtcggggtcatgcgtttctggccctgacataagctgtctggcctctctgtgacatgatgaaattgaaatcaatccacagtccatgaaattgtgacactccaccagattaagttagggcataacattaacttggaaatggccatgtcatcacccctgcggctgtcctatagctgagatgcgtgggtcgcaggggaggtgatttctaggcatattgctgtcccttttgtgtatctgtcatccggatgcttcggaccccacgcctctgcaagtgggagagacccgagcatcctccccacccccatagctccagtgcacgccacccccgtcttgcctgggtcggggcctgcggccagcaccatttcacacacactccttgtagatgggagccagaggaaacctgaacgtgggtggagcgttccactgagtctacttcaggagacagaaggcccatgctgatgggggaggaggagggacgtgggcattttggacaccaggggaaatggaaatgctgctttcaaaacttagtttcctttccatttcttcctagtctggcctttgacacaaatctggtagaaagaagcctgataaattgagggcacttgtaccctccctgtgcccccagaaggttcttggagagaagtgcaagaatttgtgaacacggcggtggagggcgggtggatggccatgggctgggcctccgtatcaggcctgctcaccttgctgggagctttattctgatctcattttgaatgttccagagggagcatcataagagcccagagctccgatttccaaagagtgatattgacatttatggagattggtgttgtaacatattttgataaatactaacttattttgttggggttttggttgtctcttgtcttaggacctggtagttatttgcttgatttttttttccgttattttctacataggcaaagagaattcgagggatagacagtctccaagaaaagtgaagtggtgggagagaattgcttttttcttttttttcttttctctagtttttctttctggctgagatttccgtgcaagacagcacccaatagactatttagagttgacatttgacattttaatgggcgccatggctcattttgtagattgagaaggtgcgtctcccctgctccaagtctcatcatgacagcgtgctgacagctgggagtctgtggccttcctcacgcagaggccttaaagctggacacagaagcacgcctaggctgggcagggatgggacccatgccccctccttagaggacgggcttcctggttaggaaaggacacgtgggggtgccttgcataatagttcactggtcaccgtgcttttatgagtagtgtttttgtgcacttgccaggggttttctctctgtgtgagaggggagtgatttaagcaatggtgtctggagtaagccttacaattttaatagactttttcttatcatatccctcatttctttccctgaaataaaaatacacacaagcaaaaaaaaaatgatagtttcacatctcttagttcccttgcccaaacaagaatattcttagttccactggccaggattttcctacatagtcagaacttacacattactagaggcacacccaccaaggagtattgtgtctacttttatctgtgcaccagccacaaatacccacattggaaagacccatttgtgatgggtaaacatcccttcctgtctcccacaacccctgtgactgccctgcatgtgttcatgacctccgaaggcccaaattcatgaagcagcaaacccagcagatctccacccccctgcctcaggacctctgctgaagagggggatgaagtgggtctccagggaggcagtgggggccttgttggcagctggctcgggagccggcttacaggagggcagctctgcagttgggaggggcaccgtccggaggagaccaggcctctacacaccccccactctacttatcatccctgctcacacacccttgtccaaggctttatgcatcggatttatttttccaaatcaagaggacagtgatagatgcattttccccaggctgtctcagaaaggtcgctaaatgtatactgttgtcagaattgctgagatctccccccacttttggtttttgcagcagtaaaaactctttccactgtgacttattttctctctcaggcagccagccacctggtcccttgtgctgactctagcacagtggccaggatccaatacgagtccaggggtgaccgcaggatggtgggggcagcgggcttctccacctaccccagccaccaaggccctgacgcactgcctcctgcaccttcagcacatccctgtgcacagctggaagggtgcatggcccgctcacctttgttcagatgggtggaaacgctgatgataccagctcctccctgccgtgcccctgccacggagcaggcattgtgaactggctggtgtttgcagtcccacgtggcatggcctccagcccaacccacagtggagactggagacagggcaatgagtctggtcgggggcacgtggacatgccccataggggccccacccagacttaacaggcaaggtcctgggcattgcgcgacgcaggactcaatgctaaagcaagcctgcctggctctgtgccagggcccctcttctgatttacacatcccatttttacacagacccttccttcttaataaaggctgacagttctgttggcagccaagaacccacaccatgaagacagggagtgaggggcctttgtgcccaactccagcacagctgcgttctggggtgtgtgagaggcatgttcgtgtctgtgcgctggtggtctcgtgagacagttccgaggacggggaaattgcagggtggtgggggcgtgaggcttatatgtggaactgatgcagagttcgcctgcagacggatctggatatacactatgtataattgttacgtgtaatttaaaatatatctgtttgccatcgtcatgagaagattatatgtaaggctctgaagggagagggagatgtacattctgccaggctcctggggaccttatccgagtcatgaaattgatgactgttgatccagtggtgcaagaagctacactccatgtgtcatcacgcttatgactcctaatgtatttttaaggcaaaaaatgtcagccgactccatcttcacccctcgattcctcgagtccagcctttctgtgccagtgcttcactgagccacaacgctctcgccatcgggacccggctgggcctggagtctcggggcacagttgccatggagccctcctgggtcattctacaaatgtgctgagtgccagctgaaaaccccacaggagatggagtaccttggccaagcttaaagagaagattttctcagggtatttattagtgtgtccagcagggtcaggaagcaggatggaaagatgcattcagactgttaatttattaacaaggcaaatgattttgtgtttcttgatgacagactattaagtttgggacttattttcccatttgagaagttataatatatatttaagatgataagtttcctgcttaagttgtgcctttcagcttcaatgagtttaaggagcactaagggtaatgataccaatgagggttggtttattatcaaacctgaatagctgtggtttctccagtaaatattttcttctactgaacatggagccattattaagagttgtgtgttttttattatgtacatttgtatatttttttgcttgtttgatgttctatttttctaatagttttcttttagtttcttaaagttgtgatactagatttagattctgatgctaactgcaaatcaggttggtctctgctgggtctctcctgcttttattttactttaaggacaagtgtagttgtcgtccaccacctttcaaaaaatgtgaaactgccctgcctcccctttttgctgacaacactgtgtacattgaccacttcctaccatactttatgttgtaaaatcaaactcttttgtggtacattatctcatgcttctgcaaattcgaataaattctatggcttccaaaaaaaaaaaaaaa

SEQ ID NO: 1121 - protein, 629 aa, Homo sapiens
MGCKVLLNIGQQMLRRKVVDCSREETRLSRCLNTFDLVALGVGSTLGAGVYVLAGAVARENAGPAIVISFLIAALASVLAGLCYGEFGARVPKTGSAYLYSYVTVGELWAFITGWNLILSYIIGTSSVARAWSATFDELIGRPIGEFSRTHMTLNAPGVLAENPDIFAVIIILILTGLLTLGVKESAMVNKIFTCINVLVLGFIMVSGFVKGSVKNWQLTEEDFGNTSGRLCLNNDTKEGKPGVGGFMPFGFSGVLSGAATCFYAFVGFDCIATTGEEVKNPQKAIPVGIVASLLICFIAYFGVSAALTLMMPYFCLDNNSPLPDAFKHVGWEGAKYAVAVGSLCALSASLLGSMFPMPRVIYAMAEDGLLFKFLANVNDRTKTPIIATLASGAVAAVMAFLFDLKDLVDLMSIGTLLAYSLVAACVLVLRYQPEQPNLVYQMASTSDELDPADQNELASTNDSQLGFLPEAEMFSLKTILSPKNMEPSKISGLIVNISTSLIAVLIITFCIVTVLGREALTKGALWAVFLLAGSALLCAVVTGVIWRQPESKTKLSFKVPFLPVLPILSIFVNVYLMMQLDQGTWVRFAVWMLIGFIIYFGYGLWHSEEASLDADQARTPDGNLDQCK

SEQ ID NO: 1122 - DNA, 3453 bp, Homo sapiens
cacggtgcctgcacgggacgccgctcgatccccgagccccctcgccgtccccgacagcccccccggcgccatgcaatcccggcttctactcctcggggcacccggaggccacggcggcccggcctcgcggcgcatgcggctgctcctgcggcaggtggtgcagcgcaggccgggtggcgacaggcagcggccggaggtcagactgttgcacgccggctcgggggccgacacaggtgatacagttaatattggagatgtatcctacaagttgaaaattcctaagaatccagaacttgtgccacagaactacatttcagactctctggctcaatctgtagttcagcatctaagatggataatgcagaaggatcttttggggcaagatgtttttctaataggacctcctgggcctcttcgacgctctattgctatgcagtacttggagctgaccaaacgggaggtcgaatacattgccctgtcaagggacaccactgaaactgatctcaaacagcgacgagagatccgtgcaggcacagccttttacattgatcagtgtgcagttcgtgcagccacagaaggcagaactctcattttggaaggtttggaaaaggcagagaggaatgttttgcctgttttgaacaacttgctggaaaacagagagatgcagcttgaagatggacgcttcctgatgtctgctgagcgttacgacaaacttctccgagatcataccaaaaaagagttggattcttggaaaattgtccgagttagtgaaaatttccgagtgattgccttgggcttgccagtgccaaggtattctgggaatccattagacccccctcttcgttctcgatttcaagccagggatatttattatttacccttcaaggaccaacttaagttgttatattcaattggagccaatgtttctgctgagaaagtttctcagctcttgtcctttgccacaactctgtgttcccaagaatcttctactcttggacttccagactttcctttagatagtttagcagctgcggttcaaatcttggattcctttcctatgatgccaatcaaacatgcaatccagtggctttatccatatagtattttactaggtcatgaagggaagatggctgtggaaggtgttttaaagcgctttgaacttcaagattcaggaagctctctacttcctaaagagattgtaaaagtagagaagatgatggaaaaccatgtgtcccaagcttctgtgaccatccggattgcagataaagaggtgaccattaaggtgccagccgggaccaggctattaagtcaaccttgtgcgtcagaccgtttcatacagactttgagccataagcagctacaggctgaaatgatgcagtctcacatggttaaagatatatgtttaattggaggaaagggttgtggaaaaacagtgatcgctaagaactttgccgataccttaggatacaacatagaacctattatgctctatcaggatatgacagcgcgtgatctgctacagcagagatacacccttccaaatggagacactgcctggcggtcctcaccccttgtgaatgctgctctggaaggcaagctggtcctgctggatggcattcaccgggtgaatgcgggcacgcttgctgtattgcaaaggttaatccatgatcgagagctaagcctctatgatggttctaggctgctgagagaagacaggtatatgcgtttaaaggaggagctgcaactgtctgatgaacagctacagaagagatccatttttcctatccatccctccttcagaatcattgccttggcagaaccccctgttattggaagcacagcacaccagtggctgggaccagaattcttaaccatgttctttttccattacatgaaaccacttgtgaaaagtgaagaaatccaagtgattaaggaaaaggtcccaaatgtacctcaggaagctctggataagttattatcatttacacacaaactcagagaaacacaggatccaacggcacaatcattagcggcatcactttctaccagacaactgttgcgaatttctcgtcggctgtcacagtatcctaatgaaaatcttcacagtgctgttactaaagcctgcctttccaggtttttacccagtcttgctaggtcagcattagaaaaaaatctggcagatgctacaatagaaataaatactgatgacaatttggagccagaactgaaggattacaaatgtgaagtaacatctggaactctgaggattggtgctgttagtgcaccgatctataatgcacatgagaaaatgaaagtgcctgatgttcttttctatgacaacattcagcatgtgatagtgatggaagatatgctgaaagactttctccttggagaacacttattattggttggcaaccagggtgtaggaaaaaacaagattgttgacagattccttcacctgctcaacagaccccgagaatatattcagctacacagggataccacagtacaaactcttacgcttcagccttcggttaaagacggacttattgtatatgaagactcacctttggttaaagcagtaaagttgggtcatattctggtagtagatgaggctgacaaagctccaacaaatgtcacgtgtattttaaaaactctagtagaaaatggagaaatgattctagcagatggaagacgcattgttgcaaattctgctaatgtgaatggaagagaaaatgttgtagtgattcatcctgattttaggatgattgttctggcaaatagacctggatttcctttcctaggcaatgatttcttcggtaccttaggtgatatttttagctgccatgcagttgataaccccaaaccccactcggagctcgagatgctcagacagtatggaccaaatgtgcctgagcccatccttcagaagcttgtggctgcctttggagagctgaggagtttggctgaccaagggattattaactatccttattctaccagagaagttgtcaacatagtcaaacatttacagaaatttccgactgaaggtctctccagtgtagttcgaaatgtgtttgactttgattcctacaacaatgacatgagggagatattgattaacactttacacaaatacgggatacctatcggagcaaagcctaccagtgtgcagctggcaaaggagtaaggcaaattcagtactcttctgattcttaaatgctgatagttcttgatttatcattccattctacaaaactgagttgctatggaaattactttccatgagtaagcttttcaaatacatgtatatgttgctgtttgctggctgcttttcagttaaatagcattatttataggcctgtaaattgaaaattttgattattatgtatgtcccatgagtagatgtaataaataaagggaaatatttgtttctttaaaaaaaaaaaaaaa

SEQ ID NO: 1123 - protein, 1039 aa, Homo sapiens
MQSRLLLLGAPGGHGGPASRRMRLLLRQVVQRRPGGDRQRPEVRLLHAGSGADTGDTVNIGDVSYKLKIPKNPELVPQNYISDSLAQSVVQHLRWIMQKDLLGQDVFLIGPPGPLRRSIAMQYLELTKREVEYIALSRDTTETDLKQRREIRAGTAFYIDQCAVRAATEGRTLILEGLEKAERNVLPVLNNLLENREMQLEDGRFLMSAERYDKLLRDHTKKELDSWKIVRVSENFRVIALGLPVPRYSGNPLDPPLRSRFQARDIYYLPFKDQLKLLYSIGANVSAEKVSQLLSFATTLCSQESSTLGLPDFPLDSLAAAVQILDSFPMMPIKHAIQWLYPYSILLGHEGKMAVEGVLKRFELQDSGSSLLPKEIVKVEKMMENHVSQASVTIRIADKEVTIKVPAGTRLLSQPCASDRFIQTLSHKQLQAEMMQSHMVKDICLIGGKGCGKTVIAKNFADTLGYNIEPIMLYQDMTARDLLQQRYTLPNGDTAWRSSPLVNAALEGKLVLLDGIHRVNAGTLAVLQRLIHDRELSLYDGSRLLREDRYMRLKEELQLSDEQLQKRSIFPIHPSFRIIALAEPPVIGSTAHQWLGPEFLTMFFFHYMKPLVKSEEIQVIKEKVPNVPQEALDKLLSFTHKLRETQDPTAQSLAASLSTRQLLRISRRLSQYPNENLHSAVTKACLSRFLPSLARSALEKNLADATIEINTDDNLEPELKDYKCEVTSGTLRIGAVSAPIYNAHEKMKVPDVLFYDNIQHVIVMEDMLKDFLLGEHLLLVGNQGVGKNKIVDRFLHLLNRPREYIQLHRDTTVQTLTLQPSVKDGLIVYEDSPLVKAVKLGHILVVDEADKAPTNVTCILKTLVENGEMILADGRRIVANSANVNGRENVVVIHPDFRMIVLANRPGFPFLGNDFFGTLGDIFSCHAVDNPKPHSELEMLRQYGPNVPEPILQKLVAAFGELRSLADQGIINYPYSTREVVNIVKHLQKFPTEGLSSVVRNVFDFDSYNNDMREILINTLHKYGIPIGAKPTSVQLAKE

SEQ ID NO: 1124 - DNA, 7169 bp, Homo sapiens
cacggtgcctgcacgggacgccgctcgatccccgagccccctcgccgtccccgacagcccccccggcgccatgcaatcccggcttctactcctcggggcacccggaggccacggcggcccggcctcgcggcgcatgcggctgctcctgcggcaggtggtgcagcgcaggccgggtggcgacaggcagcggccggaggtcagactgttgcacgccggctcgggggccgacacaggtgatacagttaatattggagatgtatcctacaagttgaaaattcctaagaatccagaacttgtgccacagaactacatttcagactctctggctcaatctgtagttcagcatctaagatggataatgcagaaggatcttttggggcaagatgtttttctaataggacctcctgggcctcttcgacgctctattgctatgcagtacttggagctgaccaaacgggaggtcgaatacattgccctgtcaagggacaccactgaaactgatctcaaacagcgacgagagatccgtgcaggcacagccttttacattgatcagtgtgcagttcgtgcagccacagaaggcagaactctcattttggaaggtttggaaaaggcagagaggaatgttttgcctgttttgaacaacttgctggaaaacagagagatgcagcttgaagatggacgcttcctgatgtctgctgagcgttacgacaaacttctccgagatcataccaaaaaagagttggattcttggaaaattgtccgagttagtgaaaatttccgagtgattgccttgggcttgccagtgccaaggtattctgggaatccattagacccccctcttcgttctcgatttcaagccagggatatttattatttacccttcaaggaccaacttaagttgttatattcaattggagccaatgtttctgctgagaaagtttctcagctcttgtcctttgccacaactctgtgttcccaagaatcttctactcttggacttccagactttcctttagatagtttagcagctgcggttcaaatcttggattcctttcctatgatgccaatcaaacatgcaatccagtggctttatccatatagtattttactaggtcatgaagggaagatggctgtggaaggtgttttaaagcgctttgaacttcaagattcaggaagctctctacttcctaaagagattgtaaaagtagagaagatgatggaaaaccatgtgtcccaagcttctgtgaccatccggattgcagataaagaggtgaccattaaggtgccagccgggaccaggctattaagtcaaccttgtgcgtcagaccgtttcatacagactttgagccataagcagctacaggctgaaatgatgcagtctcacatggttaaagatatatgtttaattggaggaaagggttgtggaaaaacagtgatcgctaagaactttgccgataccttaggatacaacatagaacctattatgctctatcaggatatgacagcgcgtgatctgctacagcagagatacacccttccaaatggagacactgcctggcggtcctcaccccttgtgaatgctgctctggaaggcaagctggtcctgctggatggcattcaccgggtgaatgcgggcacgcttgctgtattgcaaaggttaatccatgatcgagagctaagcctctatgatggttctaggctgctgagagaagacaggtatatgcgtttaaaggaggagctgcaactgtctgatgaacagctacagaagagatccatttttcctatccatccctccttcagaatcattgccttggcagaaccccctgttattggaagcacagcacaccagtggctgggaccagaattcttaaccatgttctttttccattacatgaaaccacttgtgaaaagtgaagaaatccaagtgattaaggaaaaggtcccaaatgtacctcaggaagctctggataagttattatcatttacacacaaactcagagaaacacaggatccaacggcacaatcattagcggcatcactttctaccagacaactgttgcgaatttctcgtcggctgtcacagtatcctaatgaaaatcttcacagtgctgttactaaagcctgcctttccaggtttttacccagtcttgctaggtcagcattagaaaaaaatctggcagatgctacaatagaaataaatactgatgacaatttggagccagaactgaaggattacaaatgtgaagtaacatctggaactctgaggattggtgctgttagtgcaccgatctataatgcacatgagaaaatgaaagtgcctgatgttcttttctatgacaacattcagcatgtgatagtgatggaagatatgctgaaagactttctccttggagaacacttattattggttggcaaccagggtgtaggaaaaaacaagattgttgacagattccttcacctgctcaacagaccccgagaatatattcagctacacagggataccacagtacaaactcttacgcttcagccttcggttaaagacggacttattgtatatgaagactcacctttggttaaagcagtaaagttgggtcatattctggtagtagatgaggctgacaaagctccaacaaatgtcacgtgtattttaaaaactctagtagaaaatggagaaatgattctagcagatggaagacgcattgttgcaaattctgctaatgtgaatggaagagaaaatgttgtagtgattcatcctgattttaggatgattgttctggcaaatagacctggatttcctttcctaggcaatgatttcttcggtaccttaggtgatatttttagctgccatgcagttgataaccccaaaccccactcggagctcgagatgctcagacagtatggaccaaatgtgcctgagcccatccttcagaagcttgtggctgcctttggagagctgaggagtttggctgaccaagggattattaactatccttattctaccagagaagttgtcaacatagtcaaacatttacagaaatttccgactgaaggtctctccagtgtagttcgaaatgtgtttgactttgattcctacaacaatgacatgagggagatattgattaacactttacacaaatacgggatacctatcggagcaaagcctaccagtgtgcagctggcaaaggagttgactctgccagaacaaacgttcatgggctactggacaattggtcaggcaagaagtgggatgcaaaaactcttgtgtccagtggaaactcatcatatagacataaagggtccagcacttataaatatacaggagtatccaatagaaagacatgaagaaagatccctaaactttactgaagaatgtgcctcatggagaataccattggatgaaattaatataatctgtgacattgctacatcacatgaaaatgagcaaaatactctctatgtagttacatgcaatcccgcttccctgtactttatgaatatgactgggaaaagtggcttctttgtggacttttttgatatcttcccaagaacagccaatggcgtttggcacccttttgtgacagtggcaccgctgggaagtcctctcaaaggtcaagtggttctccatgagcagcagagtaatgttatcctgttgttagatactactggccgggcccttcatcgtctcatcctcccttccgagaagtttacatctaagaaacctttctggtggaacaaagaagaagctgaaacttataaaatgtgtaaagaattttcacacaaaaactggctggtgttctacaaagaaaaagggaacagcctgactgtgctggatgttctagaagggcgaactcacaccatctcacttcccatcaacctcaagacagttttccttgtagcagaggacaaatggcttctggtggagagcaaaacaaatcagaaatatcttttaactaagcctgcacacatcgaatctgagggtagtggggtttgccagttgtatgtgctgaaagaggagccgcccagcacagggtttggagttacacaagaaacagagttcagcatacctcataaaatttccagtgatcaactatcatctgaacatctaagttcagctgtggaacaaaagattgcctctcccaacagaattctctcagatgagaaaaattatgctacaatagttgttggttttccagatctcatgtcacccagtgaagtttattcttggaagagaccatcatctttgcataaacgaagtggcactgatacatcattctatagaggaaagaagaaaagggggactccaaaacaaagcaattgtgtgactcttttagatacgaatcaggtagtgaggattttacccccaggagaagtccctctaaaagatatctacccaaaagatgttactcctccacaaacatctggttatatagaagtcactgatcttcaatcaaagaaactccgatatatccctattcccagatcagaatctctctcgccgtataccacatggctgtcgaccatttcagacacagatgcactgctggctgagtgggacaaaagcggtgttgttactgttgatatgggaggtcacatcaggctttgggaaactggacttgaacgtctgcagcgatcactcatggaatggagaaacatgattggacaagatgacagaaatatgcagataacaatcaacagagacagtggtgaagatgtaagctcccccaaacacgggaaggaggacccagacaacatgcctcacgtgggcggcaacacttgggctggcggaacagggggaagagacacggcaggcctgggtggcaaaggaggcccttaccggctggatgcaggccatacggtgtaccaggtctctcaggctgagaaagatgcagttcccgaagaggtcaagagagctgctagagagatgggccagagagcattccagcagaggctaaaggagatccaaatgagtgaatacgatgctgcaacctatgaaaggttttcaggtgctgttcggcgacaggtgcactccctccgaatcatcctggataatttacaggctaaaggtaaagaaagacaatggctaagacatcaagctactggagaattagatgatgccaagatcattgatgggctgactggagaaaaagccatctacaaacgtcggggtgagctggagccacaacttggcagcccacaacagaaacccaagcgtctgcgcctggtggtagatgtgtctggtagcatgtaccgtttcaacaggatggatggccggcttgagcgcacaatggaggctgtgtgtatggtcatggaagccttcgagaactatgaggagaagttccagtatgacatcgttggacactctggagatggctacaacattggtctggttccaatgaacaaaatccccaaggacaataagcaaagactagaaattctgaagacaatgcatgcccactctcagttctgcatgagtggggaccacacgttagaagggacagaacatgccatcaaggaaattgtcaaagaagaagctgatgagtactttgtcatagtcttgagtgatgcaaatctgtcacgatatggaatacatcctgctaagtttgctcaaatcctcacaagagaccctcaagtaaatgcttttgccatttttattggctctttaggtgatcaagcaaccaggcttcagagaactttaccagctggtcggtctttcgttgccatggataccaaggatatccctcagattttacaacagatcttcacctccaccatgttgtcgagtgtctaagaagtgcccttcatcaccctgatgacaccaggatttgaaataagacaggaataaagagtattctgaaaaaaagaagatatggatgaagtgaacccatgcagtgactggatgattccggcattcctgggtcttcctacacttgctccgtaatgagaattcagagaagcagccagaaggagacttaaacatggaaagatactccactgatgagtttagaagtgattagggcaagctagttgacctgcactttatcaaaggttggggttaaaggaaggtggttttgagaactatgtgtttggtctatttccaaaaacctgagggggagaaaatactttgcttttgccttaacacatcatctggtcacgttagaaaagtgaccccatcaaactgagcctttgatgtcacattctgacacaagatgcaagtctgtgcaaaacccaccaaaatgctcctatccaacaattatttttattttctccctgctctgtattgaccagaaaacaatgattttataatatttaacccaccaaaaagtccctccaacagcaatatcttatgaaaggctggctgttctcaataatttcattttcttggccaaagccaaaaggaatcaaaaaatccttggagtgcttgcctttccacgtgacttttaaaaggctcttaaagagcaaatgtcctcttctccttgctgctagagtgggaggagaaagatgtcttgccttaaaagtttactgtttcttctgttcttctagcatctctcaaaaaattcacagtactccattttggggtccaaactgtaatgctcaaaataataaatgcttacacgaaaattatttattgagaatattcatataaaaattacctaaagcaaagtaaaaaaagtaaaatcaaggtggtatatttgaagtgaatggtgattggaaatttttagctgtaacaaaaagaaagaaaacaactttttttaaagcctcattctcttttctttcaaaatgtaccttattcccacacactcttgggctgacctttattttatcaataagctcaatattactttgtttaaaataagatgcttcagcaaaagtcattctctctttaaccatataatttaaaaactcctcttcacgattgatagcaaaatcagaaacgttagggcaccagtgagttgaaaaaactggtcttaagttggaaaaactattattaataatattatcctatccatccatatctattgaaattgtacaggtccataatttcattttaattaattataggaaagaagaaaagataatacccatttgttctatcacccctctccctatcattaactatcaaataaataaataaaagcaatctgatttccaacgtggtactaaaaaaaaaa

SEQ ID NO: 1125 - protein, 1905 aa, Homo sapiens
MQSRLLLLGAPGGHGGPASRRMRLLLRQVVQRRPGGDRQRPEVRLLHAGSGADTGDTVNIGDVSYKLKIPKNPELVPQNYISDSLAQSVVQHLRWIMQKDLLGQDVFLIGPPGPLRRSIAMQYLELTKREVEYIALSRDTTETDLKQRREIRAGTAFYIDQCAVRAATEGRTLILEGLEKAERNVLPVLNNLLENREMQLEDGRFLMSAERYDKLLRDHTKKELDSWKIVRVSENFRVIALGLPVPRYSGNPLDPPLRSRFQARDIYYLPFKDQLKLLYSIGANVSAEKVSQLLSFATTLCSQESSTLGLPDFPLDSLAAAVQILDSFPMMPIKHAIQWLYPYSILLGHEGKMAVEGVLKRFELQDSGSSLLPKEIVKVEKMMENHVSQASVTIRIADKEVTIKVPAGTRLLSQPCASDRFIQTLSHKQLQAEMMQSHMVKDICLIGGKGCGKTVIAKNFADTLGYNIEPIMLYQDMTARDLLQQRYTLPNGDTAWRSSPLVNAALEGKLVLLDGIHRVNAGTLAVLQRLIHDRELSLYDGSRLLREDRYMRLKEELQLSDEQLQKRSIFPIHPSFRIIALAEPPVIGSTAHQWLGPEFLTMFFFHYMKPLVKSEEIQVIKEKVPNVPQEALDKLLSFTHKLRETQDPTAQSLAASLSTRQLLRISRRLSQYPNENLHSAVTKACLSRFLPSLARSALEKNLADATIEINTDDNLEPELKDYKCEVTSGTLRIGAVSAPIYNAHEKMKVPDVLFYDNIQHVIVMEDMLKDFLLGEHLLLVGNQGVGKNKIVDRFLHLLNRPREYIQLHRDTTVQTLTLQPSVKDGLIVYEDSPLVKAVKLGHILVVDEADKAPTNVTCILKTLVENGEMILADGRRIVANSANVNGRENVVVIHPDFRMIVLANRPGFPFLGNDFFGTLGDIFSCHAVDNPKPHSELEMLRQYGPNVPEPILQKLVAAFGELRSLADQGIINYPYSTREVVNIVKHLQKFPTEGLSSVVRNVFDFDSYNNDMREILINTLHKYGIPIGAKPTSVQLAKELTLPEQTFMGYWTIGQARSGMQKLLCPVETHHIDIKGPALINIQEYPIERHEERSLNFTEECASWRIPLDEINIICDIATSHENEQNTLYVVTCNPASLYFMNMTGKSGFFVDFFDIFPRTANGVWHPFVTVAPLGSPLKGQVVLHEQQSNVILLLDTTGRALHRLILPSEKFTSKKPFWWNKEEAETYKMCKEFSHKNWLVFYKEKGNSLTVLDVLEGRTHTISLPINLKTVFLVAEDKWLLVESKTNQKYLLTKPAHIESEGSGVCQLYVLKEEPPSTGFGVTQETEFSIPHKISSDQLSSEHLSSAVEQKIASPNRILSDEKNYATIVVGFPDLMSPSEVYSWKRPSSLHKRSGTDTSFYRGKKKRGTPKQSNCVTLLDTNQVVRILPPGEVPLKDIYPKDVTPPQTSGYIEVTDLQSKKLRYIPIPRSESLSPYTTWLSTISDTDALLAEWDKSGVVTVDMGGHIRLWETGLERLQRSLMEWRNMIGQDDRNMQITINRDSGEDVSSPKHGKEDPDNMPHVGGNTWAGGTGGRDTAGLGGKGGPYRLDAGHTVYQVSQAEKDAVPEEVKRAAREMGQRAFQQRLKEIQMSEYDAATYERFSGAVRRQVHSLRIILDNLQAKGKERQWLRHQATGELDDAKIIDGLTGEKAIYKRRGELEPQLGSPQQKPKRLRLVVDVSGSMYRFNRMDGRLERTMEAVCMVMEAFENYEEKFQYDIVGHSGDGYNIGLVPMNKIPKDNKQRLEILKTMHAHSQFCMSGDHTLEGTEHAIKEIVKEEADEYFVIVLSDANLSRYGIHPAKFAQILTRDPQVNAFAIFIGSLGDQATRLQRTLPAGRSFVAMDTKDIPQILQQIFTSTMLSSV

SEQ ID NO: 1126 - DNA, 622 bp, Homo sapiens
ctgaagctttcccaagcggctgccgaagatggcggaggtgcaggtcctggtgcttgatggtagaggccatctcctgggccgcctggcggccatcgtggctaaacaggtactgctgggccggaaggtggtggtcgtatgctgcgaaggcatcaacatttctggcaatttctacagaaacaagttgaactacctggctttcctccgcaagcggatgaacaccagcccttccagaggtccctaccacttccgggctcccagccgcgtcttctggcggacggtgcgaggtatgctgccccacaagaccaagcgaggccaggccgctttggaccgtctcaaggtcgtgcgtctgaagcctacaagaaagtttgcctatctggggcgcctggctcatgaggttggctggaagtaccaggcagtgacagccaccctggaggagaagaggaaagagaaagccaagatccactaccggaagaagaaacagctcatgaggctacggaaacaggccgagaagaacgtggagaagaaaattgacaaatacacagaggtcctcaagacccacggactcctggtctgagcccaataaagactgttaattcctcaaaaaaaaaaaaaaaaaggaacc

SEQ ID NO: 1127 - DNA, 702 bp, Homo sapiens
aaaataaaactctttcccaagcggctgccgaagatggcggaggtgcaggtcctggtgcttgatggtagaggccatctcctgggccgcctggcggccatcgtggctaaacaggtactgctgggccggaaggtggtggtcgtatgctgcgaaggcatcaacatttctggcaatttctacagaaacaagttgaactacctggctttcctccgcaagcggatgaacaccagcccttccagaggtccctaccacttccgggctcccagccgcgtcttctggcggacggtgcgaggtatgctgccccacaagaccaagcgaggccaggccgctttggaccgtctcaaggtgtctgacggcatcccaccgccctacgacaagaaaaagcggatggtggttcctgctgccctcaaggtcgtgcgtctgaagcctacaagaaagtttgcctatctggggcgcctggctcatgaggttggctggaagtaccaggcagtgacagccaccctggaggagaagaggaaagagaaagccaagatccactaccggaagaagaaacagctcatgaggctacggaaacaggccgagaagaacgtggagaagaaaattgacaaatacacagaggtcctcaagacccacggactcctggtctgagcccaataaagactgttaattcctcaaaaaaaaaaaaaaaaaggaacctgaaaagac

SEQ ID NO: 1128 - DNA, 8009 bp, Homo sapiens
gatttcgggggagagccttttccgaggaagagagggaggagcctggtggggagaggaaactacaaatcgggacactagttctttacgctgcatttcctcccctccctttggctgctcggaaaggagagagaggaaaaaaaaaatacgcttggctggtagatgcagtccgccgccgccgctgcctcagccagcaatgcaagattagatctctaaatgcagcaaaacactgcctgaaaacagaccggcccgcgcagcaagcagacatttcacggtgcgctggggaagcttcaaaatatatctgtgactctgtcttcgttgctcttcatccccatcaatttcatcacgggaggcgagcagcaagtaagaatttcactttcggatctgcctagagacacacctccctgctccctcccccactcgatgtgaagagtattccggagtctccgggcgggagtagatttgcagcaccctagcgggagcgaggaaaacctactgattctttagctcattatcatctctcccagacgagatttccttcttatcgcctgcctcatcgctcaagtttgagcctcccgaagtccgggcgggagagacgaaacccctggctcacccccagccgcaggaagccaccgccttgctccaagcccctgcagctctgctgcaccgcagcttctcacccagtgcggatgctgtagatcaacaggttcagggaacttgagcagaataaggagagaccaccgggtgccgcagctcgggtgcagagggaaaaaaggacccatagacttgtggctcgcgtcgcgcgcgcacgctgcgccagggccccaggctggcgcgcactccctctctggctcctccagtccgattgctcctgcccccaccttacaggtctgggatgtacctttccatctgttgctgctttcttctatgggcccctgccctcactctcaagaacctcaactactccgtgccggaggagcaaggggccggcacggtgatcgggaacatcggcagggatgctcgactgcagcctgggcttccgcctgcagagcgcggcggcggagggcgcagcaagtcgggtagctaccgggtgctggagaactccgcaccgcacctgctggacgtggacgcagacagcgggctcctctacaccaagcagcgcatcgaccgcgagtccctgtgccgccacaatgccaagtgccagctgtccctcgaggtgttcgccaacgacaaggagatctgcatgatcaaggtagagatccaggacatcaacgacaacgcgccctccttctcctcggaccagatcgaaatggacatctcggagaacgctgctccgggcacccgcttccccctcaccagcgcacatgaccccgacgccggcgagaatgggctccgcacctacctgctcacgcgcgacgatcacggcctctttggactggacgttaagtcccgcggcgacggcaccaagttcccagaactggtcatccagaaggctctggaccgcgagcaacagaatcaccatacgctcgtgctgactgccctggacggtggcgagcctccacgttccgccaccgtacagatcaacgtgaaggtgattgactccaacgacaacagcccggtcttcgaggcgccatcctacttggtggaactgcccgagaacgctccgctgggtacagtggtcatcgatctgaacgccaccgacgccgatgaaggtcccaatggtgaagtgctctactctttcagcagctacgtgcctgaccgcgtgcgggagctcttctccatcgaccccaagaccggcctaatccgtgtgaagggcaatctggactatgaggaaaacgggatgctggagattgacgtgcaggcccgagacctggggcctaaccctatcccagcccactgcaaagtcacggtcaagctcatcgaccgcaacgacaatgcgccgtccatcggtttcgtctccgtgcgccagggggcgctgagcgaggccgcccctcccggcaccgtcatcgccctggtgcgggtcactgaccgggactctggcaagaacggacagctgcagtgtcgggtcctaggcggaggagggacgggcggcggcgggggcctgggcgggcccgggggttccgtccccttcaagcttgaggagaactacgacaacttctacacggtggtgactgaccgcccgctggaccgcgagacacaagacgagtacaacgtgaccatcgtggcgcgggacgggggctctcctcccctcaactccaccaagtcgttcgcgatcaagattctagacgagaacgacaacccgcctcggttcaccaaagggctctacgtgcttcaggtgcacgagaacaacatcccgggagagtacctgggctctgtgctcgcccaggatcccgacctgggccagaacggcaccgtatcctactctatcctgccctcgcacatcggcgacgtgtctatctacacctatgtgtctgtgaatcccacgaacggggccatctacgccctgcgctcctttaacttcgagcagaccaaggcttttgagttcaaggtgcttgctaaggactcgggggcgcccgcgcacttggagagcaacgccacggtgagggtgacagtgctagacgtgaatgacaacgcgccagtgatcgtgctccccacgctgcagaacgacaccgcggagctgcaggtgccgcgcaacgctggcctgggctatctggtgagcactgtgcgcgccctagacagcgacttcggcgagagcgggcgtctcacctacgagatcgtggacggcaacgacgaccacctgtttgagatcgacccgtccagcggcgagatccgcacgctgcaccctttctgggaggacgtgacgcccgtggtggagctggtggtgaaggtgaccgaccacggcaagcctaccctgtccgcagtggccaagctcatcatccgctcggtgagcggatcccttcccgagggggtaccacgggtgaatggcgagcagcaccactgggacatgtcgctgccgctcatcgtgactctgagcactatctccatcatcctcctagcggccatgatcaccatcgccgtcaagtgcaagcgcgagaacaaggagatccgcacttacaactgccgcatcgccgagtacagccacccgcagctgggtgggggcaagggcaagaagaagaagatcaacaaaaatgatatcatgctggtgcagagcgaagtggaggagaggaacgccatgaacgtcatgaacgtggtgagcagcccctccctggccacctcccccatgtacttcgactaccagacccgcctgcccctcagctcgccccggtcggaggtgatgtatctcaaaccggcctccaacaacctgactgtccctcaggggcacgcgggctgccacaccagcttcaccggacaagggactaatgcaagcgagacccctgccactcggatgtccataattcagacagacaattttcccgcagagcccaattacatgggcagcaggcagcagtttgttcaaagtagctccacgtttaaggacccagaaagagccagcctgagagacagtgggcacggggacagtgatcaggctgacagtgaccaagacactaacaaaggctcctgctgtgacatgtctgttagggaggcactcaagatgaaaactacttcaactaaaagccaaccacttgaacaagaaccagaagagtgtgttaattgcacagatgaatgccgagtgcttggtcattctgacaggtgctggatgccacagttccctgcagccaatcaggctgaaaatgcagattaccgcacaaatctctttgtacctacagttgaagctaatgttgagactgagacttacgaaactgtgaatcccactgggaaaaagactttttgtacatttggaaaagacaagcgagagcacactattctcattgccaacgttaaaccttatttaaaagccaaacgtgccctgagccctctcctccaagaggtcccctcagcatcaagcagcccaaccaaggcgtgcatcgagccttgcacctcaacaaaaggctccctggatggctgtgaagcaaaaccaggagccctggctgaagcaagcagtcagtacttgcccactgacagtcaatatctgtcacctagtaagcaaccaagagaccctcccttcatggcttccgatcagatggcaagggtctttgcagatgtgcattccagagccagccgggattccagtgagatgggtgctgttcttgagcagcttgaccaccccaacagggatctgggcagagagtctgtggatgcagaggaagttgtgagagaaattgataagcttttgcaagactgccggggaaacgaccctgtggctgtgagaaagtgaaaaaagaaaaaaaaaaaggcattggcattttcttgtctcttctgttgatttaaaaatgatccctcctggtgataacccattttacagggatgaagaaagaccaatgctgctttaaggcttttagtgaacatctgaagtgcccacaagtatgttctttccactgctgatttctttttcagagataacaatggtttcgttttgaccaaacttgtattaggacagaattaatgatgcttaaagagaaaagaaaaaaagagagaagaaaaaggagagatgaaaaaggaggatgaggagaagaattaccttttgacaatctgttaggaaggtatgcagtgtgagaactgaagtatttctgatcactctcagactgtcctccgtgatttatgctgacttaactgtttacctataaaccccatacaaagcagggtcataatttgtgatctgtggtggatttctagcagtcatcacaggcttctactgaaagtcctgaaaagaccttgcagtagtccaagctacaccaaacattaacacatatttgtggtaaacatttctgtataaagttacctgacacacatataaacacaaggaacattccatatcattagtcgaaaacaaaaacaaaaaaaaaacctttggtcatttgtaagacatctcatgtcatataaaagttaaatgtaaaaagatacagtccattttgtcctgcacacacgtagactaattcacgtcattaaagaagaagaaaacttaaagatttaaaatgcctatttagcattttagtgtccaacaaagatttaaacaatgatgaatatgttttaaatttgacatagaaaagttctaaaaaatagttaccattgagtggtaagattcagagaaaattaacttgattaatatgttttattcatttgtggacactaaaatagctcaggaaagtgaaaatgtcttagacatacgcaagtcacatgaccatttaaatgtgcaaatgtaagaagattcaatgtgtttacatcaaatgacatattttattgatttattgcagattcagtgcatatgagccaaattgttgagtgtgtaagagctatattgtgtattttattaaattaatatatagttgtgttgcaaaaatatttgggcttatattgtaaatggcaagtgttgccttggtagctgtcgaactctatgagttttgttttttcctgcttccttttccccatggagtgtgggaagcagtgcctcagagcaaagtctcttgtttaatgtatagtctaccaagtactacagtacataatctgttcaaaatgtgtttgagtgagctgatggagctaactgaaaggtcaaaaattacatccatcagtcatggttatgtgcaagtccttgtagaagcttttattaaagtcatgctaaatcacaagaattgacatttgtaccaatatctgaaacttcttcatgttttttcaataacatacagcttctgcctgtgtagatattatgccatcagttggttctcaaaagtattttaagtgcttcagatgtgtgttcccattatattttgaaaacatgaaaaatgctttaatgcatgtatgtaccagcagtggttacttgcattgtgtagtgtttttcaagaggtctgggtcttaacaaaatgttttcctttatctcagtgctcttctgcctctttttgttggtgtcctttgagaacaatacaccttctattccttcatttggttacacctttccttgtgacatttagcgagtttcaaacttacttccatatgaggctaagaaacctcaaatttcaggaattgggaaaaataaaattagcacttgcagaagtagcagcagatgggaaaatgccttgattgacattttctttcagcatttaaaatttttggcattttacagcttcatgacaaacagttttgtgcccataccttagaaaatgtggtgctgagttaaataaaggctgtttgagcactggagcagaaaaatgcattatttgcaaactggtggataattttgtgccttctcttctggccaccaagccagtgtagaaacagcaaaaatgtcataaaaattcttatatttaaaacaaaaacaaaagcaaaaacaaacattgaattaaattaagttttgtaattttaaactttaaaaacttctactgaaaatatttccgccaaatgccatcaatattttagactgtacctcgtttgcaaaactgctttgagagggaagagtggacaactcccatcagccttattctcttgagaactatattttggttcctagtaacagcctttccaaagctctactcttggtttttattactcataaatgtttaaattagaaaagaagggaccttgtacatgtgaaacctaattgactctctatattttggacaatttatgtatctgaaatgtgttgtctctgttatatgatgttatttttgccaggagactacaggttgatttagcttgatagctgaaatttgatggaaaactgatttccatttagtcttaccaagtgttgcttctctcttactagacagatatccacttagtaaaatctaaagcagtatgtaaatgaaaccagcaaagagagtagggtttattttataaacattcttaatgctaagtaaccagttgttcaatttattatatgtgtctgaggacattaaaacaccataaggttgtaataattggttgtgccaatgtgtgagggatttacctttaggctctctgtcaccagtgatttactagtgttagctgtttaacacattatctgtatttagtagtgattatttatttacaagttggtggtaattcagcagtcaggactctaagcttttatagttgaattgaggaaatctcgcttttattcatttagctggcaactgcctttattgcagacctctggtgcttggctttcaaggaagcctatgagatgccaaaatcacacctttagagagcaccttgctctaataggtgatgcatgagcaaacagtgagatttgaaggggttttaacataatttagaatgtgaaaaaaatatcaattcatatctttcaagtactaacccctcaaaaaagcccacacatacaaaatatgtgatgtgataccactttgtcttttaggtctttaagtaactgaagttaagcacagaaaaaaaaatcacttcatggaaatttcagtaagaaacccaaacttctaaaaattgcttgcagatgagctaaaaaaaaaaaaaaaaaaaaaaagcaacaaaataaccttttcatcagagttaaaagtagtgagaatctgttagttatacgtataccaaagtaaacattaaagagacatatcatgcaatttcaaagaattctttcatgctatttcttaacctgacatttctaactttattgcaggcaatatacaaagattggctcactactccataggttaattgaattcctggttgagaaactaacttgttttgttttccaaaattagctgaaatcttgtaaaacatgacttccctttaaaggatctagatattgttcaatttaaaatatggcaccataaaaaagtcatgtagtaatagagcatatgcttttttagaaccaggttaaaagctgtttgttatctaatagagtaaaagttactgag

SEQ ID NO: 1129 - protein, 1159 aa, Homo sapiens
MYLSICCCFLLWAPALTLKNLNYSVPEEQGAGTVIGNIGRDARLQPGLPPAERGGGGRSKSGSYRVLENSAPHLLDVDADSGLLYTKQRIDRESLCRHNAKCQLSLEVFANDKEICMIKVEIQDINDNAPSFSSDQIEMDISENAAPGTRFPLTSAHDPDAGENGLRTYLLTRDDHGLFGLDVKSRGDGTKFPELVIQKALDREQQNHHTLVLTALDGGEPPRSATVQINVKVIDSNDNSPVFEAPSYLVELPENAPLGTVVIDLNATDADEGPNGEVLYSFSSYVPDRVRELFSIDPKTGLIRVKGNLDYEENGMLEIDVQARDLGPNPIPAHCKVTVKLIDRNDNAPSIGFVSVRQGALSEAAPPGTVIALVRVTDRDSGKNGQLQCRVLGGGGTGGGGGLGGPGGSVPFKLEENYDNFYTVVTDRPLDRETQDEYNVTIVARDGGSPPLNSTKSFAIKILDENDNPPRFTKGLYVLQVHENNIPGEYLGSVLAQDPDLGQNGTVSYSILPSHIGDVSIYTYVSVNPTNGAIYALRSFNFEQTKAFEFKVLAKDSGAPAHLESNATVRVTVLDVNDNAPVIVLPTLQNDTAELQVPRNAGLGYLVSTVRALDSDFGESGRLTYEIVDGNDDHLFEIDPSSGEIRTLHPFWEDVTPVVELVVKVTDHGKPTLSAVAKLIIRSVSGSLPEGVPRVNGEQHHWDMSLPLIVTLSTISIILLAAMITIAVKCKRENKEIRTYNCRIAEYSHPQLGGGKGKKKKINKNDIMLVQSEVEERNAMNVMNVVSSPSLATSPMYFDYQTRLPLSSPRSEVMYLKPASNNLTVPQGHAGCHTSFTGQGTNASETPATRMSIIQTDNFPAEPNYMGSRQQFVQSSSTFKDPERASLRDSGHGDSDQADSDQDTNKGSCCDMSVREALKMKTTSTKSQPLEQEPEECVNCTDECRVLGHSDRCWMPQFPAANQAENADYRTNLFVPTVEANVETETYETVNPTGKKTFCTFGKDKREHTILIANVKPYLKAKRALSPLLQEVPSASSSPTKACIEPCTSTKGSLDGCEAKPGALAEASSQYLPTDSQYLSPSKQPRDPPFMASDQMARVFADVHSRASRDSSEMGAVLEQLDHPNRDLGRESVDAEEVVREIDKLLQDCRGNDPVAVRK

SEQ ID NO: 1130 - DNA, 459 bp, Homo sapiens
atggctgaccaactgactggagagcagattgtagaattcaaataagcttatttactatttgacaaagacggtgatggaactataacaacaaaggaactgggaacagaaatgaggtctcttaggcggcatcccacagaagcagagttacaggacatgatttatgaagtagatgctgatagtaatggcagagttggcttccctgaatttgtgacaatgagggcaagaaaaatgaaagacgcaggcagtgaagaagaaatgagagaagcattccgtgtgtttgataaggatggcaatggttatattagtgcagcagaacttcaccatgcgatgacaaaccttggagagaagttaacagatgaagaggttgacgaaatgatcagggaagcagatattgatggtgacggtcaagtaaactgtgaagagtttgcacaggctgggcacggtggctcacgcctgtaa

SEQ ID NO: 1131 - DNA, 3104 bp, Homo sapiens
cacctgccaggagcacgtcccgccggcagtcgcaggagccctgggagccgccgccatgggaatgtccaaatcacacagtttctttggttatcccctgagcatcttcttcatcgtggtcaatgagttttgcgaaagattttcctactatggaatgcgagcaatcctgattctgtacttcacaaatttcatcagctgggatgataacctgtccaccgccatctaccatacgtttgtggctctgtgctacctgacgccaattctcggagctcttatcgccgactcgtggctgggaaagttcaagaccattgtgtcgctctccattgtctacacaattggacaagcagtcacctcagtaagctccattaatgacctcacagaccacaaccatgatggcacccccgacagccttcctgtgcacgtggtgctgtccttgatcggcctggccctgatagctctcgggactggaggaatcaaaccctgtgtgtctgcgtttggtggagatcagtttgaagagggccaggagaaacaaagaaacagatttttttccatcttttacttggctattaatgctggaagtttgctttccacaatcatcacacccatgctcagagttcaacaatgtggaattcacagtaaacaagcttgttacccactggcctttggggttcctgctgctctcatggctgtagccctgattgtgtttgtccttggcagtgggatgtacaagaagttcaagccacagggcaacatcatgggtaaagtggccaagtgcatcggttttgccatcaaaaatagatttaggcatcggagtaaggcatttcccaagagggagcactggctggactgggctaaagagaaatacgatgagcggctcatctcccaaattaagatggttacgagggtgatgttcctgtatattccactcccaatgttctgggccttgtttgaccagcagggctccaggtggacactgcaggcaacaactatgtccgggaaaatcggagctcttgaaattcagcccgatcagatgcagaccgtgaacgccatcctgatcgtgatcatggtcccgatcttcgatgctgtgctgtaccctctcattgcaaaatgtggcttcaatttcacctccttgaagaagatggcagttggcatggtcctggcctccatggcctttgtggtggctgccatcgtgcaggtggaaatcgataaaactcttccagtcttccccaaaggaaacgaagtccaaattaaagttttgaatataggaaacaataccatgaatatatctcttcctggagagatggtgacacttggcccaatgtctcaaacaaatgcatttatgacttttgatgtaaacaaactgacaaggataaacatttcttctcctggatcaccagtcactgctgtaactgacgacttcaagcagggccaacgccacacgcttctagtgtgggcccccaatcactaccaggtggtaaaggatggtcttaaccagaagccagaaaaaggggaaaatggaatcagatttgtaaatacttttaacgagctcatcaccatcacaatgagtgggaaagtttatgcaaacatcagcagctacaatgccagcacataccagttttttccttctggcataaaaggcttcacaataagctcaacagagattccgccacaatgtcaacctaatttcaatactttctaccttgaatttggtagtgcttatacctatatagtccaaaggaagaatgacagctgccctgaagtgaaggtgtttgaagatatttcagccaacacagttaacatggctctgcaaatcccgcagtattttcttctcacctgtggcgaagtggtcttctctgtcacgggattggaattctcatattctcaggctccttccaacatgaagtcggtgcttcaggcaggatggctgctgaccgtggctgttggcaacatcattgtgctcatcgtggcaggggcaggccagttcagcaaacagtgggccgagtacattctatttgccgcgttgcttctggtcgtctgtgtaatttttgccatcatggctcggttctatacttacatcaacccagcggagatcgaagctcaatttgatgaggatgaaaagaaaaacagactggaaaagagtaacccatatttcatgtcaggggccaattcacagaaacagatgtgaaggtcaggaggcaagtggaggatggactgggcccgcagatgccctgacctctgcccccaggtagcaggacactccattggatggcccctgatgaggaagacttcagaattgggaactaaaccatgaatgctattttcttttttctttttcttttcttttttttttttttttttttgagacagagttttgctcttgttgtccaggctggagtgcaatggcacgatctcagctcactgcaacctccgcctcccaggttcaagtaattctcctgcctcagcctcccgagtggctgggattagcggcatgcaccaccacgcccagctatttttgtatttttagtagagatggggtttcaccatgttaaccaggatggtctcgatctcttgacctggtgatctgcccacctcggcctgccaaagtgctgggattacaggcttgagctaccgcgcccggccgtgaacgctattttctaagcagccagcagtgaatctaaaactctggaagaagtcttctgtttgaaaggcttatttaagccacacgtacacacactgtcttagagtactgtgagcccaccccacattggtcatcttccctatcacacaaatgatgttattttggactagcttaattttgaaatggtaacaaagtttcctattccatactgttcatttctaatactcttacgaaaactattctaaaggaggcaggagccaaggccaaaagtgaacgtacaggtttaaaatggctgtgataagggccagctggtattaactgataactttacctttgggtttttgttattttgtttttctagtccctacctgtgtttaaattatggataactcgaaagacaggctcaggtgaaggccgagtaatgattttttttgaagtttcaatggtgtgaaataaatttctgttctta

SEQ ID NO: 1132 - protein, 708 aa, Homo sapiens
MGMSKSHSFFGYPLSIFFIVVNEFCERFSYYGMRAILILYFTNFISWDDNLSTAIYHTFVALCYLTPILGALIADSWLGKFKTIVSLSIVYTIGQAVTSVSSINDLTDHNHDGTPDSLPVHVVLSLIGLALIALGTGGIKPCVSAFGGDQFEEGQEKQRNRFFSIFYLAINAGSLLSTIITPMLRVQQCGIHSKQACYPLAFGVPAALMAVALIVFVLGSGMYKKFKPQGNIMGKVAKCIGFAIKNRFRHRSKAFPKREHWLDWAKEKYDERLISQIKMVTRVMFLYIPLPMFWALFDQQGSRWTLQATTMSGKIGALEIQPDQMQTVNAILIVIMVPIFDAVLYPLIAKCGFNFTSLKKMAVGMVLASMAFVVAAIVQVEIDKTLPVFPKGNEVQIKVLNIGNNTMNISLPGEMVTLGPMSQTNAFMTFDVNKLTRINISSPGSPVTAVTDDFKQGQRHTLLVWAPNHYQVVKDGLNQKPEKGENGIRFVNTFNELITITMSGKVYANISSYNASTYQFFPSGIKGFTISSTEIPPQCQPNFNTFYLEFGSAYTYIVQRKNDSCPEVKVFEDISANTVNMALQIPQYFLLTCGEVVFSVTGLEFSYSQAPSNMKSVLQAGWLLTVAVGNIIVLIVAGAGQFSKQWAEYILFAALLLVVCVIFAIMARFYTYINPAEIEAQFDEDEKKNRLEKSNPYFMSGANSQKQM

SEQ ID NO: 1133 - DNA, 6549 bp, Homo sapiens
gcttggagccgccgcacccgggacggtgcgtagcgctggaagtccggccttccgagagctagctgtccgccgcggcccccgcacgccgggcagccgtccctcgccgcctcgggcgcgccaccatggggccccggctcagcgtctggctgctgctgctgcccgccgcccttctgctccacgaggagcacagccgggccgctgcgaagggtggctgtgctggctctggctgtggcaaatgtgactgccatggagtgaagggacaaaagggtgaaagaggcctcccggggttacaaggtgtcattgggtttcctggaatgcaaggacctgaggggccacagggaccaccaggacaaaagggtgatactggagaaccaggactacctggaacaaaagggacaagaggacctccgggagcatctggctaccctggaaacccaggacttcccggaattcctggccaagacggcccgccaggccccccaggtattccaggatgcaatggcacaaagggggagagagggccgctcgggcctcctggcttgcctggtttcgctggaaatcccggaccaccaggcttaccagggatgaagggtgatccaggtgagatacttggccatgtgcccgggatgctgttgaaaggtgaaagaggatttcccggaatcccagggactccaggcccaccaggactgccagggcttcaaggtcctgttgggcctccaggatttaccggaccaccaggtcccccaggccctcccggccctccaggtgaaaagggacaaatgggcttaagttttcaaggaccaaaaggtgacaagggtgaccaaggggtcagtgggcctccaggagtaccaggacaagctcaagttcaagaaaaaggagacttcgccaccaagggagaaaagggccaaaaaggtgaacctggatttcaggggatgccaggggtcggagagaaaggtgaacccggaaaaccaggacccagaggcaaacccggaaaagatggtgacaaaggggaaaaagggagtcccggttttcctggtgaacccgggtacccaggactcataggccgccagggcccgcagggagaaaagggtgaagcaggtcctcctggcccacctggaattgttataggcacaggacctttgggagaaaaaggagagaggggctaccctggaactccggggccaagaggagagccaggcccaaaaggtttcccaggactaccaggccaacccggacctccaggcctccctgtacctgggcaggctggtgcccctggcttccctggtgaaagaggagaaaaaggtgaccgaggatttcctggtacatctctgccaggaccaagtggaagagatgggctcccgggtcctcctggttcccctgggccccctgggcagcctggctacacaaatggaattgtggaatgtcagcccggacctccaggtgaccagggtcctcctggaattccagggcagccaggatttataggcgaaattggagagaaaggtcaaaaaggagagagttgcctcatctgtgatatagacggatatcgggggcctcccgggccacagggacccccgggagaaataggtttcccagggcagccaggggccaagggcgacagaggtttgcctggcagagatggtgttgcaggagtgccaggccctcaaggtacaccagggctgataggccagccaggagccaagggggagcctggtgagttttatttcgacttgcggctcaaaggtgacaaaggagacccaggctttccaggacagcccggcatgacagggagagcgggttctcctggaagagatggccatccgggtcttcctggccccaagggctcgccgggttctgtaggattgaaaggagagcgtggcccccctggaggagttggattcccaggcagtcgtggtgacaccggcccccctgggcctccaggatatggtcctgctggtcccattggtgacaaaggacaagcaggctttcctggaggccctggatccccaggcctgccaggtccaaagggtgaaccaggaaaaattgttcctttaccaggcccccctggagcagaaggactgccggggtccccaggcttcccaggtccccaaggagaccgaggctttcccggaaccccaggaaggccaggcctgccaggagagaagggcgctgtgggccagccaggcattggatttccagggccccccggccccaaaggtgttgacggcttacctggagacatggggccaccggggactccaggtcgcccgggatttaatggcttacctgggaacccaggtgtgcagggccagaagggagagcctggagttggtctaccgggactcaaaggtttgccaggtcttcccggcattcctggcacacccggggagaaggggagcattggggtaccaggcgttcctggagaacatggagcgatcggaccccctgggcttcaggggatcagaggtgaaccgggacctcctggattgccaggctccgtggggtctccaggagttccaggaataggcccccctggagctaggggtccccctggaggacagggaccaccggggttgtcaggccctcctggaataaaaggagagaagggtttccccggattccctggactggacatgccgggccctaaaggagataaaggggctcaaggactccctggcataacgggacagtcggggctccctggccttcctggacagcagggggctcctgggattcctgggtttccaggttccaagggagaaatgggcgtcatggggacccccgggcagccgggctcaccaggaccagtgggtgctcctggattaccgggtgaaaaaggggaccatggctttccgggctcctcaggacccaggggagaccctggcttgaaaggtgataagggggatgtcggtctccctggcaagcctggctccatggataaggtggacatgggcagcatgaagggccagaaaggagaccaaggagagaaaggacaaattggaccaattggtgagaagggatcccgaggagaccctgggaccccaggagtgcctggaaaggacgggcaggcaggacagcctgggcagccaggacctaaaggtgatccaggtataagtggaaccccaggtgctccaggacttccgggaccaaaaggatctgttggtggaatgggcttgccaggaacacctggagagaaaggtgtgcctggcatccctggcccacaaggttcacctggcttacctggagacaaaggtgcaaaaggagagaaagggcaggcaggcccacctggcataggcatcccagggctgcgaggtgaaaagggagatcaagggatagcgggtttcccaggaagccctggagagaagggagaaaaaggaagcattgggatcccaggaatgccagggtccccaggccttaaagggtctcccgggagtgttggctatccaggaagtcctgggctacctggagaaaaaggtgacaaaggcctcccaggattggatggcatccctggtgtcaaaggagaagcaggtcttcctgggactcctggccccacaggcccagctggccagaaaggggagccaggcagtgatggaatcccggggtcagcaggagagaagggtgaaccaggtctaccaggaagaggattcccagggtttccaggggccaaaggagacaaaggttcaaagggtgaggtgggtttcccaggattagccgggagcccaggaattcctggatccaaaggagagcaaggattcatgggtcctccggggccccagggacagccggggttaccgggatccccaggccatgccacggaggggcccaaaggagaccgcggacctcagggccagcctggcctgccaggacttccgggacccatggggcctccagggcttcctgggattgatggagttaaaggtgacaaaggaaatccaggctggccaggagcacccggtgtcccagggcccaagggagaccctggattccagggcatgcctggtattggtggctctccaggaatcacaggctctaagggtgatatggggcctccaggagttccaggatttcaaggtccaaaaggtcttcctggcctccagggaattaaaggtgatcaaggcgatcaaggcgtcccgggagctaaaggtctcccgggtcctcctggccccccaggtccttacgacatcatcaaaggggagcccgggctccctggtcctgagggccccccagggctgaaagggcttcagggactgccaggcccgaaaggccagcaaggtgttacaggattggtgggtatacctggacctccaggtattcctgggtttgacggtgcccctggccagaaaggagagatgggacctgccgggcctactggtccaagaggatttccaggtccaccaggccccgatgggttgccaggatccatggggcccccaggcaccccatctgttgatcacggcttccttgtgaccaggcatagtcaaacaatagatgacccacagtgtccttctgggaccaaaattctttaccacgggtactctttgctctacgtgcaaggcaatgaacgggcccatggccaggacttgggcacggccggcagctgcctgcgcaagttcagcacaatgcccttcctgttctgcaatattaacaacgtgtgcaactttgcatcacgaaatgactactcgtactggctgtccacccctgagcccatgcccatgtcaatggcacccatcacgggggaaaacataagaccatttattagtaggtgtgctgtgtgtgaggcgcctgccatggtgatggccgtgcacagccagaccattcagatcccaccgtgccccagcgggtggtcctcgctgtggatcggctactcttttgtgatgcacaccagcgctggtgcagaaggctctggccaagccctggcgtcccccggctcctgcctggaggagtttagaagtgcgccattcatcgagtgtcacggccgtgggacctgcaattactacgcaaacgcttacagcttttggctcgccaccatagagaggagcgagatgttcaagaagcctacgccgtccaccttgaaggcaggggagctgcgcacgcacgtcagccgctgccaagtctgtatgagaagaacataatgaagcctgactcagctaatgtcacaacatggtgctacttcttcttctttttgttaacagcaacgaaccctagaaatatatcctgtgtacctcactgtccaatatgaaaaccgtaaagtgccttataggaatttgcgtaactaacacaccctgcttcattgacctctacttgctgaaggagaaaaagacagcgataagctttcaatagtggcataccaaatggcacttttgatgaaataaaatatcaatattttctgcaatccaatgcactgatgtgtgaagtgagaactccatcagaaaaccaaagggtgctaggaggtgtgggtgccttccatactgtttgcccattttcattcttgtattataattaattttctacccccagagataaatgtttgtttatatcactgtctagctgtttcaaaatttaggtcccttggtctgtacaaataatagcaatgtaaaaatggttttttgaacctccaaatggaattacagactcagtagccatatcttccaaccccccagtataaatttctgtctttctgctatgtgtggtactttgcagctgcttttgcagaaatcacaattttcctgtggaataaagatggtccaaaaatagtcaaaaattaaatatatatatatattagtaatttatatagatgtcagcaattaggcagatcaaggtttagtttaacttccactgttaaaataaagcttacatagttttcttcctttgaaagactgtgctgtcctttaacataggtttttaaagactaggatattgaatgtgaaacatccgttttcattgttcacttctaaaccaaaaattatgtgttgccaaaaccaaacccaggttcatgaatatggtgtctattatagtgaaacatgtactttgagcttattgtttttattctgtattaaatattttcagggttttaaacactaatcacaaactgaatgacttgacttcaaaagcaacaaccttaaaggccgtcatttcattagtattcctcattctgcatcctggcttgaaaaacagctctgttgaatcacagtatcagtattttcacacgtaagcacattcgggccatttccgtggtttctcatgagctgtgttcacagacctcagcagggcatcgcatggaccgcaggagggcagattcggaccactaggcctgaaatgacatttcactaaaagtctccaaaacatttctaagactactaaggccttttatgtaatttctttaaatgtgtatttcttaagaattcaaatttgtaataaaactatttgtataaaaattaagcttttattaatttgttgctagtattgccacagacgcattaaaagaaacttactgcacaagctgctaataaatttgtaagctttgcataccttaaaaaaaaaaaaaaaaaa

SEQ ID NO: 1134 - protein, 1669 aa, Homo sapiens
MGPRLSVWLLLLPAALLLHEEHSRAAAKGGCAGSGCGKCDCHGVKGQKGERGLPGLQGVIGFPGMQGPEGPQGPPGQKGDTGEPGLPGTKGTRGPPGASGYPGNPGLPGIPGQDGPPGPPGIPGCNGTKGERGPLGPPGLPGFAGNPGPPGLPGMKGDPGEILGHVPGMLLKGERGFPGIPGTPGPPGLPGLQGPVGPPGFTGPPGPPGPPGPPGEKGQMGLSFQGPKGDKGDQGVSGPPGVPGQAQVQEKGDFATKGEKGQKGEPGFQGMPGVGEKGEPGKPGPRGKPGKDGDKGEKGSPGFPGEPGYPGLIGRQGPQGEKGEAGPPGPPGIVIGTGPLGEKGERGYPGTPGPRGEPGPKGFPGLPGQPGPPGLPVPGQAGAPGFPGERGEKGDRGFPGTSLPGPSGRDGLPGPPGSPGPPGQPGYTNGIVECQPGPPGDQGPPGIPGQPGFIGEIGEKGQKGESCLICDIDGYRGPPGPQGPPGEIGFPGQPGAKGDRGLPGRDGVAGVPGPQGTPGLIGQPGAKGEPGEFYFDLRLKGDKGDPGFPGQPGMTGRAGSPGRDGHPGLPGPKGSPGSVGLKGERGPPGGVGFPGSRGDTGPPGPPGYGPAGPIGDKGQAGFPGGPGSPGLPGPKGEPGKIVPLPGPPGAEGLPGSPGFPGPQGDRGFPGTPGRPGLPGEKGAVGQPGIGFPGPPGPKGVDGLPGDMGPPGTPGRPGFNGLPGNPGVQGQKGEPGVGLPGLKGLPGLPGIPGTPGEKGSIGVPGVPGEHGAIGPPGLQGIRGEPGPPGLPGSVGSPGVPGIGPPGARGPPGGQGPPGLSGPPGIKGEKGFPGFPGLDMPGPKGDKGAQGLPGITGQSGLPGLPGQQGAPGIPGFPGSKGEMGVMGTPGQPGSPGPVGAPGLPGEKGDHGFPGSSGPRGDPGLKGDKGDVGLPGKPGSMDKVDMGSMKGQKGDQGEKGQIGPIGEKGSRGDPGTPGVPGKDGQAGQPGQPGPKGDPGISGTPGAPGLPGPKGSVGGMGLPGTPGEKGVPGIPGPQGSPGLPGDKGAKGEKGQAGPPGIGIPGLRGEKGDQGIAGFPGSPGEKGEKGSIGIPGMPGSPGLKGSPGSVGYPGSPGLPGEKGDKGLPGLDGIPGVKGEAGLPGTPGPTGPAGQKGEPGSDGIPGSAGEKGEPGLPGRGFPGFPGAKGDKGSKGEVGFPGLAGSPGIPGSKGEQGFMGPPGPQGQPGLPGSPGHATEGPKGDRGPQGQPGLPGLPGPMGPPGLPGIDGVKGDKGNPGWPGAPGVPGPKGDPGFQGMPGIGGSPGITGSKGDMGPPGVPGFQGPKGLPGLQGIKGDQGDQGVPGAKGLPGPPGPPGPYDIIKGEPGLPGPEGPPGLKGLQGLPGPKGQQGVTGLVGIPGPPGIPGFDGAPGQKGEMGPAGPTGPRGFPGPPGPDGLPGSMGPPGTPSVDHGFLVTRHSQTIDDPQCPSGTKILYHGYSLLYVQGNERAHGQDLGTAGSCLRKFSTMPFLFCNINNVCNFASRNDYSYWLSTPEPMPMSMAPITGENIRPFISRCAVCEAPAMVMAVHSQTIQIPPCPSGWSSLWIGYSFVMHTSAGAEGSGQALASPGSCLEEFRSAPFIECHGRGTCNYYANAYSFWLATIERSEMFKKPTPSTLKAGELRTHVSRCQVCMRRT

SEQ ID NO: 1135 - DNA, 630 bp, Homo sapiens
atgagggaggcagcccatcctcaccgccggtctcggtccgcgagacgcggggacagcgcggtgcgcggcccgcatgcaggggtgaccggagggccgtcccccccacgacccggaaagaaggagagcctcccgagagcgtgcagccctagcctgcacaaggcgctccaagtcggtgctctcgggccagggtctgggcgccgctcgggggtcgctctcacctcgggctcggcttcaggggctgctgcccgaacgcattggcccttccagaagcacccgccggcggcacaccggcagggcggccggccttgctgggctctctgggcgccggccccgggggctcgggcggcccctttcggtcctcggcctggatccgcgaacgcgcgggcgcgaggggttgggacgcgggagcctcttgagtgcggagcgcggagccctggtgtcccggcgcactgcagccacactcccgggccgcgcgctcccgccgcctcttacccgcgccgcagggtcctcccctttgaggcgccgcccgcgcaccgccgggggggagggggcagcgccaacaaattggggagctcggcccgccgcgctcaggtctccgcttggagccgccgcacccgggacggtgcgtag

SEQ ID NO: 1136 - protein, 209 aa, Homo sapiens
MREAAHPHRRSRSARRGDSAVRGPHAGVTGGPSPPRPGKKESLPRACSPSLHKALQVGALGPGSGRRSGVALTSGSASGAAARTHWPFQKHPPAAHRQGGRPCWALWAPAPGARAAPFGPRPGSANARARGVGTREPLECGARSPGVPAHCSHTPGPRAPAASYPRRRVLPFEAPPAHRRGGGGSANKLGSSARRAQVSAWSRRTRDGA

SEQ ID NO: 1137 - DNA, 6264 bp, Homo sapiens
gagtgtggctgcagtgcgccgggacaccagggctccgcgctccgcactcaagaggctcccgcgtcccaacccctcgcgcccgcgcgttcgcggatccaggccgaggaccgaaaggggccgcccgagcccccggggccggcgcccagagagcccagcaaggccggccgccctgccggtgtgccgccggcgggtgcttctggaagggccaatgcgttcgggcagcagcccctgaagccgagcccgaggctaagtgggactgaccggggcccagagtggacgaaccgccagcatggggagagaccagcgcgcggtggccggccctgccctacggcggtggctgctgctggggacagtgaccgtggggttcctcgcccagagcgtcttggcgggtgtgaagaagtttgatgtgccgtgtggaggaagagattgcagtgggggctgccagtgctaccctgagaaaggtggacgtggtcagcctgggccagtgggcccccaggggtacaatgggccaccaggattacaaggattcccgggactgcagggacgtaaaggagacaagggtgaaaggggagcccccggagtaacgggacccaagggcgacgtgggagcaagaggcgtttctggattccctggtgccgatggaattcctggacacccggggcaaggtgggcccaggggaaggccgggctacgatggctgcaacggaacccagggagactcaggtccacaggggccccccggctctgaggggttcaccgggcctcccgggccccaaggaccaaaagggcagaaaggtgagccttatgcactgcctaaagaggagcgcgacagatatcggggtgaacctggagagcctggattggtcggtttccagggacctcccggccgccctgggcatgtgggacagatgggtccagttggagctccagggagaccaggaccacctggaccccctggaccaaaaggacagcaaggcaacagaggacttggtttctacggagttaagggtgaaaagggtgacgtagggcagccgggacccaacgggattccatcagacaccctccaccccatcatcgcgcccacaggagtcaccttccacccagatcagtacaagggtgaaaaaggcagtgagggggaaccaggaataagaggcatttccttgaagggagaagaaggaatcatgggctttcctggactgaggggttaccctggcttgagtggtgaaaaaggatcaccaggacagaagggaagccgaggcctggatggctatcaagggcctgatggaccccggggacccaagggagaagccggagacccagggccccctggactacctgcctactcccctcacccttccctagcaaaaggtgccagaggtgacccgggattcccaggggcccaaggggagccaggaagccagggtgagccaggagacccgggcctcccaggtccccctggcctctccatcggagatggagatcagaggagaggcctgccgggtgagatgggacccaagggcttcatcggagaccccggcatccctgcgctctacgggggcccacctggacctgatggaaagcgagggcctccaggaccccccgggctccctggaccacctggacctgatggcttcctgtttgggctgaaaggagcaaaaggaagagcaggcttccctgggcttcccggctcccctggagcccgcggaccaaaggggtggaaaggtgacgctggggaatgcagatgtacagaaggcgacgaagctatcaaaggtcttccgggactgccaggacccaagggcttcgcaggcatcaacggggagccggggaggaaaggggacagaggagaccccggccaacacggcctccctgggttcccagggctcaagggagtgcctggcaacattggtgctcccggacccaaaggagcaaaaggagattccagaacaatcacaaccaaaggtgagcggggacagcccggcgtcccaggtgtgcccgggatgaaaggtgacgatggcagcccaggccgcgatgggctcgatggattccccggcctcccaggccctcccggtgatggcatcaagggccctccaggggacccaggctatccaggaatacctggaacgaagggtactccaggagaaatgggccccccaggactgggccttcccggcctcaaaggccaacgtggtttccctggagacgccggcttacctggaccaccaggcttcctgggccctcctggccccgcagggaccccaggacaaatagattgtgacacagatgtgaaaagggccgttggaggtgacagacaggaggccatccagccaggttgcataggagggcccaagggattgccaggcctgccaggacccccaggccccacaggtgccaaaggcctccgaggaatcccaggcttcgcaggagctgatggaggaccagggcccaggggcttgccaggagacgcaggtcgtgaagggttcccaggacccccagggttcataggaccccgaggatccaaaggtgcagtgggcctccctggcccagatggatccccaggtcccatcggcctgccagggccagatgggccccctggggaaaggggcctccctggagaagtcctgggagctcagcccgggccacggggagatgctggtgtgcctggacagcctgggcttaaaggccttcccggagacagaggcccccctggattcagaggaagccaagggatgcctgggatgccagggctgaagggccagccaggcctcccaggaccttccggccagccaggcctgtatgggcctccaggactgcatggattcccaggagctcctggccaagaggggcccttggggctgccaggaatcccaggccgtgaaggtctgcctggtgatagaggggaccctggggacacaggcgctcctggccctgtgggcatgaaaggtctctctggtgacagaggagatgctggcttcacaggggagcaaggccatccaggaagccctggatttaaaggaattgatggaatgcctgggacccccgggctaaaaggagatagaggctcacctgggatggatggtttccaaggcatgcctggactcaaagggagacccgggtttccagggagcaaaggcgaggctggatttttcggaatacccggtctgaagggtctggctggtgagccaggttttaaaggcagccgaggggaccctgggcccccaggaccacctcctgtcatcctgccaggaatgaaagacattaaaggagagaaaggagatgaagggcctatggggctgaaaggatacctgggcgcaaaaggtatccaaggaatgccaggcatcccagggctgtcaggaatccctgggctgcctgggaggcccggccacatcaaaggagtcaagggagacatcggagtccccggcatccccggtttgccaggattccctggggtggctggcccccctggaattacgggattcccaggattcataggaagccggggtgacaaaggtgccccagggagagcaggcctgtatggcgagattggcgcgactggtgatttcggtgacatcggggacactataaatttaccaggaagaccaggcctgaagggggagcggggcaccactggaataccaggtctgaagggattctttggagagaagggaacagaaggtgacatcggcttccctgggataacaggcgtgactggagtccaaggccctcctggacttaaaggacaaacaggctttccagggctgactgggcctccagggtcgcagggagagctggggcggattggactgcctggtggcaaaggagatgatggctggccgggagctccgggcttaccaggttttccgggactccgtgggatccgcggcttacacggcttgccaggcaccaagggctttccaggatccccaggttctgacatccacggagacccaggcttcccaggccctcctggggaaagaggtgacccaggagaggccaacacccttccaggccctgtgggagtcccaggacagaaaggagaccaaggagctccaggggaacgaggcccacctgggagcccaggacttcaggggttcccaggcatcacacccccttccaacatctctggggcacctggtgacaaaggggcgccagggatatttggcctgaaaggttatcggggcccaccagggccaccaggttctgctgctcttcctggaagcaaaggtgacacagggaacccaggagctccaggaaccccagggaccaaaggatgggccggggactccgggccccagggcaggcctggtgtgtttggtctcccaggagaaaaagggcccaggggtgaacaaggcttcatggggaacactggacccaccggggcggtgggcgacagaggccccaagggacccaagggagacccaggattccctggtgcccccgggactgtgggagcccccgggattgcaggaatcccccagaagattgccgtccaaccagggacagtgggtccccaggggaggcgaggcccccctggggcaccgggggagatggggccccagggcccccccggagaaccaggttttcgtggggctccagggaaagctgggccccaaggaagaggtggtgtgtctgctgttcccggcttccggggagatgaaggacccataggccaccaggggccgattggccaagaaggtgcaccaggccgtccagggagcccgggcctgccgggtatgccaggccgcagcgtcagcatcggctacctcctggtgaagcacagccagacggaccaggagcccatgtgcccagtgggcatgaacaaactctggagtggatacagcctgctgtacttcgagggccaggagaaggcgcacaaccaggacctggggctggcgggctcctgcctggcgcggttcagcaccatgcccttcctgtactgcaaccctggtgatgtctgctactatgccagccggaacgacaagtcctactggctctctaccactgcgccgctgcccatgatgcccgtggccgaggacgagatcaagccctacatcagccgctgttctgtgtgtgaggccccggccatcgccatcgcggtccacagtcaggatgtctccatcccacactgcccagctgggtggcggagtttgtggatcggatattccttcctcatgcacacggcggcgggagacgaaggcggtggccaatcactggtgtcaccgggcagctgtctagaggacttccgcgccacaccattcatcgaatgcaatggaggccgcggcacctgccactactacgccaacaagtacagcttctggctgaccaccattcccgagcagagcttccagggctcgccctccgccgacacgctcaaggccggcctcatccgcacacacatcagccgctgccaggtgtgcatgaagaacctgtgagccggcgcgtgccaggaagggccattttggtgcttattcttaacttattacctcaggtgccaacccaaaaattggttttatttttttcttaaaaaaaaaaaagtctaccaaaggaatttgcatccagcagcagcacttagacctgccagccactgtcaccgagcgggtgcaagcactcggggtccctggagggcaagccctgcccacagaaagccaggagcagccctggcccccatcagccctgctagacgcaccgcctgaaggcacagctaaccacttcgcacacacccatgtaaccactgcactttccaatgccacagacaactcacattgttcaactcccttctcggggtgggacagacgagacaacagcacacaggcagccagccgtggccagaggctcgaggggctcagggcctcaggcacccgtccccacacgagggccccgtgggtgggcctggccctgctttctacgccaatgttatgccagctccatgttctcccaaataccgttgatgtgaattattttaaaggcaaaaccgtgctctttattttaaaaaacactgataatcacactgcggtaggtcattcttttgccacatccctatagaccactgggtttggcaaaactcaggcagaagtggagacctttctagacatcattgtcagccttgctacttgaaggtacaccccatagggtcggaggtgctgtccccactgccccacgttgtccctgagatttaacccctccactgctgggggtgagctgtactcttctgactgccccctcctgtgtaacgactacaaaataaaacttggttctgaatatttttaaa

SEQ ID NO: 1138 - protein, 1712 aa, Homo sapiens
MGRDQRAVAGPALRRWLLLGTVTVGFLAQSVLAGVKKFDVPCGGRDCSGGCQCYPEKGGRGQPGPVGPQGYNGPPGLQGFPGLQGRKGDKGERGAPGVTGPKGDVGARGVSGFPGADGIPGHPGQGGPRGRPGYDGCNGTQGDSGPQGPPGSEGFTGPPGPQGPKGQKGEPYALPKEERDRYRGEPGEPGLVGFQGPPGRPGHVGQMGPVGAPGRPGPPGPPGPKGQQGNRGLGFYGVKGEKGDVGQPGPNGIPSDTLHPIIAPTGVTFHPDQYKGEKGSEGEPGIRGISLKGEEGIMGFPGLRGYPGLSGEKGSPGQKGSRGLDGYQGPDGPRGPKGEAGDPGPPGLPAYSPHPSLAKGARGDPGFPGAQGEPGSQGEPGDPGLPGPPGLSIGDGDQRRGLPGEMGPKGFIGDPGIPALYGGPPGPDGKRGPPGPPGLPGPPGPDGFLFGLKGAKGRAGFPGLPGSPGARGPKGWKGDAGECRCTEGDEAIKGLPGLPGPKGFAGINGEPGRKGDRGDPGQHGLPGFPGLKGVPGNIGAPGPKGAKGDSRTITTKGERGQPGVPGVPGMKGDDGSPGRDGLDGFPGLPGPPGDGIKGPPGDPGYPGIPGTKGTPGEMGPPGLGLPGLKGQRGFPGDAGLPGPPGFLGPPGPAGTPGQIDCDTDVKRAVGGDRQEAIQPGCIGGPKGLPGLPGPPGPTGAKGLRGIPGFAGADGGPGPRGLPGDAGREGFPGPPGFIGPRGSKGAVGLPGPDGSPGPIGLPGPDGPPGERGLPGEVLGAQPGPRGDAGVPGQPGLKGLPGDRGPPGFRGSQGMPGMPGLKGQPGLPGPSGQPGLYGPPGLHGFPGAPGQEGPLGLPGIPGREGLPGDRGDPGDTGAPGPVGMKGLSGDRGDAGFTGEQGHPGSPGFKGIDGMPGTPGLKGDRGSPGMDGFQGMPGLKGRPGFPGSKGEAGFFGIPGLKGLAGEPGFKGSRGDPGPPGPPPVILPGMKDIKGEKGDEGPMGLKGYLGAKGIQGMPGIPGLSGIPGLPGRPGHIKGVKGDIGVPGIPGLPGFPGVAGPPGITGFPGFIGSRGDKGAPGRAGLYGEIGATGDFGDIGDTINLPGRPGLKGERGTTGIPGLKGFFGEKGTEGDIGFPGITGVTGVQGPPGLKGQTGFPGLTGPPGSQGELGRIGLPGGKGDDGWPGAPGLPGFPGLRGIRGLHGLPGTKGFPGSPGSDIHGDPGFPGPPGERGDPGEANTLPGPVGVPGQKGDQGAPGERGPPGSPGLQGFPGITPPSNISGAPGDKGAPGIFGLKGYRGPPGPPGSAALPGSKGDTGNPGAPGTPGTKGWAGDSGPQGRPGVFGLPGEKGPRGEQGFMGNTGPTGAVGDRGPKGPKGDPGFPGAPGTVGAPGIAGIPQKIAVQPGTVGPQGRRGPPGAPGEMGPQGPPGEPGFRGAPGKAGPQGRGGVSAVPGFRGDEGPIGHQGPIGQEGAPGRPGSPGLPGMPGRSVSIGYLLVKHSQTDQEPMCPVGMNKLWSGYSLLYFEGQEKAHNQDLGLAGSCLARFSTMPFLYCNPGDVCYYASRNDKSYWLSTTAPLPMMPVAEDEIKPYISRCSVCEAPAIAIAVHSQDVSIPHCPAGWRSLWIGYSFLMHTAAGDEGGGQSLVSPGSCLEDFRATPFIECNGGRGTCHYYANKYSFWLTTIPEQSFQGSPSADTLKAGLIRTHISRCQVCMKNL

SEQ ID NO: 1139 - DNA, 773 bp, Homo sapiens
agaacatccttctccctcagctggagggagcatggcagtgagccaaggagacgggaccctctgctttgtcctcctgctgtgctgttggcaagaaactgagctccggccgagaaccgtgattccaggttcacctactgaaataccattcagttcaaaacaggaggatatgtctgaattattagatgaaattctggtccaggagattttggatctgaataaaacaacaccgagcgaaatgccaagtacagcatcaacattatcaacaccgttacatgctggtattgatgagaattatcaagctggtggttctgagaattaccatgaattattagagaatttacaattctctcctggcattgaggacaaaatttccaatgatgaagccaatgctaatgcaaatctccatggcgatccttctgagaattatcgtgggccacaggtgtctcctggcagtgagaagagtgtttccagtaaagaaaagaattcaaagaacactcagtatgaaaatctatccattctggaccaaatccttcaaaatattggaagatcttcaggaaacattttccataaagagcagcagaggaccagcgcacagaggaggagccaaggcagtcagtgaggccgcagccccagaccccctgcgcaggagaggagcctgctagaacccccacccaccagcctccggaacagggcacttgtgtgcacacgcccacgttctctgaaccattccacataaaggaaaatcgtttattcacaccaaaaaaaaaaaaaaa

SEQ ID NO: 1140 - protein, 195 aa, Homo sapiens
MAVSQGDGTLCFVLLLCCWQETELRPRTVIPGSPTEIPFSSKQEDMSELLDEILVQEILDLNKTTPSEMPSTASTLSTPLHAGIDENYQAGGSENYHELLENLQFSPGIEDKISNDEANANANLHGDPSENYRGPQVSPGSEKSVSSKEKNSKNTQYENLSILDQILQNIGRSSGNIFHKEQQRTSAQRRSQGSQ

SEQ ID NO: 1141 - DNA, 3252 bp, Homo sapiens
ctactccaacccctgggcgggcgggggtaccgcctgggcaagggccggggcgccgggccgagccacctcttcccctcccccgcttccctgtcgcgctccgctggctggacgcgctggaggagtggagcagcacccggccggccctgggggctgacagtcggcaaagtttggcccgaagaggaagtggtctcaaaccccggcaggtggcgaccaggccagaccaggggcgctcgctgcctgcgggcgggctgtaggcgagggcgcgccccagtgccgagacccggggcttcaggagccggccccgggagagaagagtgcggcggcggacggagaaaacaactccaaagttggcgaaaggcaccgcccctactcccgggctgccgccgcctccccgcccccagccctggcatccagagtacgggtcgagcccgggccatggagcccccctggggaggcggcaccagggagcctgggcgcccggggctccgccgcgaccccatcgggtagaccacagaagctccgggacccttccggcacctctggacagcccaggatgctgttggccaccctcctcctcctcctccttggaggcgctctggcccatccagaccggattatttttccaaatcatgcttgtgaggaccccccagcagtgctcttagaagtgcagggcaccttacagaggcccctggtccgggacagccgcacctcccctgccaactgcacctggctcatcctgggcagcaaggaacagactgtcaccatcaggttccagaagctacacctggcctgtggctcagagcgcttaaccctacgctcccctctccagccactgatctccctgtgtgaggcacctcccagccctctgcagctgcccgggggcaacgtcaccatcacttacagctatgctggggccagagcacccatgggccagggcttcctgctctcctacagccaagattggctgatgtgcctgcaggaagagtttcagtgcctgaaccaccgctgtgtatctgctgtccagcgctgtgatggggttgatgcctgtggcgatggctctgatgaagcaggttgcagctcagaccccttccctggcctgaccccaagacccgtcccctccctgccttgcaatgtcaccttggaggacttctatggggtcttctcctctcctggatatacacacctagcctcagtctcccacccccagtcctgccattggctgctggacccccatgatggccggcggctggccgtgcgcttcacagccctggacttgggctttggagatgcagtgcatgtgtatgacggccctgggccccctgagagctcccgactactgcgtagtctcacccacttcagcaatggcaaggctgtcactgtggagacactgtctggccaggctgttgtgtcctaccacacagttgcttggagcaatggtcgtggcttcaatgccacctaccatgtgcggggctattgcttgccttgggacagaccctgtggcttaggctctggcctgggagctggcgaaggcctaggtgagcgctgctacagtgaggcacagcgctgtgacggctcatgggactgtgctgacggcacagatgaggaggactgcccaggctgcccacctggacacttcccctgtggggctgctggcacctctggtgccacagcctgctacctgcctgctgaccgctgcaactaccagactttctgtgctgatggagcagatgagagacgctgtcggcattgccagcctggcaatttccgatgccgggacgagaagtgcgtgtatgagacgtgggtgtgcgatgggcagccagactgtgcggacggcagtgatgagtgggactgctcctatgttctgccccgcaaggtcattacagctgcagtcattggcagcctagtgtgcggcctgctcctggtcatcgccctgggctgcacctgcaagctctatgccattcgcacccaggagtacagcatctttgcccccctctcccggatggaggctgagattgtgcagcagcaggcacccccttcctacgggcagctcattgcccagggtgccatcccacctgtagaagactttcctacagagaatcctaatgataactcagtgctgggcaacctgcgttctctgctacagatcttacgccaggatatgactccaggaggtggcccaggtgcccgccgtcgtcagcggggccgcttgatgcgacgcctggtacgccgtctccgccgctggggcttgctccctcgaaccaacaccccggctcgggcctctgaggccagatcccaggtcacaccttctgctgctccccttgaggccctagatggtggcacaggtccagcccgtgagggcggggcagtgggtgggcaagatggggagcaggcacccccactgcccatcaaggctcccctcccatctgctagcacgtctccagcccccactactgtccctgaagccccagggccactgccctcactgcccctagagccatcactattgtctggagtggtgcaggccctgcgaggccgcctgttgcccagcctggggcccccaggaccaacccggagcccccctggaccccacacagcagtcctggccctggaagatgaggacgatgtgctactggtgccactggctgagccgggggtgtgggtagctgaggcagaggatgagccactgcttacctgaggggacctgggggctctactgaggcctctcccctgggggctctactcatagtggcacaaccttttagaggtgggtcagcctcccctccaccacttccttccctgtccctggatttcagggacttggtgggcctcccgttgaccctatgtagctgctataaagttaagtgtccctcaggcagggagagggctcacagagtctcctctgtacgtggccatggccagacaccccagtcccttcaccaccacctgctccccacgccaccaccatttgggtggctgtttttaaaaagtaaagttcttagaggatcataggtctggacactccatccttgccaaacctctacccaaaagtggccttaagcaccggaatgccaattaactagagaccctccagcccccaaggggaggatttgggcagaacctgaggttttgccatccacaatccctcctacagggcctggctcacaaaaagagtgcaacaaatgcttctattccatagctacggcattgctcagtaagttgaggtcaaaaataaaggaatcatacatctcaaaa

SEQ ID NO: 1142 - protein, 713 aa, Homo sapiens
MLLATLLLLLLGGALAHPDRIIFPNHACEDPPAVLLEVQGTLQRPLVRDSRTSPANCTWLILGSKEQTVTIRFQKLHLACGSERLTLRSPLQPLISLCEAPPSPLQLPGGNVTITYSYAGARAPMGQGFLLSYSQDWLMCLQEEFQCLNHRCVSAVQRCDGVDACGDGSDEAGCSSDPFPGLTPRPVPSLPCNVTLEDFYGVFSSPGYTHLASVSHPQSCHWLLDPHDGRRLAVRFTALDLGFGDAVHVYDGPGPPESSRLLRSLTHFSNGKAVTVETLSGQAVVSYHTVAWSNGRGFNATYHVRGYCLPWDRPCGLGSGLGAGEGLGERCYSEAQRCDGSWDCADGTDEEDCPGCPPGHFPCGAAGTSGATACYLPADRCNYQTFCADGADERRCRHCQPGNFRCRDEKCVYETWVCDGQPDCADGSDEWDCSYVLPRKVITAAVIGSLVCGLLLVIALGCTCKLYAIRTQEYSIFAPLSRMEAEIVQQQAPPSYGQLIAQGAIPPVEDFPTENPNDNSVLGNLRSLLQILRQDMTPGGGPGARRRQRGRLMRRLVRRLRRWGLLPRTNTPARASEARSQVTPSAAPLEALDGGTGPAREGGAVGGQDGEQAPPLPIKAPLPSASTSPAPTTVPEAPGPLPSLPLEPSLLSGVVQALRGRLLPSLGPPGPTRSPPGPHTAVLALEDEDDVLLVPLAEPGVWVAEAEDEPLLT

SEQ ID NO: 1143 - DNA, 1885 bp, Homo sapiens
agtgagggagagggtgctgcgagctgctgggctgcacacgcacacgcacacgcacacgcacactgatgcacacggacctggacacagacatggacatggacacagaaaccacagcactctgcccctctggcagccgccgggcctcccctccagggacgcccacaccagaagcagatgccacgctactaaagaagtcagagaaactgttggcagagttggaccggagcgggttaccctctgcccctggggcccccagacgaagaggcagtatgcctgtcccctacaagcaccagctccggcgggcccaggctgtagatgaacttgactggccacctcaggcctcatcctctggctcgtctgactccttgggctcaggggaggcagcccctgctcaaaaggatggcatcttcaaggtcatgctagtgggggagagcggcgtgggcaagagcaccctagcaggcacttttggtggtctccagggagacagtgctcacgaaccggagaacccagaggatacctatgagagacgcatcatggtggataaggaggaagtgactctagtcgtttatgacatctgggaacagggggatgcaggagggtggctgcgggaccactgccttcagaccggggacgcctttctcatcgtcttctcagtcaccgaccgacggagtttctccaaagttccagagaccctacttcggctccgggctgggaggccgcaccacgacctacccgttatcctcgttggaaacaagagcgacttggcccgctcccgggaggtatcactggaggagggccgccacctggccgggacgctgagctgcaagcacatcgagacgtcggccgcactgcaccacaacacgagggagctcttcgagggcgcggtgcgccagatccggctgcggcggggccgaaaccacgccggaggccagaggcccgatccgggcagccccgagggccctgcgccacctgcacgccgcgagagcctcaccaagaaagccaagaggttcctcgccaacctggtgccgcgcaacgccaagttcttcaagcagcgctccaggtcgtgtcacgacctctcggtgctctgagccgcggtcgccatggccactgcggtcgccatggtcaccgcgccctccgctcgccccccctcgccccgccccgcccccgtccggcttccttggtggaggccgtctaggaaaccaaaaactcccaggatgccccggtgtgaccgccgggggcggcccggggccgctcggcggcacctccacacccgccccaacgcgttctctggagctttgggcctcagggcgcctagaaggcgaggacgcagacctgaaggcggccggtgagcggggcgggttctgctgggtcgggaagaaaaataattctgcaaggtattttgttttttattaattcgcgcttggccacctcatctgtaaagagattctaaaagcaagatctggaaaagtgcttcgtagactccttgacggagtttgcctcctttgtacgctgcgtgaacatgcctcacctttaagagagtcttaaaggtaaagacacgaaaacacttcctccagggaccttcccgaaaacgttctggctctcatctggtgcggcatgtgtccactttgcctttaaggagttcttaaaggcaagggcctggaagtgctgttcctgagatggattctcttgacttaccagtccaccacggcacttcccctttaaggttattaaaggtaaggggtggacagactttctgcattcagataatgagcagtggcaaccccttttggccagggccaggggggcaccagcaaggggccaccctttcccttttcaataaataatttttgtactgcctcaaaaaaaaaaaaaaaaaaaaaaaaaa

SEQ ID NO: 1144 - protein, 340 aa, Homo sapiens
MHTDLDTDMDMDTETTALCPSGSRRASPPGTPTPEADATLLKKSEKLLAELDRSGLPSAPGAPRRRGSMPVPYKHQLRRAQAVDELDWPPQASSSGSSDSLGSGEAAPAQKDGIFKVMLVGESGVGKSTLAGTFGGLQGDSAHEPENPEDTYERRIMVDKEEVTLVVYDIWEQGDAGGWLRDHCLQTGDAFLIVFSVTDRRSFSKVPETLLRLRAGRPHHDLPVILVGNKSDLARSREVSLEEGRHLAGTLSCKHIETSAALHHNTRELFEGAVRQIRLRRGRNHAGGQRPDPGSPEGPAPPARRESLTKKAKRFLANLVPRNAKFFKQRSRSCHDLSVL

SEQ ID NO: 1145 - DNA, 2576 bp, Homo sapiens
ggcgcatgcgcagattggggaaggttctggaagacggcagagctgccgccattttgcgggaagaggaggctctgtacctgcagtgctgcttttcttgcctagactctaggaactatccgagctccactccccacaacatactcaaaggaacggagagaaccgggacccccctgcggggacccggaactgatctgacaggatggcatctgatgactttgacatagtgattgaggccatgctggaagctccctataaaaaagaagaggatgagcaacaaaggaaagaagttaaaaaggattatcctagcaataccaccagcagcaccagcaacagtggcaatgagaccagtggaagcagcaccatcggggagacaagcaatcgtagtcgagatcgggatcggtatagacggagaaatagtcggagccgaagtccaggtcggcagtgtcgtcaccgtagccgtagctgggatcgtcgacatggtagtgagtcgcgaagtcgggaccatcgtcgtgaggatcgtgtgcattacaggagtcctccacttgccactggttataggtatggacacagtaagagtcctcatttcagagagaagagcccagtcagggagccagttgataatctgagtcctgaggagcgtgatgcccgcacagttttctgtatgcagttagctgcccgaattcggcctcgagatctggaggactttttctctgctgtaggcaaggttcgcgatgtacgtatcatctcagatcggaactcacgtcgttctaagggcattgcctacgtggaattctgtgaaatccagtctgtgccactggccattgggctgactgggcagcggttgctgggagtgcctatcattgtacaggcttcacaggcagagaaaaaccgactggcagccatggccaacaacctgcaaaagggcaatggtggaccaatgcgcctctatgtgggttccctgcacttcaatatcactgaagacatgctccggggcatctttgagccctttggtaaaattgataatattgtcctgatgaaggactcagatacaggccgctctaaaggttatggtttcatcacgttctctgattctgagtgtgcccggcgggccctggaacagttgaatgggtttgagcttgctggtcgacctatgagggttggccatgtgactgagcgactggatggtggcacagacatcacttttcctgatggggaccaggagctggatctgggatcagcaggtggacgttttcagctcatggcaaaactggcagaaggcgctggaatccaactgccaagcactgctgctgctgctgctgccgccgccgcccaggctgctgccttgcaactgaatggagcagttcccttgggggccctgaatccagcagctctgactgctctgagtccagccctgaaccttgcctcccagtgtttccagctctccagcctctttaccccccagaccatgtaaatcagtggcacagtatactgcctccttgtgcctctggatcctgccacttcacatctactcttccatggccccatttctccattttgtggaccaagccatcctgagggcatggacattgtctctgaggaaattggggccacccttaagataccaagaaaagctcctgcccatggtcccactggaaatggactctgctgagcaaagccaccagttgaagagaacagaatccacacctgcattgaatacctgtttctccatgtgtatcgtctctgagattaccttcttgccctttccaacaccttagtgattcctcaatttctcccccattgggaaggccatagggcatactgaaggaactgacctctctccttttcctgtacctttaacctttagtctgtcaaggaaaacccttaggacctctgaatcaagaggactgagtttgtgggtgaaccttgaaggtgctctttctgctacaagggccctgggagatagcatggacgtgcattgagaagccagcctcagaccttagcttgaagcagcttgaggccagacctactgtagcctcagcatcttgctaggaggcatggaagtgatctatcctgccaggaggcctcagagtgatctgtcctgccaggaggtgtgagagtgatctgtcctgtgaggcatttaggggctttcaggaatttagtaaaaggtggagtatgcctttccagtatcttccatcttcctttgtatacttgtccttcctcccatttcctccctttggcccgaggtaggaggatggagggaggctgctactctaccacttcctgtgtgcctctactgtggcctcaaccctggcaattatagctactcccatcccttacctgggcatgtgtgagcccttctcactggattttatacccttgtgtctgtgtacataaatatatatacatatatatatacataaaaactttgtacaaaaggcaagcctcctccttgtggcagctgttgcccatttgtgtgtggtctttgttgtgtgtctgacaacttctcattagcccaacttatgatgtttctagggatataaaacattagtaacatcaaaaaaaaaaaaaaaaaaaaa

SEQ ID NO: 1146 - protein, 423 aa, Homo sapiens
MASDDFDIVIEAMLEAPYKKEEDEQQRKEVKKDYPSNTTSSTSNSGNETSGSSTIGETSNRSRDRDRYRRRNSRSRSPGRQCRHRSRSWDRRHGSESRSRDHRREDRVHYRSPPLATGYRYGHSKSPHFREKSPVREPVDNLSPEERDARTVFCMQLAARIRPRDLEDFFSAVGKVRDVRIISDRNSRRSKGIAYVEFCEIQSVPLAIGLTGQRLLGVPIIVQASQAEKNRLAAMANNLQKGNGGPMRLYVGSLHFNITEDMLRGIFEPFGKIDNIVLMKDSDTGRSKGYGFITFSDSECARRALEQLNGFELAGRPMRVGHVTERLDGGTDITFPDGDQELDLGSAGGRFQLMAKLAEGAGIQLPSTAAAAAAAAAQAAALQLNGAVPLGALNPAALTALSPALNLASQCFQLSSLFTPQTM

SEQ ID NO: 1147 - DNA, 2470 bp, Homo sapiens
gcgactcgtcccgccttctggggcactagtttgactttgtgattggctactagtatcaaggaatcccggcgtggacagcgcgaggagaaagatggcggcgatggcggtcgggggtgctggtgggagccgcgtgtccagcgggagggacctgaattgcgtccccgaaatagctgacacactaggggctgtggccaagcaggggtgagggccggacctccacgagcggaatgcggggtccgaactcggggacggagaagggcagactagtcatcccggagaagcaggggtttgatttcctctgcatgcctgtcttccatccgcgtttcaagagggagttcattcaggaacctgctaagaatcggcccggtccccagacacgatcagacctactgctgtcaggaagggactggaatacgctaattgtgggaaagctttctccatggattcgtccagactcaaaagtggagaagattcgcaggaactccgaggcggccatgttacaggagctgaattttggtgcatatttgggtcttccagctttcctgctgccccttaatcaggaagataacaccaacctggccagagttttgaccaaccacatccacactggccatcactcttccatgttctggatgcgggtacccttggtggcaccagaggacctgagagatgatataattgagaatgcaccaactacacacacagaggagtacagtggggaggagaaaacgtggatgtggtggcacaacttccggactttgtgtgactatagtaagaggattgcagtggctcttgaaattggggctgacctcccatctaatcatgtcattgatcgctggcttggggagcccatcaaagcagccattctccccactagcattttcctgaccaataagaagggatttcctgttctttctaagatgcaccagaggctcatcttccggctcctcaagttggaggtgcagttcatcatcacaggcaccaaccaccactcagagaaggagttctgctcctacctccaatacctggaatacttaagccagaaccgtcctccacctaatgcctatgaactctttgccaagggctatgaagactatctgcagtccccgcttcagccactgatggacaatctggaatctcagacatatgaagtgtttgaaaaggaccccatcaaatactctcagtaccagcaggccatctataaatgtctgctagaccgagtaccagaagaggagaaggataccaatgtccaggtactgatggtgctgggagcaggacggggacccctggtgaacgcttccctgcgggcagccaagcaggccgaccggcggataaagctgtatgctgtggagaaaaacccaaatgccgtggtgacgctagagaactggcagtttgaagaatggggaagccaagtgaccgtagtctcatcagacatgagggaatgggtggctccagagaaagcagacatcattgtcagtgagcttctgggctcatttgctgacaatgaattgtcgcctgagtgcctggatggagcccagcacttcctaaaagatgatggtgtgagcatccccggggagtacacttcctttctggctcccatctcttcctccaagctgtacaatgaggtccgagcctgtagggagaaggaccgtgaccctgaggcccagtttgagatgccttatgtggtacggctgcacaacttccaccagctctctgcaccccagccctgtttcaccttcagccatcccaacagagatcctatgattgacaacaaccgctattgcaccttggaatttcctgtggaggtgaacacagtactacatggctttgccggctactttgagactgtgctttatcaggacatcactctgagtatccgtccagagactcactctcctgggatgttctcatggtttcccatcctcttccctattaagcagcccataacggtacgtgaaggccaaaccatctgtgtgcgtttctggcgatgcagcaattccaagaaggtgtggtatgagtgggctgtgacagcaccagtctgttctgctattcataaccccacaggccgctcatataccattggcctctagccctgcgtgccaagtgtccagagccttggaagcagcttcaggttctgctcctgtagtacagaaggtgcagtacatctatgggctgtgattccccttgcccatcagagaggagcatttcaatctgctttcctgccttacatcaaggtgggcaagggattataattaattgcagggctcaagccaccaatctatgaagacctcaggccagggggtgaggaattagtgctggatttgaagctacgcactcagcctcaagaactccctggaatatccctgagaacatggggtttgaacggattttcagcctttttctgttcttgttttgatggttttgtgtaagaggaaatacaaataaagttatagccctttactgcacgacc

SEQ ID NO: 1148 - protein, 620 aa, Homo sapiens
MRGPNSGTEKGRLVIPEKQGFDFLCMPVFHPRFKREFIQEPAKNRPGPQTRSDLLLSGRDWNTLIVGKLSPWIRPDSKVEKIRRNSEAAMLQELNFGAYLGLPAFLLPLNQEDNTNLARVLTNHIHTGHHSSMFWMRVPLVAPEDLRDDIIENAPTTHTEEYSGEEKTWMWWHNFRTLCDYSKRIAVALEIGADLPSNHVIDRWLGEPIKAAILPTSIFLTNKKGFPVLSKMHQRLIFRLLKLEVQFIITGTNHHSEKEFCSYLQYLEYLSQNRPPPNAYELFAKGYEDYLQSPLQPLMDNLESQTYEVFEKDPIKYSQYQQAIYKCLLDRVPEEEKDTNVQVLMVLGAGRGPLVNASLRAAKQADRRIKLYAVEKNPNAVVTLENWQFEEWGSQVTVVSSDMREWVAPEKADIIVSELLGSFADNELSPECLDGAQHFLKDDGVSIPGEYTSFLAPISSSKLYNEVRACREKDRDPEAQFEMPYVVRLHNFHQLSAPQPCFTFSHPNRDPMIDNNRYCTLEFPVEVNTVLHGFAGYFETVLYQDITLSIRPETHSPGMFSWFPILFPIKQPITVREGQTICVRFWRCSNSKKVWYEWAVTAPVCSAIHNPTGRSYTIGL

SEQ ID NO: 1149 - DNA, 2385 bp, Homo sapiens
gcgactcgtcccgccttctggggcactagtttgactttgtgattggctactagtatcaaggaatcccggcgtggacagcgcgaggagaaagatggcggcgatggcggtcgggggtgctggtgggagccgcgtgtccagcgggagggacctgaattgcgtccccgaaatagctgacacactaggggctgtggccaagcaggggtttgatttcctctgcatgcctgtcttccatccgcgtttcaagagggagttcattcaggaacctgctaagaatcggcccggtccccagacacgatcagacctactgctgtcaggaagggactggaatacgctaattgtgggaaagctttctccatggattcgtccagactcaaaagtggagaagattcgcaggaactccgaggcggccatgttacaggagctgaattttggtgcatatttgggtcttccagctttcctgctgccccttaatcaggaagataacaccaacctggccagagttttgaccaaccacatccacactggccatcactcttccatgttctggatgcgggtacccttggtggcaccagaggacctgagagatgatataattgagaatgcaccaactacacacacagaggagtacagtggggaggagaaaacgtggatgtggtggcacaacttccggactttgtgtgactatagtaagaggattgcagtggctcttgaaattggggctgacctcccatctaatcatgtcattgatcgctggcttggggagcccatcaaagcagccattctccccactagcattttcctgaccaataagaagggatttcctgttctttctaagatgcaccagaggctcatcttccggctcctcaagttggaggtgcagttcatcatcacaggcaccaaccaccactcagagaaggagttctgctcctacctccaatacctggaatacttaagccagaaccgtcctccacctaatgcctatgaactctttgccaagggctatgaagactatctgcagtccccgcttcagccactgatggacaatctggaatctcagacatatgaagtgtttgaaaaggaccccatcaaatactctcagtaccagcaggccatctataaatgtctgctagaccgagtaccagaagaggagaaggataccaatgtccaggtactgatggtgctgggagcaggacggggacccctggtgaacgcttccctgcgggcagccaagcaggccgaccggcggataaagctgtatgctgtggagaaaaacccaaatgccgtggtgacgctagagaactggcagtttgaagaatggggaagccaagtgaccgtagtctcatcagacatgagggaatgggtggctccagagaaagcagacatcattgtcagtgagcttctgggctcatttgctgacaatgaattgtcgcctgagtgcctggatggagcccagcacttcctaaaagatgatggtgtgagcatccccggggagtacacttcctttctggctcccatctcttcctccaagctgtacaatgaggtccgagcctgtagggagaaggaccgtgaccctgaggcccagtttgagatgccttatgtggtacggctgcacaacttccaccagctctctgcaccccagccctgtttcaccttcagccatcccaacagagatcctatgattgacaacaaccgctattgcaccttggaatttcctgtggaggtgaacacagtactacatggctttgccggctactttgagactgtgctttatcaggacatcactctgagtatccgtccagagactcactctcctgggatgttctcatggtttcccatcctcttccctattaagcagcccataacggtacgtgaaggccaaaccatctgtgtgcgtttctggcgatgcagcaattccaagaaggtgtggtatgagtgggctgtgacagcaccagtctgttctgctattcataaccccacaggccgctcatataccattggcctctagccctgcgtgccaagtgtccagagccttggaagcagcttcaggttctgctcctgtagtacagaaggtgcagtacatctatgggctgtgattccccttgcccatcagagaggagcatttcaatctgctttcctgccttacatcaaggtgggcaagggattataattaattgcagggctcaagccaccaatctatgaagacctcaggccagggggtgaggaattagtgctggatttgaagctacgcactcagcctcaagaactccctggaatatccctgagaacatggggtttgaacggattttcagcctttttctgttcttgttttgatggttttgtgtaagaggaaatacaaataaagttatagccctttactgcacgacc

SEQ ID NO: 1150 - protein, 637 aa, Homo sapiens
MAAMAVGGAGGSRVSSGRDLNCVPEIADTLGAVAKQGFDFLCMPVFHPRFKREFIQEPAKNRPGPQTRSDLLLSGRDWNTLIVGKLSPWIRPDSKVEKIRRNSEAAMLQELNFGAYLGLPAFLLPLNQEDNTNLARVLTNHIHTGHHSSMFWMRVPLVAPEDLRDDIIENAPTTHTEEYSGEEKTWMWWHNFRTLCDYSKRIAVALEIGADLPSNHVIDRWLGEPIKAAILPTSIFLTNKKGFPVLSKMHQRLIFRLLKLEVQFIITGTNHHSEKEFCSYLQYLEYLSQNRPPPNAYELFAKGYEDYLQSPLQPLMDNLESQTYEVFEKDPIKYSQYQQAIYKCLLDRVPEEEKDTNVQVLMVLGAGRGPLVNASLRAAKQADRRIKLYAVEKNPNAVVTLENWQFEEWGSQVTVVSSDMREWVAPEKADIIVSELLGSFADNELSPECLDGAQHFLKDDGVSIPGEYTSFLAPISSSKLYNEVRACREKDRDPEAQFEMPYVVRLHNFHQLSAPQPCFTFSHPNRDPMIDNNRYCTLEFPVEVNTVLHGFAGYFETVLYQDITLSIRPETHSPGMFSWFPILFPIKQPITVREGQTICVRFWRCSNSKKVWYEWAVTAPVCSAIHNPTGRSYTIGL

SEQ ID NO: 1151 - DNA, 1618 bp, Homo sapiens
ggctccttccccttcccgggcctttcagcttggtctttccgggcctcgcttcccccagcccctgcgcccggcccgaacgagaggttccggagccccggcgcgggcgggttctggggtgtagacgctgctggccagccctccccagccgaggttctcggcaccgccttgagagcttcagctgccccaggattagaatcccaagaaaatcaaatggcatccggggatttctgctcacctggagaagggatggaaatacttcaacaagtgtgcagcaaacaacttcctccttgtaacctgagtaaagaggacctgttacagaacccatacttcagcaagcttctcctgaatctctcacagcatgtggatgagagtggcttaagcctcaccctagcaaaggagcaggctcaggcatggaaggaagttcgactgcataagacaacatggttgaggtctgagattttacacagagtcattcaagagttgcttgtggactactatgtgaagatacaagacacaaatgtaacttctgaggacaaaaagtttcatgagacccttgaacagcggctgcttgtaactgaactgatgcggctcttaggtcctagccaggagagggagatacctccactgctggggctggagaaagcggaccttctggaactcatgccactcacagaggattttgtgtggatgagggctcggctacagcaagaagtagaggagcagctcaaaaagaaatgtttcactctgctctgctactatgatcccaattcagatgctgacagtgaaaccgtgaaggcagcaaaggtgtggaaactcgcagaggtcctggtgggtgagcagcagcagtgccaggatgccaagagccagcagaaggagcagatgttgctgctggagaagaagagtgctgcttactcccaggtgcttctccgctgcctcactttgctgcagaggcttcttcaagaacaccggctgaagactcaatccgagctagaccgcatcaatgcccagtacctggaagtcaagtgcggtgctatgatccttaagctgaggatggaggagctaaagattttgtccgacacttacactgttgagaaagtggaagttcatcgtctgattagggaccgtttggagggagccattcacctacaggagcaggacatggagaactcaagacaggtcctgaactcctatgaggtccttggggaggagtttgacaggctggtgaaagagtacaccgtactcaagcaggcaacagagaacaagcggtgggccctccaggagttcagcaaggtctaccgttgagctctggcagggccaggagacatggcttctgcatagctgctgcctcctaatcttcctgctagtgggaccaccttcacctggggctgccttcagtgcaagggagtgtggaaatgcttacgcttgaaacactgcagtcatttaggcactctcctggtttctctttattttttatgactgggcctcttctggaaaatctagcaaggagatttatataatttttatgcatagctgtgtgtcagtgtcagccctgtattgtatttgattatctcctgaataaagttatgatattatatcttaaaaaaaaaaaaaaaaaaaa

SEQ ID NO: 1152 - protein, 363 aa, Homo sapiens
MASGDFCSPGEGMEILQQVCSKQLPPCNLSKEDLLQNPYFSKLLLNLSQHVDESGLSLTLAKEQAQAWKEVRLHKTTWLRSEILHRVIQELLVDYYVKIQDTNVTSEDKKFHETLEQRLLVTELMRLLGPSQEREIPPLLGLEKADLLELMPLTEDFVWMRARLQQEVEEQLKKKCFTLLCYYDPNSDADSETVKAAKVWKLAEVLVGEQQQCQDAKSQQKEQMLLLEKKSAAYSQVLLRCLTLLQRLLQEHRLKTQSELDRINAQYLEVKCGAMILKLRMEELKILSDTYTVEKVEVHRLIRDRLEGAIHLQEQDMENSRQVLNSYEVLGEEFDRLVKEYTVLKQATENKRWALQEFSKVYR

SEQ ID NO: 1153 - DNA, 4236 bp, Homo sapiens
agttccggccaggcagacaaaagtttgggagagaagttcggtctgtggctagcgtgagagctaggggggcgggggccggggagagtggggcagtcgggcgagtcgacgcgtgaacagatagacctgcggactggacagccgcggccagagaccctgctagccccgctcagccccagatgcgcggggggacgcagcccctcccgctgggggatgctgtgggattcctggcgcagggcatccaggccgcccgctaagcccctgtgcctcccctgtgcccctggggaaccagagtccggctgcagggaaagagaaccggccgccgagacgccgcagggtgccaggcggggagggggcgagaggccccaggcccgagggcatggagcggttaggagagaaagccagtcgcctgctggagaagttcggccgcagaaagggtgaatctagccggtctgggtctgacgggacccccgggccgggcaaggggcgcctaagtgggttggggggacctaggaagtcagggccccgaggagctactgggggacctggggatgagccgttggagccggcccgggagcaaggttccctggacgctgagcgaaatcagcgcggctcctttgaggcgccgcgctacgaaggctcttttcccgcggggccgccgcccacccgggccttgcctctacctcagtcgttgccccccgattttcggctggagcccacggccccggccctcagcccccgctctagcttcgccagtagctcggccagcgacgcgagcaagccgtccagcccccggggcagcctgctgctggacggggcgggggctggcggagctggaggtagccggccctgcagcaatcgcaccagcggcatcagcatgggctacgaccagcgccacgggagccccttgccagcggggccgtgcctgtttggcccacccctggccggagcaccggcaggctattctcccggaggggtcccgtccgcctacccggagctccacgccgccctggaccgattgtacgctcagcggcccgcggggttcggctgccaggaaagccgccactcgtatcccccggccctgggcagccctggagctctagccggggccggagtgggagcggcggggcccttggagagacggggggcgcaacccggacgacactctgtgaccggctacggggactgcgccgtgggcgcccggtaccaggacgagctaacagctttgcttcgcctgacggtgggcaccggtgggcgagaagccggagcccgcggagaaccctcggggattgagccgtcgggtctggaggagccaccaggtcctttcgttccggaggccgcccgggcccggatgcgggagccagaggccagggaggactacttcggcacctgtatcaagtgcaacaaaggcatctatgggcagagcaatgcctgccaggccctggacagcctctaccacacccagtgctttgtttgctgctcttgtgggcgaactttgcgttgcaaggctttctacagtgtcaatggctctgtgtactgtgaggaagattatctgttttcagggtttcaggaggcagctgagaaatgctgtgtctgtggtcacttgattttggagaagatcctacaagcaatggggaagtcctatcatccaggctgtttccgatgcattgtttgcaacaagtgcctggatggcatccccttcacagtggacttctccaaccaagtatactgtgtcaccgactaccacaaaaattatgctcctaagtgtgcagcctgtggccaacccatcctcccctctgagggctgtgaggacatcgtgagggtgatatccatggaccgggattatcactttgagtgctaccactgtgaggactgccggatgcagctgagtgatgaggaaggctgctgctgtttccctctggatgggcacttgctctgccatggttgccacatgcagcggctcaatgcccgacaaccccctgccaactatatctgagctgcaatcactgctgctgctgtcaccctgcagacaaactgctgtggccagtgggcccctctgaggccagccaaggcaaagaatgcactctgcaggcctggcagaagagtcctctggggaggaccccaagggccggagacccaaagatcatgatattccaaatggattgtggaagagaaaccttatatttaccagggtgggggcgactggcctttttcccatgtgtgcagtctgagcttaggcacacacaggagggttccaggactttctgaacatctgattctgtatcttcagtatatatattttgtttgttttagagatgggatctcaccatgttgcccaggctagtcttgaactcctgggctcgaatgatcctcccaccttggcctcccaaagtgctgggattataggcgtaagccactgtgtctggcctagtgtatgattatgcatgagtcacgcaatgttctggtcctggattccaggagtagaggacctagctttaaatcaattagtttcagctaaactgactagaaccaggtcaaagtgtaattctccctccagctcccccaaaccccagagttttggggttgtggttgatgcagtgtgggatgtccctgagaggtagcaagtctagggtggtgagttcctgctaggcaaccaaatttaagctcctcactttttgtgacacatggtgtcagatatggggtcccgcacctatatctggatgaagaggtagaaactctggacctcattaatgagttatttcttggccttcttctaaggactaggagagctccttatctgtctgagaatggggaccagctctgagtggggttgctgcctgtattccctgtttctcaggaacttacatgggtctggggaggctaggtaggtgattgtacgtggttgctcttctccttggctgggggaggtaatgagcagatctctgtgggtgtggagcttgttggggggatgtctaggaagcttcagcttagccacattcccaagtttaggtgcactgagccatatagcccagtgtatgcatgtgtgggtgtgttcatgcacacacacactctctctcttgtctctctgtctctctctcactctttcttactctcttctcaggtcacttgtacacttggtttcctagtagaagctcacttgccacctctcagaggggtcccggattgcatccatcacaatcccaaaactagagttggggggaactggagggagcaaaacactgatttgatactagtcagtttgcttgaaactagttcacctaaagctagatctcttaaaaccaatttactgaaaacttgtttgcttaaagttaatgacttaatgactaatttgccaaaagctcaattcctattttggtgtgtttatatccatttaggtgtcctattcttttttgtcatgctttggatatttcaaggatttatatctattcatccaagagtacttctgagctattatcagcaacataaatttatcaaatttgcagcactttgtaaatgatgagattgcttcctacctttatggatgtctttttctatgttatctaccattcaaaaacttttttaaaaagtttaaagtttctagcaataaatacaattggtacagacattttgtgtatcatttttttgtttcttaatccaatattcctttacaaattaaatgccttgaaaaatataatggagttcaatgtgattttgatgctttggtctaacttctacattcctactgttaaaaaggccagtatatcttaaacaaatgaataggcatgaggcatattcagttgacttacaatgaaaagttatacagacaacagtaataactaaaagggtgaatctgctaaatccttttgaaatgctgcagatttgataaatatttattttagactaattggttttaggtgaattggttttaggcaaattaatttagtaatctttgatctttagtcttcattttctgtcactcagtgagtttcttactggaaatgatgactcctgacaacagaatttccacatttgggggctattctaaggtgactatgccagccaacctgggaaatacataaaagagatctctgagtgagagggaaagaggtcagatttatacaactgagcgccagaggggaaaatgcaccttgttggagtgagaaatgttctgaaactgaattacttcttgtacagctgagatagcttcttctgaactattattaaataagtgaatacaaa

SEQ ID NO: 1154 - protein, 538 aa, Homo sapiens
MERLGEKASRLLEKFGRRKGESSRSGSDGTPGPGKGRLSGLGGPRKSGPRGATGGPGDEPLEPAREQGSLDAERNQRGSFEAPRYEGSFPAGPPPTRALPLPQSLPPDFRLEPTAPALSPRSSFASSSASDASKPSSPRGSLLLDGAGAGGAGGSRPCSNRTSGISMGYDQRHGSPLPAGPCLFGPPLAGAPAGYSPGGVPSAYPELHAALDRLYAQRPAGFGCQESRHSYPPALGSPGALAGAGVGAAGPLERRGAQPGRHSVTGYGDCAVGARYQDELTALLRLTVGTGGREAGARGEPSGIEPSGLEEPPGPFVPEAARARMREPEAREDYFGTCIKCNKGIYGQSNACQALDSLYHTQCFVCCSCGRTLRCKAFYSVNGSVYCEEDYLFSGFQEAAEKCCVCGHLILEKILQAMGKSYHPGCFRCIVCNKCLDGIPFTVDFSNQVYCVTDYHKNYAPKCAACGQPILPSEGCEDIVRVISMDRDYHFECYHCEDCRMQLSDEEGCCCFPLDGHLLCHGCHMQRLNARQPPANYI

SEQ ID NO: 1155 - DNA, 3263 bp, Homo sapiens
taactccagtcctgacctccatggagtctgtccctggaaggagacaggcatttgagagcaggatagatatgctcaggcaaagaggcttctaggttgaagggtcccagagggaaaggcctgttaacaatgtggttctctctatgcaaatcatatagcaccttattaagagctcacgtattccagcacgtagttggctttactctcccaggtggcttcctatgcactggagaggaaagcagtttgtttaggggaggggccctagaaaactgttaaggaggcaggagctggaggagcagcaagcagaggagaggggaagttggctggaatgaagccaaagcaaattggaattgcatcagatggaatttttgtgcggggaaggacagacagcagttaggaggaaaagcacaaagtccaggtttaaatatattatgcagcagcggggagcagtgaccccagaagtcttgcacctgggctgtgggataggttccagccccttctctattgtttctagggcgaactttgcgttgcaaggctttctacagtgtcaatggctctgtgtactgtgaggaagattatctgttttcagggtttcaggaggcagctgagaaatgctgtgtctgtggtcacttgattttggagaagatcctacaagcaatggggaagtcctatcatccaggctgtttccgatgcattgtttgcaacaagtgcctggatggcatccccttcacagtggacttctccaaccaagtatactgtgtcaccgactaccacaaaaattatgctcctaagtgtgcagcctgtggccaacccatcctcccctctgagggctgtgaggacatcgtgagggtgatatccatggaccgggattatcactttgagtgctaccactgtgaggactgccggatgcagctgagtgatgaggaaggctgctgctgtttccctctggatgggcacttgctctgccatggttgccacatgcagcggctcaatgcccgacaaccccctgccaactatatctgagctgcaatcactgctgctgctgtcaccctgcagacaaactgctgtggccagtgggcccctctgaggccagccaaggcaaagaatgcactctgcaggcctggcagaagagtcctctggggaggaccccaagggccggagacccaaagatcatgatattccaaatggattgtggaagagaaaccttatatttaccagggtgggggcgactggcctttttcccatgtgtgcagtctgagcttaggcacacacaggagggttccaggactttctgaacatctgattctgtatcttcagtatatatattttgtttgttttagagatgggatctcaccatgttgcccaggctagtcttgaactcctgggctcgaatgatcctcccaccttggcctcccaaagtgctgggattataggcgtaagccactgtgtctggcctagtgtatgattatgcatgagtcacgcaatgttctggtcctggattccaggagtagaggacctagctttaaatcaattagtttcagctaaactgactagaaccaggtcaaagtgtaattctccctccagctcccccaaaccccagagttttggggttgtggttgatgcagtgtgggatgtccctgagaggtagcaagtctagggtggtgagttcctgctaggcaaccaaatttaagctcctcactttttgtgacacatggtgtcagatatggggtcccgcacctatatctggatgaagaggtagaaactctggacctcattaatgagttatttcttggccttcttctaaggactaggagagctccttatctgtctgagaatggggaccagctctgagtggggttgctgcctgtattccctgtttctcaggaacttacatgggtctggggaggctaggtaggtgattgtacgtggttgctcttctccttggctgggggaggtaatgagcagatctctgtgggtgtggagcttgttggggggatgtctaggaagcttcagcttagccacattcccaagtttaggtgcactgagccatatagcccagtgtatgcatgtgtgggtgtgttcatgcacacacacactctctctcttgtctctctgtctctctctcactctttcttactctcttctcaggtcacttgtacacttggtttcctagtagaagctcacttgccacctctcagaggggtcccggattgcatccatcacaatcccaaaactagagttggggggaactggagggagcaaaacactgatttgatactagtcagtttgcttgaaactagttcacctaaagctagatctcttaaaaccaatttactgaaaacttgtttgcttaaagttaatgacttaatgactaatttgccaaaagctcaattcctattttggtgtgtttatatccatttaggtgtcctattcttttttgtcatgctttggatatttcaaggatttatatctattcatccaagagtacttctgagctattatcagcaacataaatttatcaaatttgcagcactttgtaaatgatgagattgcttcctacctttatggatgtctttttctatgttatctaccattcaaaaacttttttaaaaagtttaaagtttctagcaataaatacaattggtacagacattttgtgtatcatttttttgtttcttaatccaatattcctttacaaattaaatgccttgaaaaatataatggagttcaatgtgattttgatgctttggtctaacttctacattcctactgttaaaaaggccagtatatcttaaacaaatgaataggcatgaggcatattcagttgacttacaatgaaaagttatacagacaacagtaataactaaaagggtgaatctgctaaatccttttgaaatgctgcagatttgataaatatttattttagactaattggttttaggtgaattggttttaggcaaattaatttagtaatctttgatctttagtcttcattttctgtcactcagtgagtttcttactggaaatgatgactcctgacaacagaatttccacatttgggggctattctaaggtgactatgccagccaacctgggaaatacataaaagagatctctgagtgagagggaaagaggtcagatttatacaactgagcgccagaggggaaaatgcaccttgttggagtgagaaatgttctgaaactgaattacttcttgtacagctgagatagcttcttctgaactattattaaataagtgaatacaaa

SEQ ID NO: 1156 - protein, 121 aa, Homo sapiens
MGKSYHPGCFRCIVCNKCLDGIPFTVDFSNQVYCVTDYHKNYAPKCAACGQPILPSEGCEDIVRVISMDRDYHFECYHCEDCRMQLSDEEGCCCFPLDGHLLCHGCHMQRLNARQPPANYI

SEQ ID NO: 1157 - DNA, 2352 bp, Homo sapiens
ctttttgcacacacacgaatacaaagagccatacgaccttcggatgccggaaggtccttctgaatcccttccctgttccttaggttgcactagtcgggggttccatgctggggggcagaaggaatgctctctaccgtctgaaaccgttcatcaggaaggccttgatttgtgatgtgctaggagagcacaggatctgcaaatagaaggcacctgtctcccttctgcaggccgaggagaggccgccatggactgtgtgcttcttcatggcttgtttactcttctttcacagaccctacagcttggggcctgggctcctctgaccatcctcattgagaaaggaaagtgagtccagagaagttgatgcttcctacctgttggagcggcccagcagtgtaagcgtggttgttactgccccatccgccatgtccttcagtgccaccattctcttctcccctcccagtggcagcgaggccagatgctgctgctgcgcctgtaagagtgagactaatggaggcaacacaggctcccagggtgggaatcctcctcccagcacccccatcacagtgactggacatggcttggctgttcagagctcagagcagctcctgcatgttatctaccagcgggtcgataaggcagtgggtttggctgaagctgctctgggtcttgccagggccaacaatgagttgttaaaacgtctccaggaggaagtgggtgacctgaggcaagggaaagtgtccatccctgatgaagatggggaaagccgggcacatagttccccacctgaggagcctgggcctctcaaggaaagtcccggggaagcctttaaggctctgtctgccgtggaagaggagtgtgacagcgtgggcagcggcgtgcaggtggtgattgaggagctgcggcagctgggagcagcctcagtggggcctgggcctttgggcttcccagcaactcagagggacatgcggctcccagggtgcacgctggctgccagcgaggcggcccccctgctcaatcctctggtggatgattacgtggcctctgagggtgcagtacagcgagttctggtccctgcttatgccaagcaactctcaccagccacacaactggcaatccagcgggcaaccccagagacaggaccagaaaatggaaccaagctgccaccaccccgccctgaggacatgctcaatgccgctgctgcgctggacagtgccttggaagagtcaggccctgggagcactggggagctgagacactctctagggctgaccgtttccccatgcaggaccagaggaagtgggcagaagaactccaggcgcaagcgggatcttgtactctctaaactggtccacaatgtgcataaccacatcaccaatgacaagagattcaatgggtctgaaagcatcaagtcctcttggaatatttcagtagtgaagtttcttctggaaaagctcaagcaagagctggtgaccagtccccacaattacactgataaggagctaaaaggagcctgtgtggcctacttccttactaagaggcgtgagtaccgcaactccctgaacccctttaaaggcctgaaggaaaaagaggagaagaaacttcgaagtcgccgatatcggctttttgccaaccgatccagtatcatgaggcattttggacctgaggaccaacgtctgtggaatgatgtgacagaggaactgatgtcagatgaagaggacagtcttaacgagccaagtgtgtgggtggcccgccctccccgtttccgggcccagcgcctcacagagctctgctaccacctggatgctaactctaagcatggcaccaaagccaaccgtgtgtatgggcctccctcagacagactgccttctgctgaagcccagctccttccaccagaactttacaatcctaatttccaagaagaggaagatgagggaggggatgagaatgcacctggctccccatcttttgaccaaccccacaaaacctgctgtcctgacttgaactcattcattgaaatcaaggtggaaaaggatgaataaaatctacagccaagaataactctggcttccgccatgccccatgtctcagaaataggtggccatggggcttcacaaaataatgagatgctctgtgcagtctgagaaagcaaatttgcctcttttcttaacacagtctctactggggaagcagaacactggtgggataaaaacttatctagaaggggagaaactccctccactgtgaacagtaagccagaatatgcttattcctcagcataaacagtatctcggagaagcctgggatgagaaaatgaggaggatgggtccaagaaacatgaggccttcttgacat

SEQ ID NO: 1158 - protein, 538 aa, Homo sapiens
MSFSATILFSPPSGSEARCCCCACKSETNGGNTGSQGGNPPPSTPITVTGHGLAVQSSEQLLHVIYQRVDKAVGLAEAALGLARANNELLKRLQEEVGDLRQGKVSIPDEDGESRAHSSPPEEPGPLKESPGEAFKALSAVEEECDSVGSGVQVVIEELRQLGAASVGPGPLGFPATQRDMRLPGCTLAASEAAPLLNPLVDDYVASEGAVQRVLVPAYAKQLSPATQLAIQRATPETGPENGTKLPPPRPEDMLNAAAALDSALEESGPGSTGELRHSLGLTVSPCRTRGSGQKNSRRKRDLVLSKLVHNVHNHITNDKRFNGSESIKSSWNISVVKFLLEKLKQELVTSPHNYTDKELKGACVAYFLTKRREYRNSLNPFKGLKEKEEKKLRSRRYRLFANRSSIMRHFGPEDQRLWNDVTEELMSDEEDSLNEPSVWVARPPRFRAQRLTELCYHLDANSKHGTKANRVYGPPSDRLPSAEAQLLPPELYNPNFQEEEDEGGDENAPGSPSFDQPHKTCCPDLNSFIEIKVEKDE

SEQ ID NO: 1159 - DNA, 5534 bp, Homo sapiens
gtgggccgttgaatgtggctgctcgcggtcggcgtgccccgacgtacagcgggccgggaaaagtggcactgaggctctggaacttctgcccagctctccttgtaaaatgaatgaaagtaaacctggtgactcacagaaccttgcttgtgttttctgtcgaaaacatgatgactgtcctaataaatacggagaaaagaaaactaaggagaaatggaatctcactgtacattactactgtttgttgatgtcaagtggaatttggcagagaggcaaagaagaagaaggagtttatggttttctaatagaagatatcaggaaggaagtgaatagagcttctaaactgaaatgctgtgtttgcaagaaaaatggtgcttcaattggatgtgttgcaccccgatgtaaacgaagttatcatttcccatgtggacttcagagagaatgtattttccagtttactggcaattttgcgtcattttgttgggaccatcgacctgttcaaataattacatctaataattatagagagtccttaccatgcaccatttgcttggaatttattgagcctattccaagttataacatattacgaagtccttgttgtaagaacgcttggtttcatagagactgtttacaggttcaagcaataaatgcgggagtgtttttctttaggtgtacaatatgcaataatagtgacatctttcagaaagagatgttgagaatgggaattcatattcctgaaaaagatgcttcctgggaattagaggaaaacgcttatcaagagcttctgcagcactatgagcgttgtgatgttcgaagatgtcgttgcaaagaagggcgagactataatgcacctgatagcaaatgggaaataaagcgctgtcagtgttgtggttccagtggcacacatttagcctgctcctcattacggtcatgggagcaaaattgggagtgtttggaatgtaggggtattatctacaattcaggagagttccaaaaagccaaaaaacatgtattacccaattctaataatgtggggattacagattgtttgttggaagagtcatcacctaaattacccagacagtcacctggatcccagagtaaagatctactgaggcaaggcagcaaatttagaagaaatgtatcaacactattaatagagttaggattccaaattaaaaaaaaaactaaaagattgtatatcaacaaagccaatatctggaatagtgccttagatgcattcagaaatcgaaactttaatccttcatatgcaattgaagtagcatatgttattgaaaatgataattttggaagtgagcatcctggatcaaagcaagaatttctgagtctcttaatgcaacatcttgagaactcatcattgtttgaagggtccttgtcaaagaacttgtctctaaattctcaagctctgaaagagaatctttactatgaagctggcaaaatgcttgccatttctttagttcacggtggtccttcacctggtttcttttctaaaaccttgtttaactgccttgtttatggaccagaaaatacccagccaattttagatgatgtttcagactttgatgtggcacagattataatcaggataaatactgcaacaactgtagctgacttaaagtcaataataaatgaatgctataactaccttgagttaattggatgtctcagacttataacgacattaagtgataaatatatgttagtaaaagacatacttggctaccatgtaattcagagagtccacacaccctttgaaagttttaagcagggtctgaaaacccttggtgttttggagaaaattcaggcttatccagaagcattttgtagcatcctgtgtcataaacctgagagtctttctgcaaaaatccttagtgagctttttacagtacacacattacctgatgtgaaagctttggggttttggaacagttacttacaggctgttgaagatggtaaatctacaacaacaatggaagacattcttatttttgcaactggttgcagttccattcctccagctggatttaaacccactccttcaattgagtgtctgcatgtggattttcctgttggaaacaagtgtaataactgtttagcaattcccatcaccaatacatataaagagtttcaagaaaatatggacttcaccataagaaacactctaagactagaaaaggaagaaagttctcattacattggacattaaaatgtttccttgaacaaagagaagcttctttaaaagctgctattgataactctcttttatttcactaaccttttcatcatcactttgaacaaactagttagcttcttgacctaataaaatttatgatatgaatataaaggaatattatagccacttaggctaaaaaaaggttttttttgttaaagcatactagtcaaaattggtgataatttctcattttcttgatatagatacttcataaacctcaatataaatactctcaaaatggttgtatggattttatttaggtatggtagcatggttaataaaagtaaaaactgttttactcacattttttgtaaattaggattacatatagaatgccacaatttctctaggtttattcaattttcaaattattcctcattttattttaaagcattaaatagaaaagctaattggttaaattttgttatataaatcagagtcatatattctgggatttgtgttactatgcatacttttctaggatgtcaccaaattagttgtttaaaatgtttttagattactgatttatattaagatgacccacactgcaattagattatgcctagtgggaagtattatataaaaagcagaattaagctgggcacatgtgcttgtaatctcagttataagggaggctgaggtgggagaatcgagatactcagccagcctggcaatgtagcaaagactccatctcaaaaaaaaaaaacagaattgcacaaattttctggaatctatggacattccatgagcttaaacacttttgaggtggataacatttagttgaaaatacctaagaaagtgtgtcttctttaaagccttggctttaatcatgggaaattgttgttgttgttgttgttgtttgtatcctatgtttggtattctgtatgtctgatccataatcattttagatatttgaatgatctctgtggattggtaggtttggccatttgaccattatttattatcaagttggttgtatgctaaggtaagttgacgccatagcattatacagttatcttcattgctcttgaatgatatctgttatataagcaatgtataaataaagtaaaaaggatagaatgaaaaacccattctaatgtcaccactcagagataagtaccgtatttctgtgtatccttctataaactctttacttctgtttcctttattttttaactttaataatgctactaaaagacaatacctaaaagtaactgtactaacaaagtgctaacaatgtgaaaatatatagtcccatagtcatgtccccatatttatactcccacagaagaaaaaattggaaaacaaagtctgatgtccttaatctattaacatatttaaatgatataatggttcagttttccatgaaagtaaatcattatgggaagtaaaatgttttaaccatatttttcttaatacacaaagcaggtgtcagctgttgtattctcacccttcttaagaaaaatcattacattattgatattttttaagtaacagaatagatttgaaagagataatatatctcttaataccaaaggaaaactaaaacataattctagtgtacttttctttgttccctcatgtctttttcaatctgtacactaacatacctagcaaatttgttttactttaacttgaaatatttaagaacattaaacaagacatttctttggctttggttgaatttttttgtctcaccaatagtaattgaaagatcaattatcaaagagtttgaatagctaatataaaccccaaagtcaccatacagtttttattccaaatatgttgataaaaagatatttgtttctttatccaccttatttttattacagctaaaaaccaatacaaaccaataaaacctagttaaagctattttctggtttttagttgcaattaatttcccctagggtagaaattaaagctgattaagtcacacacacatactttgttggggtgggggtggcaggtggagaggcagtgtacttgggttagctacaattaaaaacagtatttcaattcctcatttgacttattttatatatagacagggccttagtgataagatggtgtaaataatttaggatattcatgttttaaagtgaagcataaatatttattttgcaaaatgttttctagtttgaaggatgttccattattaccatttttagattaatctgtatggtcaaggaatatcagagaaacctgtaggttatttattttctgcagtgtcattttgtcaaatggttggtattataattgttcttttcttattaattttataaccagtgcataattcttacattagattttaaaaaagaattatgctataaatctttataaatgtgtacatatatttcttaaatattgcaattgcctaaatgttgtatattttaaggctgttttctcttgctcttaatgttgaggaaaactataaattgatctataatgcatctactgttaatggttttggttagtttgatattcattgtttttaaacactttccaatatggaaactttaacaccttttatacaattctctactattcaagatattctttaaaatatctcaccagaaacttacaattttatactttgtaatttttagtttctgtaatttgaggaagtgactttttttgtttgggttaagtaaaaagcctttgattgattaccagcatgagaattcaccttggtttctattttatgcatttgtaaatttttcccctaattatatggaagctattggaacttttgtattcagtgctaaatactaagtcaaggggagtatattaggtaagttttttcagtgactgtgcctttagcattcagtcattataagaaaatgatcagaacaaaatcattacattataaacatgtaattcttttatatagtgattatcatgtactgcattgttactttaaaataagctattaaactagtttttatggttcaagtaatgcaatacaaagtttcatgcttcaagtaatgcaatacaaaacataacccatttaatgatgaattacttgaatgtatattatctgtggtttaggaaaatttggattgtcttgaagagacttagttttcaagttctgattttgaccattatctcttctaattcataaacatatcccagtacctacactatgccaggtattatgctaggtgatcgtttatatgtcagcctatttcccccccttttaaagactgccagattaaccaaaaagcgtgacatttataacaatgttttataaataaataaatgtgtttatgccactaaaggt

SEQ ID NO: 1160 - protein, 706 aa, Homo sapiens
MNESKPGDSQNLACVFCRKHDDCPNKYGEKKTKEKWNLTVHYYCLLMSSGIWQRGKEEEGVYGFLIEDIRKEVNRASKLKCCVCKKNGASIGCVAPRCKRSYHFPCGLQRECIFQFTGNFASFCWDHRPVQIITSNNYRESLPCTICLEFIEPIPSYNILRSPCCKNAWFHRDCLQVQAINAGVFFFRCTICNNSDIFQKEMLRMGIHIPEKDASWELEENAYQELLQHYERCDVRRCRCKEGRDYNAPDSKWEIKRCQCCGSSGTHLACSSLRSWEQNWECLECRGIIYNSGEFQKAKKHVLPNSNNVGITDCLLEESSPKLPRQSPGSQSKDLLRQGSKFRRNVSTLLIELGFQIKKKTKRLYINKANIWNSALDAFRNRNFNPSYAIEVAYVIENDNFGSEHPGSKQEFLSLLMQHLENSSLFEGSLSKNLSLNSQALKENLYYEAGKMLAISLVHGGPSPGFFSKTLFNCLVYGPENTQPILDDVSDFDVAQIIIRINTATTVADLKSIINECYNYLELIGCLRLITTLSDKYMLVKDILGYHVIQRVHTPFESFKQGLKTLGVLEKIQAYPEAFCSILCHKPESLSAKILSELFTVHTLPDVKALGFWNSYLQAVEDGKSTTTMEDILIFATGCSSIPPAGFKPTPSIECLHVDFPVGNKCNNCLAIPITNTYKEFQENMDFTIRNTLRLEKEESSHYIGH

SEQ ID NO: 1161 - DNA, 2172 bp, Homo sapiens
gggcagtggctcgtgggagccaagatggcggcggcggcggcagcgacagcagcagcagcagccagtattcgggaaaggcagacagtggctttgaagcgtatgttgaatttcaatgtgcctcatattaaaaacagcacaggagaaccagtatggaaggtactcatttatgacagatttggccaagatataatctctcctctgctatctgtgaaggagctaagagacatgggaatcactctgcatctgcttttacactctgatcgagatcctattccagatgttcctgcagtatactttgtaatgccaactgaagaaaatattgacagaatgtgccaggatcttcgaaatcaactatatgaatcatattatttaaattttatttctgctatttcaagaagtaaactggaagatattgcaaatgcagcgttagcagctagtgcagtaacacaagtagccaaggtttttgaccaatatctcaattttattactttggaagatgatatgtttgtattatgtaatcaaaataaggagcttgtttcatatcgtgccattaacaggccagatatcacagacacggaaatggaaactgttatggacactatagttgacagcctcttctgcttttttgttactctgggtgctgttcctataatcagatgttcaagaggaacagcagcagaaatggtagcagtgaaactagacaagaaacttcgagaaaatctaagagatgcaagaaacagtctttttacaggtgatacacttggagctggccaattcagcttccagaggcccttattagtccttgttgacagaaacatagatttggcaactcctttacatcatacttggacatatcaagcattggtgcacgatgtactggatttccatttaaacagggttaatttggaagaatcttcaggagtggaaaactctccagctggtgctagaccaaagagaaaaaacaagaagtcttatgatttaactccggttgataaattttggcaaaaacataaaggaagtccattcccagaagttgcagaatcagttcagcaagaactagaatcttacagagcacaggaagatgaggtcaaacgacttaaaagcattatgggactagaaggggaagatgaaggagccataagtatgctttctgacaataccgctaagctaacatcagctgttagttctttgccagaactccttgagaaaaaaagacttattgatctccatacaaatgttgccactgctgttttagaacatataaaggcaagaaaattggatgtatattttgaatatgaagaaaaaataatgagcaaaactactctggataaatctcttctagatataatatcagaccctgatgcaggaactccagaagataaaatgaggttgtttcttatctattatataagcacacagcaagcaccttctgaggctgatttggagcaatataaaaaagctttaactgatgcaggatgcaaccttaatcctttacaatatatcaaacagtggaaggcttttaccaagatggcctcagctccggccagctatggcagcactaccactaaaccaatgggtcttttatcacgagtcatgaatacaggatcacagtttgtgatggaaggagtgaagaacctggttttgaaacagcaaaatctacctgttactcgtattttggacaatcttatggagatgaagtcaaaccccgaaactgatgactatagatattttgatcccaaaatgctgcggggcaatgacagctcagttcccagaaataaaaatccattccaagaggccattgtttttgtggtgggaggaggcaactacattgaatatcagaatcttgttgactacataaaggggaaacaaggcaaacacattttatatggctgcagtgagctttttaatgctacacagttcataaaacagttgtcacaacttggacaaaagtaacacagaagaaccttactatgataatctacttggaatgtggataaatgtaaaaagaagaaaagttagaagagcaatatgtttccttctctgtaacagtgtcctaacagtgaaaatcagagttatttgttaatttttaaggaaattatatacttaatatgtattgattaaaagaaacatttcagaaataaaatttcaacattgttaaaaaaaaaaaaaaaa

SEQ ID NO: 1162 - protein, 642 aa, Homo sapiens
MAAAAAATAAAAASIRERQTVALKRMLNFNVPHIKNSTGEPVWKVLIYDRFGQDIISPLLSVKELRDMGITLHLLLHSDRDPIPDVPAVYFVMPTEENIDRMCQDLRNQLYESYYLNFISAISRSKLEDIANAALAASAVTQVAKVFDQYLNFITLEDDMFVLCNQNKELVSYRAINRPDITDTEMETVMDTIVDSLFCFFVTLGAVPIIRCSRGTAAEMVAVKLDKKLRENLRDARNSLFTGDTLGAGQFSFQRPLLVLVDRNIDLATPLHHTWTYQALVHDVLDFHLNRVNLEESSGVENSPAGARPKRKNKKSYDLTPVDKFWQKHKGSPFPEVAESVQQELESYRAQEDEVKRLKSIMGLEGEDEGAISMLSDNTAKLTSAVSSLPELLEKKRLIDLHTNVATAVLEHIKARKLDVYFEYEEKIMSKTTLDKSLLDIISDPDAGTPEDKMRLFLIYYISTQQAPSEADLEQYKKALTDAGCNLNPLQYIKQWKAFTKMASAPASYGSTTTKPMGLLSRVMNTGSQFVMEGVKNLVLKQQNLPVTRILDNLMEMKSNPETDDYRYFDPKMLRGNDSSVPRNKNPFQEAIVFVVGGGNYIEYQNLVDYIKGKQGKHILYGCSELFNATQFIKQLSQLGQK

SEQ ID NO: 1163 - DNA, 2101 bp, Homo sapiens
gggcagtggctcgtgggagccaagatggcggcggcggcggcagcgacagcagcagcagcagccagtattcgggaaaggcagacaggtactcatttatgacagatttggccaagatataatctctcctctgctatctgtgaaggagctaagagacatgggaatcactctgcatctgcttttacactctgatcgagatcctattccagatgttcctgcagtatactttgtaatgccaactgaagaaaatattgacagaatgtgccaggatcttcgaaatcaactatatgaatcatattatttaaattttatttctgctatttcaagaagtaaactggaagatattgcaaatgcagcgttagcagctagtgcagtaacacaagtagccaaggtttttgaccaatatctcaattttattactttggaagatgatatgtttgtattatgtaatcaaaataaggagcttgtttcatatcgtgccattaacaggccagatatcacagacacggaaatggaaactgttatggacactatagttgacagcctcttctgcttttttgttactctgggtgctgttcctataatcagatgttcaagaggaacagcagcagaaatggtagcagtgaaactagacaagaaacttcgagaaaatctaagagatgcaagaaacagtctttttacaggtgatacacttggagctggccaattcagcttccagaggcccttattagtccttgttgacagaaacatagatttggcaactcctttacatcatacttggacatatcaagcattggtgcacgatgtactggatttccatttaaacagggttaatttggaagaatcttcaggagtggaaaactctccagctggtgctagaccaaagagaaaaaacaagaagtcttatgatttaactccggttgataaattttggcaaaaacataaaggaagtccattcccagaagttgcagaatcagttcagcaagaactagaatcttacagagcacaggaagatgaggtcaaacgacttaaaagcattatgggactagaaggggaagatgaaggagccataagtatgctttctgacaataccgctaagctaacatcagctgttagttctttgccagaactccttgagaaaaaaagacttattgatctccatacaaatgttgccactgctgttttagaacatataaaggcaagaaaattggatgtatattttgaatatgaagaaaaaataatgagcaaaactactctggataaatctcttctagatataatatcagaccctgatgcaggaactccagaagataaaatgaggttgtttcttatctattatataagcacacagcaagcaccttctgaggctgatttggagcaatataaaaaagctttaactgatgcaggatgcaaccttaatcctttacaatatatcaaacagtggaaggcttttaccaagatggcctcagctccggccagctatggcagcactaccactaaaccaatgggtcttttatcacgagtcatgaatacaggatcacagtttgtgatggaaggagtgaagaacctggttttgaaacagcaaaatctacctgttactcgtattttggacaatcttatggagatgaagtcaaaccccgaaactgatgactatagatattttgatcccaaaatgctgcggggcaatgacagctcagttcccagaaataaaaatccattccaagaggccattgtttttgtggtgggaggaggcaactacattgaatatcagaatcttgttgactacataaaggggaaacaaggcaaacacattttatatggctgcagtgagctttttaatgctacacagttcataaaacagttgtcacaacttggacaaaagtaacacagaagaaccttactatgataatctacttggaatgtggataaatgtaaaaagaagaaaagttagaagagcaatatgtttccttctctgtaacagtgtcctaacagtgaaaatcagagttatttgttaatttttaaggaaattatatacttaatatgtattgattaaaagaaacatttcagaaataaaatttcaacattgttaaaaaaaaaaaaaaaa

SEQ ID NO: 1164 - protein, 575 aa, Homo sapiens
MGITLHLLLHSDRDPIPDVPAVYFVMPTEENIDRMCQDLRNQLYESYYLNFISAISRSKLEDIANAALAASAVTQVAKVFDQYLNFITLEDDMFVLCNQNKELVSYRAINRPDITDTEMETVMDTIVDSLFCFFVTLGAVPIIRCSRGTAAEMVAVKLDKKLRENLRDARNSLFTGDTLGAGQFSFQRPLLVLVDRNIDLATPLHHTWTYQALVHDVLDFHLNRVNLEESSGVENSPAGARPKRKNKKSYDLTPVDKFWQKHKGSPFPEVAESVQQELESYRAQEDEVKRLKSIMGLEGEDEGAISMLSDNTAKLTSAVSSLPELLEKKRLIDLHTNVATAVLEHIKARKLDVYFEYEEKIMSKTTLDKSLLDIISDPDAGTPEDKMRLFLIYYISTQQAPSEADLEQYKKALTDAGCNLNPLQYIKQWKAFTKMASAPASYGSTTTKPMGLLSRVMNTGSQFVMEGVKNLVLKQQNLPVTRILDNLMEMKSNPETDDYRYFDPKMLRGNDSSVPRNKNPFQEAIVFVVGGGNYIEYQNLVDYIKGKQGKHILYGCSELFNATQFIKQLSQLGQK

SEQ ID NO: 1165 - DNA, 363 bp, Homo sapiens
gtggcggcggtggaggctgaggcggcggctgaggcggctacggaggaaacagaagatggcagattttttgaaaggactgcctgtctacaataaaagcaattttagtcgatttcacggggactccgtgtgcaaagcctcgaaccaacggccctcagtctacctgcccacccgagagtacccgtctgaacagatcatcgtgaccgaaaagacaaacatcctcctgcgctacctgcatcagcaatggacaaaaagaacgctgccaagaaggaagaccaggagcaagtggagctggaaggcgagacctcggcgcccctccgcaagttggcgctgacccacagcccagagatacaggaggacacttaa

SEQ ID NO: 1166 - DNA, 784 bp, Homo sapiens
atggcctccatggcagccgccgcggcgggagccacagcagctccagcgcccaggcccaatctcactggacccacggagccaggacagtgggacacgtcgcttcttattacggaggaagattcggcacgacctccgcccccctccccccaacccccccgttttcagccgcctgacagcgcagctgcgcaggcgcgaagacgccccagcctaatgtgcgtgtgtcggctgtgtatacagcatccagattcgcccaatgggaaccaggatcagcctcatccatacctggacttgatttgtttgtctcacccactagagtgtgcttatttgcaaacatccacctgggatgaaaagcgctacaaagcctggtccagtattgcttatcagctgattcccaatgttcagcaactgaagatgaacacaaggaattttgcccgaattcttgaagtcgatgaagttctactgtttgaaagagctacattcttggttatttcccattaccagtgcaaagagcatcacgatggccacagatttgagaagatcagcaacattattaagcagttcagctgagctgcaataaattggtcccttctttccggagtatggaagttatgaattctaacttcacctcattcattgacatcttcacatcaaacatctaggtgacggttgttacgtcagatccgtagatgccttctgtagctactctgatcaacagtcgaaaaaccaggaaacactgaaaatctggagaatggatggccccaagcacagtctctttatgcgttga

SEQ ID NO: 1167 - DNA, 2906 bp, Homo sapiens
aagaagcgacgtgtcccactgtcctggctccgtgggtccagtgagattgggcctgggcgctggagctgctgtggctcccgccgcggcggctgccatggaggccatgccagagcccagaactcacgccgggggaggccgagacagccggcggtactcatagatgaggcagcggcggcggcggcggcggcggcagcccgggctctccatgagcaggcggcggcggcgacgggtgcggcggcaccggcagttttcggtccccagggaggatgaagacactgtttgaagagatcaaagcatcaattaaaaataactataaccaagatcgatcattttgtaggcctgttcttccttgggggggtgtttttactatcaaagctggccgcaaagcagtatcctgtacaccactctatgttgaaataagactgaaaaatacctgcaccatagatggattcttgatgttattatatgtcattcttaatgaaaatgaaaacttccctagggaactctctcttcattttggtagagagtttgtagactgttttctttacttaatggacacctacagttttacaactgtgaagctactttggatttgggacaagatggaaaaacagcaatacaaatctgaagtccataaagcttcattaataattgatttgtttgggaatgagcatgataattttacaaaaaatcttgaaaatctcatgtctaccattcaagagagttactgttccaactggcgatgcccaactcgagtgcaggaggatcagcagcgcacaattaatataaatcctccccaagaaattccacatggaaacttgataagactggctgtgaatgagttattctgttccaagattgaactgtgtgaagagcatgggtgtggtggcttaagagaattttcccaacgaattttctgccatggggcacccccttttgttgtcttaaatatgcaacattggaaatctgaagatctggcgtatgtaccctattacttggatttgtctgatcacaagtatttgttggaaggtgccacattatttaacaaagaggaacatcattattctgcagctttccagattggtggacattggatgcactatgatgggctcagaaatgtgaatttaattttgttaaataaacccccagagtttctcctcttgtcatcattggtttatattcgagcaacagagaaataaatatagattgatgctaaaagttgttttccctcctgcccatgctctcccagatgaagggcttttattttgtgtatacttggtatccaagaaaatagttcaactatactagtttcagaagtgtattttcagtgtttaaccccaggtaaatgttttatatagaggatctgtgcaaaaatgtttgtaatttttttatatttcctgagttatttttatatgagcatattttatgttggaataaaatatatcttgtggcctttgtattttttatttatatgtacctcaaagatttttacaattctgtctttgaattcaagaaatactttgtcatctgaattctaaatttttctttttggatattcgagtaaaacctaggtaaaagtattttaagtttatataatttaacagttcaaaatatatctgactgtatttctttgccctacctcactataatccaaagtgcactatttgatctagtatggatttgaatgtacaatttatcgatggcttagtttattagttcgatttgcctagtatccctgcagcaattttttaaaatgtctgagaaatttttcagagcttaaactatttctttataatggcaaattacttttaactacttcctaaagtattataaacctgccagtggattttaagtgatagctaagcttccaagcttaattcacgttattacaaataaattatataactatcttaaatgtttatcttataattaaatgtaatttgaaatgctctaatgtattttgcagataaaacaactataaacaatattaggcaactggatgtttactagtgtcggactagcaatagaaatgcactttaaatatatatttaaggggaaatgcgtgcctggaaatacttcttttcctagtgaagttttatattgacacagagaaaagaatacttaaaattttgagtgatgtctactggcttccttgtaagtagtgattgatagcatgcggctttgacttgcaatacaaatcattacgattttatagttatcagaacattacgtttctttataaagaccctaaggtcactcttctttttgcaacttaagggaaaaaatattctcaagggaaaatactttttgaaatttatcaccattttagtgtttacatttcaataaatagttcacttcaggtttgggattgagattagttgcaatatatttagaagctcctacatgacagcacagatcactgccatctgctgaactgctaaagtgcttggtgccatgttgagaaaacttacccaagaatggataaatatgggtgaaacattactgagaatgcctcacgttagcaaatactatgaaaattcttgtttatatatcaaactgatttattttacaaaaaaaaaaaattcaccccaagatttatttagtttcccaagtgtatctgattaggatttaatttagagtaaacttttctggggacacctgattgcatgaactgaagtatacaataacacaaatattacagtaaacataaatggtgtcattaacaaaattattcctaatgcagatttattctttcaggaaatgcactttatttggaatactagtttatcatgaaacaatgacttacctacctcacagggttgttgtgaggattaagatgtttgttaaaatcttgactaccttgaacatgctaataaaaaaacatttttctacctcttttatttgca

SEQ ID NO: 1168 - protein, 310 aa, Homo sapiens
MKTLFEEIKASIKNNYNQDRSFCRPVLPWGGVFTIKAGRKAVSCTPLYVEIRLKNTCTIDGFLMLLYVILNENENFPRELSLHFGREFVDCFLYLMDTYSFTTVKLLWIWDKMEKQQYKSEVHKASLIIDLFGNEHDNFTKNLENLMSTIQESYCSNWRCPTRVQEDQQRTININPPQEIPHGNLIRLAVNELFCSKIELCEEHGCGGLREFSQRIFCHGAPPFVVLNMQHWKSEDLAYVPYYLDLSDHKYLLEGATLFNKEEHHYSAAFQIGGHWMHYDGLRNVNLILLNKPPEFLLLSSLVYIRATEK

SEQ ID NO: 1169 - DNA, 450 bp, Homo sapiens
atgaatttggtgatttgttccaaaccacgcgctaccgctcccagcagcgcgggacttcgggacagggacaaggcggacgctaggcgtgcgcccccggggagcccccacgttccggccacgcccaccctggccctgggcagccgcgcccgggaggcctggcaccgaggcgggcgggtccccgagttaggggcccgcgagtcggctgggcgcccccgcctctgcccgggcagtgccccgccgagtgctcagaactgcggacaaataggctggagggccgggccgcggaaggcgttcccacaccggccagtctccgtccaccaggaagcaaactcctcgtacctccctggggaccgaaaactgccggtgccgccgcacccgtcgccgccgccgcctgctcatggagagcccgggctgccgccgccgccgccgccgccgctgcctcatctatga

SEQ ID NO: 1170 - protein, 149 aa, Homo sapiens [sequence omitted]

SEQ ID NO: 1171 - DNA, 6568 bp, Homo sapiens
gctctgggcggaagttgcccgccccacccgtaagagttagggtttgaccggagctagtgaggatccagcccaggctccagttgtccgcggttcctcctcctgtcgctgcccgtgtgattactgagactcagatggaccacacatccccgacctacatgcttgctaacttaacccacttgcattctgaacaacttctgcagggcttgaatcttcttcgccaacatcacgaactctgtgacatcattcttcgagtaggtgatgttaaaattcatgctcacaaagtggtacttgccagcgtcagcccgtatttcaaagctatgttcactggaaacctttctgaaaaagagaacagtgaggttgagtttcaatgcattgatgaaactgctctccaggccattgtggagtatgcctatacagggactgtttttatttctcaggacacagttgaatctctcctgccagcagcaaacctactccagataaaacttgtcctgaaagaatgttgtgcatttcttgaaagccaacttgatcctggtaattgtattggaatttctcgttttgcagaaacatatggttgccgtgacctttatttggcagccactaaatacatatgccagaattttgaagctgtttgccagactgaagagttttttgagcttacacatgctgacttggatgaaattgtttccaatgactgtttgaatgtagctaccgaagagactgttttttatgcattagagtcttggatcaagtatgatgtacaagaacgccagaaatacttagcacagttactaaacagtgtacgattaccattgttgagtgttaagtttctcactagactatatgaagcaaatcatcttattcgtgatgatcgcacttgtaaacatcttttgaatgaagccctaaagtaccactttatgcctgaacatagactctctcatcagacagtcttgatgacacgacctcgctgtgctcccaaagtactttgtgcagtaggagggaaatctggactctttgcctgtttggatagtgtggagatgtactttcctcagaatgactcttggattggtttggcacccctaaacattcctcgctatgaatttggaatatgcgttttagaccaaaaagtatatgttataggtggtattgcaactaatgtgcgtcctggcgtcactatcagaaaacatgaaaattcagtggaatgctggaatcctgatacaaatacttggacttctctagagagaatgaatgaaagccgaagtactcttggagtagtagtacttgcaggagaactttatgccttaggtggttatgatggacaatcttatttacaatctgtagagaagtacattcccaaaataagaaaatggcaacctgtggcaccaatgacgacaacaagaagttgttttgctgcagcggtattggatggaatgatatatgccattggtgggtatggtcctgcccacatgaacagtgtggagcgttatgatccaagtaaggactcctgggagatggttgcatccatggcagataaaaggattcactttggcgtgggtgtcatgctaggctttatttttgtggtgggtggacataatggagtctcacatttgtccagcattgaaagatacgatcctcatcaaaatcagtggactgtgtgtagaccaatgaaagaacctagaacaggagttggtgctgctgtaatcgataactacctttatgtcgtcggtggtcactcagggtcttcctatctgaatacagtgcagaaatatgatcctatctcagatacgtggctggattcagctggcatgatatactgtcgctgcaactttgggttaactgcactttgacaaatgtgaactctcggaaatagtatggtggtgaaacttgtactgcatgaacatccggatggcccagttttctgaaacccacaagctgcattgctttctttttaacttgaagtagcatgaaggctcaaaagttttgttgggtacttttaattgagaagtagttttggttgctcttgattacacagtaaatcaataatcaaaaagaaaaaagagaaaaaaaaaaagtaaagactttgccaattgaattctgcactttttcccccaagactgagatgtactagttttatgttcataagtgtacatgtagacaaaacgtggctgctttttttttttttttttttttattttagctctccttccctgataaccatgattttctaggatgagcgatgctttaggtgctggagtgtattgaatgaatggacagagtgctgatactgcttcttggatgtaaatgcttcacatttttcatttgttttaaaacaaacaaagggctgctttttattttggtacttttaaaggttgtaaataacatgccaataggtagtcatctgaatactttcctgctaaatggttttagggctacggatgtaataaatttttaagacaattgcttttattatcatgatatttggggccctattttaggaaatcagatatttactgtttatgccttttgtatatgggcaggttaacgttggatgaatttaattacctatctatgctatggttagcatggataggagtttaagcatatcaggtgtttcagtttttcttcagtagtacagcaggcctcccagtgctgatgtaaatatttgagcagtgtttagtaccattcttagtgcatattaatttttttatatatccttataattttagttttttaagatctttgctttttcaaagtgttcagatataaaatggtgctaactgtaggatttataacaaggctataactgatgtccttttggatgttcagtatgagatatgcatgacatgttttgatagtcttttgcatttttaatggcttgattcatttgtgcttattaaaaatgttagtgattacgccaatgttaacatccaaaaatcatcagaatggcctgtgttatgcttttcatggttcctgaatagtgatttaaagaaagttacacttttgatcttctttcttcttgtgctagatattacatgtctttcttaaaaacagaaatatatgcattaaatataaagcactaggcagttatgcattactttgtacatttcttaggtaactgaatattttaaggttattgaggaaaactggaactcgatgtttacttgagtaatagttctaagttgagttctactttgattaaagaaatgatcttttaaagcaaaattgtttgctgtagccagtgacagcttatttaaagaaagtgtttaacttatttgattttagcatgttttagtaaatgtctgttagtcttaaacacattcacttgcattttattattatgtcggtacttgtattttggaactgtagtcatttgattttcttttccttgattttttttaaacctgtttgcgatctccttataaagtctctgcaagataatttttcttaagaaaaaaattcatattatattcttaagtgccataatgttctagactattgttaagaagccatttgtaattataaaacataggttcatttgttagtatatatgtttatttcttgaatactatagccgggcaatttacagttctttgttcttccataaactgccagttgtagatttgaatatatactacaaaactatgtaaaatcatttttaatcataaatgtagtatcatgctttatgaatatttgcacagattataaaaccttgcaagtgatttttagtctcttctaatttagaactcaacaggagcaactaataacaattgatagtctgagtattttctatgttgcttgtctgaataacataataatatatagcaataactttttcattgatttgaataaatctattgcatagaaataggtgcactattgtagttggcccagactttatttaaagaaaagcagtttaaaatagattcatcacatatttagttttaaatccccaattcagttttctttgtttatagcaatcaaattattaaatatatcctattatactatttttaatcccctattcccaaaagataagggaatttgaaagactgtggaaaatgattttaggacgggcgcagtggctcacgcctgtaatcccagcacttggagaggccaaggcgggtatatcacctgaggtcaggagttcgagaccagcctggccaacatggtgaaaccccgtctctactaaaaatacaaaaaattagctgggcattgtggcaggtacctgtaatcccagctacttgggaggctgaggcaggagaatcacttgaacccaggaggcagaggttgcagtgagccgagcttgcaccattgcactccagcctgggcaacaagagtgaaactccacctcaaaaaaaaaaaaagattttaattataaacacatctattctatacattgtattttaacaatattttactcatgtatcatctccactatcaaattagtgtataatcatttggtaaattagatcaaaaacatatactggtcattgtttttgaaaaatctaaatttcatcttgatgaagactaaatgtgaaatatcttgggcagtagtagtaggagccatacaccagtgaacaaattatgaaaatctgtgaaaggaagaggaaaaatgttcaaaatttagaagtatatttattttaggattgcttaacctactgtattattcgtaacaaccagagctactaatctgacctgacaactaatatgtttacattagcgccttcttttacaaatttgtgagaagtttcattatgaacactctgctgacaaattgtgaatttaaagccacatgtttctatgttaaaaaggatcaaaatgtttggttataaatcctcaggattaaaagtattagaaataattttacatattcaggcaagaagagaaaagctatttaagatttcccagaaatattttggaaaagagcagcactgggaaatagaaattaatgtaatcagttgcaagatacttgccttctataattataacaacttaatctgttaggcacctttggctattcaataatcattggatgttgtaatagaatgtaagtggcttttaatgtagctccaaggatatttataaattgtgttattgctgttattgttttaaatgtgagtgaatattaaattataggaagtggtatcaagtgataggaaaatggcattaggttttgaaattttattttgataatttaacacatatggagggtttgctatatgtatgagatattctgttagatgctgtgggagctagagagatatactctttttcactcaaagagagtaaaatatagtgggagagaccctaataactattttggtgaaggatgaatctaattccttatctctgacatcgtaagaagtgattagagacctagtttatgcataagcaattccttagtgtccaattaggttttattggcatgaaaaagaaatattaaaaaacctaatatttatagaactccaaatctcctagaattggataatgtattttctagtaagaaaactatagaaattttaaatatatatatttcctgtagtatcaagactctggctgacattgagagaaatatatgtacatgttgtgtttattttcagttttggtgttggattcctggtattgtcacctaagtgctcattttcaggaaaatcagattctacaataaacacttactgcttaaagttcagtaaacttgtgataacctcataacctctgtagtctaaaagttaaggaattataagatgtcacatgtcaagttaacatccagttctacttcttaaccttttttccctttgtaaacagcactttaattagacatgatttaattagataacaattattccatggctggatatgtactggattttcacttacagtacattgatttggtgttgatacacatttgaaaagagtgaggaatacaatacatttttaatacaataggtttacaaattttcctactggtgtgaatatggagtcaaataaaaatccagtttacatctctgcagagagaaaaattgttatccatatgtcttttatattatacatctttactagagataacttattgttaattttgtcaagttatgtgtaagtcccatttatttttaaatactaagcaaaaagttccaagtttgccttaaaatacaagtgaagttaaagaactggatgataatgcctatatttttgccttatgaattgtgctgtgtattataaaccagcaacggttttgattttaacaggattctgaaattttgtagctgtagagtactaatatttgtactctcttgcaaagaatgtgatctagttgtggattatgttagtttaaatgtttttgtatatgtattttacctctgaacatgtacctttttagcatcagggttttattttatttatgtttacacactaaagtgtcatttaactagttaagaattgtattcttttttattttaaaggttatttgtgtgtatcattgtggtaatgttctgtaattattatggttaaatttcatttaatgtaaaatgtttaaaataaaaatgaaaaatctaaaaaaaaaaaaaaaaaa

SEQ ID NO: 1172 - protein, 571 aa, Homo sapiens
MDHTSPTYMLANLTHLHSEQLLQGLNLLRQHHELCDIILRVGDVKIHAHKVVLASVSPYFKAMFTGNLSEKENSEVEFQCIDETALQAIVEYAYTGTVFISQDTVESLLPAANLLQIKLVLKECCAFLESQLDPGNCIGISRFAETYGCRDLYLAATKYICQNFEAVCQTEEFFELTHADLDEIVSNDCLNVATEETVFYALESWIKYDVQERQKYLAQLLNSVRLPLLSVKFLTRLYEANHLIRDDRTCKHLLNEALKYHFMPEHRLSHQTVLMTRPRCAPKVLCAVGGKSGLFACLDSVEMYFPQNDSWIGLAPLNIPRYEFGICVLDQKVYVIGGIATNVRPGVTIRKHENSVECWNPDTNTWTSLERMNESRSTLGVVVLAGELYALGGYDGQSYLQSVEKYIPKIRKWQPVAPMTTTRSCFAAAVLDGMIYAIGGYGPAHMNSVERYDPSKDSWEMVASMADKRIHFGVGVMLGFIFVVGGHNGVSHLSSIERYDPHQNQWTVCRPMKEPRTGVGAAVIDNYLYVVGGHSGSSYLNTVQKYDPISDTWLDSAGMIYCRCNFGLTAL

SEQ ID NO: 1173 - DNA, 6257 bp, Homo sapiens
ggtggcagctgtggggtctagggctcagacgggggccattttgccagaggctgcctcccggagttgggggcggcctggcggcaggctgaagctgttcttttgcctcttctgcagcttggggcttggagaggatctggaagtctgggctccatcgagccctttggagacggcaatggtttcttccaaccaccaccacctgacaaccctgcatggcggctgccccctccgcgctgcttctgctgccgccctttccagtcctctctacctatcggctccagagccgcagtcgtccttccgccccagagaccgatgatagtcgagttgggggcattatgagaggagagaaaaactactacttccgtggagctgcgggggaccacggttcctgccccactacaacttcgcctctggcctcggccctcttgatgccctcggaggcagtctcaagcagctggtctgagtctggaggcggtttgtcagggggagatgaagaggacactcggctccttcaactcctccgcactgcccgggatccttctgaggccttccaggctttgcaagctgctttgccgcggcggggcggtcgacttggcttcccccgacgcaaggaagctttgtatcgggcactgggccgagtgcttgtggaaggaggtagtgatgagaagcggctctgcttgcaacttctctcggacgttctccggggtcagggggaggcaggccagcttgaagaggcctttagcttagcacttttgcctcaactagttgtctcgttacgggaagagaatccagccctgcggaaagatgcgctgcagatccttcatatatgtctgaaacgtagtcctggagaggtgctgagaacgcttatacaacaaggactggaaagtaccgatgcccgacttagagcttccacagcactactgcttcccatcttgcttactactgaggacttgttgcttggtctggatctcaccgaggtgataatatccctagcccgaaagcttggtgatcaggagacagaagaagaatctgagacagctttctccgcacttcaacaaattggggagcgacttggccaagacaggtttcaatcttacatttctcgtctgccctctgccctgaggagacactacaatcgccgcctggagtcccagtttggaagtcaggttccttattatttggaacttgaagcctctggatttcctgaagatccccttccctgtgcagtgactctttccaacagcaatcttaaatttgggattattcctcaggagctgcattcacgattattggatcaggaagactataagaaccggacccaggccgtcgaagaactaaagcaggtgctgggaaaatttaaccctagttctactcctcattctagtcttgttggcttcattagtttgctatataatttgttagacgattctaacttcaaagtggtgcatggcacacttgaagtcctgcatttactggttattcgccttggagagcaggtacagcagttcttgggaccagttatagcagcttctgtcaaagtgctggcggacaacaagttggtgatcaaacaagaatacatgaaaatcttcctcaagctaatgaaggaagtaggacctcagcaggtgctttgtttactcctggaacatctcaaacataagcattccagagtgagagaggaggtggtgaacatttgcatctgctccctgctgacctatcctagtgaggattttgacttgcccaaactgtcctttgatcttgccccagctcttgtagatagcaaacgcagggtacgccaagcagctttagaagcttttgccgtattggcatcatcaatgggctcaggtaaaaccagcatcctttttaaagctgtggatacagttgaactgcaagataatggagatggagtgatgaatgctgtgcaggccagattggctaggaaaaccttaccaaggctcacagagcagggatttgtggaatatgcagtactgatgccatcttctgccgggggtaggtcaaaccatttggcacatggagcagatacggactggcttttggctggtaacagaactcagagtgcacactgtcactgtggtgaccacgtgagggatagcatgcacatttatggatcttacagcccaactatctgtacccgaagggtattaagtgcaggaaaaggaaaaaataaattaccatgggaaaatgagcaacctggaatcatgggagaaaaccagacctccacttccaaggatatagagcagttttcaacatatgatttcatcccatctgcaaaattaaagctttctcaaggaatgccagtcaatgatgatttatgttttagcagaaaaagagtatcaagaaacttatttcagaatagtcgggattttaacccagattgtcttcctttatgtgctgctggtactactgggactcatcaaacaaatctttctgggaaatgtgcacaacttggattttcacaaatatgtggtaaaactggcagtgtgggttctgacttacaattcctagggacaactagcagtcatcaagaaaaagtgtatgctagcctcaattttggcagtaagacacagcaaacatttggtagtcaaacagagtgtacttcctcaaatggtcaaaatccaagtccaggagcttacatccttccatcctatcctgtctcatcacctcgaactagtccaaagcatacatctcctcttattatatctccaaagaagtctcaagataattctgttaatttctcaaattcctggcctcttaaaagcttcgaaggactatcaaagccaagtccacagaagaagcttgtcagccaaaaatcgtctgatcctacgggtagaaatcatggagaaaattctcaagaaaaacctccagttcagcttacacctgccttggtgagatcgccatcttcccgacgaggtctaaatgggacaaagcctgttcctcccataccaaggggaataagccttttgcctgataaagctgatttaagcacagtgggacacaaaaagaaagagcctgatgatatttggaagtgtgaaaaagatagtcttccaattgatctttcagaattaaatttcaaggataaagatttggatcaagaagagatgcatagctctcttaggtcccttcgtaatagtgcagctaagaaaagagcaaaactgagtggcagtacttcagatcttgaaagccctgattctgcaatgaagctcgacttgacgatggactccccgtctctgtcttcctcaccaaacatcaattcttacagtgaaagtggagtttacagccaagaatcattgacttcttctctgtctacaactccccaggggaagagaataatgtcagacatatttccaacatttgggtcaaaaccttgtccaacaagactttcttctgcaaagaaaaaaatttctcatattgctgaacaaagccccagtgcagggtcatcatcaaatccacagcaaatttccagttttgacttcacaaccacaaaggctttatcagaagactcagtagtagttgttggaaaaggcgtatttggaagtttaagttcagcaccagcaacctgcagccaatcagtgatatcttctgtggaaaatggggatacattttcaattaaacaaagtattgaaccaccatcagggatttatggaagatcagtccagcaaaatatttcatcatatcttgatgttgagaatgaaaaagatgctaaagtttctatttctaaatctacttataacaagatgagacaaaagagaaaagaagagaaagaactgtttcacaataaagattgtgaaaagaaggaaaaaaattcctgggaacgaatgagacatacaggaactgagaaaatggcatctgaaagtgaaacacctactggagctatttcacagtataaagaaaggatgccttctgtcactcatagtccagaaataatggatctgtcagaactacgaccattctctaaaccagaaatagcactgacagaagccctgaggcttttggctgatgaggattgggagaagaaaattgagggactgaattttattagatgcttagctgcttttcattctgagatactgaacacaaagttgcatgaaacaaattttgcagttgttcaagaggtgaaaaatttacgttctggagtttctcgtgctgctgtggtctgtttaagtgatcttttcacttatttgaaaaagagcatggatcaagagctagataccacagtaaaagttttgttgcacaaggctggtgaatcaaatacatttataagagaagatgttgacaaagcattgagagctatggttaataatgtaactcctgcacgtgcagttgtttctcttatcaatggtggacaaaggtattatggtcgaaagatgctgttcttcatgatgtgtcatcctaactttgaaaaaatgcttgaaaagtatgtcccatctaaagatttgccatatattaaggactctgttagaaacttacagcaaaagggtttgggggagataccattagatactccttcagcaaaaggaagacgatctcatactggcagtgttggaaatacaagatcatcatctgtttctagagatgctttcaattcagctgaaagagctgtaactgaagttcgtgaagtcaccagaaaatcagtccctcgtaattccttagaaagtgctgagtaccttaaactcataactggcttattaaatgcaaaagactttcgtgatcgtattaatgggattaagcagcttttatcagatacagaaaataatcaagaccttgttgttggaaacattgtgaagatttttgatgcttttaaatctcgacttcatgattctaatagtaaagtaaatctggtggctctggaaacaatgcacaaaatgattcctctacttagagaccacttatctcctataatcaacatgctaattccagcaatagtggataacaatctgaattccaagaatccaggcatctatgcggctgctacaaatgttgttcaggcactgagtcagcatgtagacaattacttacttctacagccattttgcacaaaagctcagtttttaaatggaaaagcaaaacaggacatgacggaaaagcttgctgatattgttacggaactttatcaaaggaagccgcatgccacagagcagaaagtgttggttgttttatggcatctcttaggaaatatgacaaatagtggctctctgcctggagctggaggaaatatacgaacagccacagctaaattatcaaaagcactctttgcacagatgggtcagaatctgttaaatcaggctgcatctcaaccaccacatatcaaaaagagtttggaggaattactcgatatgacaattttaaatgaattatgaatcttcgataaaatactgtatgatgaacaaaagtgtttacatgatgacaaatggaactttctaaaagttatgttatcagtgcctgcacttcacatccagcaaattaagtcaatggctatttttatttgcagcctatgagtacacatctgtcctatatcaaccttaccacttatattcatcacataaaaacctaaaatattcatgaataattcatgaaatctgagtcacatgggatgaattcaattttaatatttttgagaaaagtcctgctcatttgcactattctatagaaactacaatttgttgccctatatgtaaaattagaattgtaattaaaaatacacattttattatgtaatcatgttctggtatgtctcatttctcagccttattttataacgtggaagtcattgaactatgttatcagaaactaagtttgtatattatttgtgaaaaacatgtatttctgaatcagtccgctaatatgattgtgcagtattagcttgcttttgctgctgtgttaatgtcatatatttgcttaccttttgggttcaattatctacataattgtgaaatttaacaagttataataaagcatgacaaccaaagttttagaaaacattaaacattttaaatgcacgtttaaaaaacgtgttgaatgtaacccccctatttttgtgtgcaaacactaaattttattgctttatgttttgacctttataaaggtgttattctgctgcccagttttgtaattctcaaaaatagtgccaggtcttctatagcttttttcagaattcatgggcttacaagtactgtatgcatctttaaaaagaaaaggaatgttataaaataaaaggatttatttctttaaaaaaaaaaaaaaaa

SEQ ID NO: 1174 - protein, 1720 aa, Homo sapiens
MAAAPSALLLLPPFPVLSTYRLQSRSRPSAPETDDSRVGGIMRGEKNYYFRGAAGDHGSCPTTTSPLASALLMPSEAVSSSWSESGGGLSGGDEEDTRLLQLLRTARDPSEAFQALQAALPRRGGRLGFPRRKEALYRALGRVLVEGGSDEKRLCLQLLSDVLRGQGEAGQLEEAFSLALLPQLVVSLREENPALRKDALQILHICLKRSPGEVLRTLIQQGLESTDARLRASTALLLPILLTTEDLLLGLDLTEVIISLARKLGDQETEEESETAFSALQQIGERLGQDRFQSYISRLPSALRRHYNRRLESQFGSQVPYYLELEASGFPEDPLPCAVTLSNSNLKFGIIPQELHSRLLDQEDYKNRTQAVEELKQVLGKFNPSSTPHSSLVGFISLLYNLLDDSNFKVVHGTLEVLHLLVIRLGEQVQQFLGPVIAASVKVLADNKLVIKQEYMKIFLKLMKEVGPQQVLCLLLEHLKHKHSRVREEVVNICICSLLTYPSEDFDLPKLSFDLAPALVDSKRRVRQAALEAFAVLASSMGSGKTSILFKAVDTVELQDNGDGVMNAVQARLARKTLPRLTEQGFVEYAVLMPSSAGGRSNHLAHGADTDWLLAGNRTQSAHCHCGDHVRDSMHIYGSYSPTICTRRVLSAGKGKNKLPWENEQPGIMGENQTSTSKDIEQFSTYDFIPSAKLKLSQGMPVNDDLCFSRKRVSRNLFQNSRDFNPDCLPLCAAGTTGTHQTNLSGKCAQLGFSQICGKTGSVGSDLQFLGTTSSHQEKVYASLNFGSKTQQTFGSQTECTSSNGQNPSPGAYILPSYPVSSPRTSPKHTSPLIISPKKSQDNSVNFSNSWPLKSFEGLSKPSPQKKLVSQKSSDPTGRNHGENSQEKPPVQLTPALVRSPSSRRGLNGTKPVPPIPRGISLLPDKADLSTVGHKKKEPDDIWKCEKDSLPIDLSELNFKDKDLDQEEMHSSLRSLRNSAAKKRAKLSGSTSDLESPDSAMKLDLTMDSPSLSSSPNINSYSESGVYSQESLTSSLSTTPQGKRIMSDIFPTFGSKPCPTRLSSAKKKISHIAEQSPSAGSSSNPQQISSFDFTTTKALSEDSVVVVGKGVFGSLSSAPATCSQSVISSVENGDTFSIKQSIEPPSGIYGRSVQQNISSYLDVENEKDAKVSISKSTYNKMRQKRKEEKELFHNKDCEKKEKNSWERMRHTGTEKMASESETPTGAISQYKERMPSVTHSPEIMDLSELRPFSKPEIALTEALRLLADEDWEKKIEGLNFIRCLAAFHSEILNTKLHETNFAVVQEVKNLRSGVSRAAVVCLSDLFTYLKKSMDQELDTTVKVLLHKAGESNTFIREDVDKALRAMVNNVTPARAVVSLINGGQRYYGRKMLFFMMCHPNFEKMLEKYVPSKDLPYIKDSVRNLQQKGLGEIPLDTPSAKGRRSHTGSVGNTRSSSVSRDAFNSAERAVTEVREVTRKSVPRNSLESAEYLKLITGLLNAKDFRDRINGIKQLLSDTENNQDLVVGNIVKIFDAFKSRLHDSNSKVNLVALETMHKMIPLLRDHLSPIINMLIPAIVDNNLNSKNPGIYAAATNVVQALSQHVDNYLLLQPFCTKAQFLNGKAKQDMTEKLADIVTELYQRKPHATEQKVLVVLWHLLGNMTNSGSLPGAGGNIRTATAKLSKALFAQMGQNLLNQAASQPPHIKKSLEELLDMTILNEL

SEQ ID NO: 1175 - DNA, 2894 bp, Homo sapiens
actgacgcatgcgcatcgtgccctggaccaggcggccgtggcgcgggtggcggctgctgtgctggctgtggggacggaggcggtgaagtgccatcttcggctaggtcgtcacaggctccggctcatggcatcaagtggcatccatcataagatcgttaactgaagacaatatgcaaaattctcacatggatgaatacagaaattctagtaatggcagcacaggcaacagttcagaggtagtggtagaacatcctactgatttcagtactgagattatgaacgttacagaaatggaacagtcacctgatgactctcccaatgtgaatgcatctacagaagaaactgaaatggcaagtgctgtggaccttccagtgacgctgacagaaacagaagcaaatttccctccagaatatgaaaaattttggaaaactgtagaaaataatcctcaggattttacaggctgggtatatttgcttcaatatgtagaacaggagaatcacttgatggctgccaggaaggcatttgacagatttttcatacactatccgtattgctatggttactggaaaaagtatgcagaccttgaaaagcggcacgacaacattaaaccatcagatgaggtttatcggcgggggcttcaggcaatacctcttagtgttgacctttggatacattatataaacttcttaaaagaaacattggaccctggtgatcctgagacaaacaatacaataagaggaacttttgagcatgctgttctagctgcaggaacagatttccgttctgacagactgtgggaaatgtatataaactgggaaaatgagcagggaaacctgagagaagttacagctatatatgatcgtattcttggtattccaacacagctgtatagtcatcattttcagagatttaaagaacatgtacagaataatttgcctagagatcttttaactggtgaacagtttattcagttgcgaagggaattagcttctgtaaatggtcatagtggtgatgatggtcctcctggtgatgatctaccatcgggaattgaagacataaccgatcctgcaaagctaattacagaaatagaaaacatgagacatagaatcattgagattcatcaagaaatgtttaattataatgagcatgaagttagtaaaaggtggacatttgaagaaggtattaaaagaccttactttcatgtgaaacctttggaaaaggcacaactaaaaaactggaaagaatacttagaatttgaaattgaaaatgggactcatgaacgagttgtggttctctttgaaagatgtgtcatatcatgtgccctctatgaggagttttggattaagtatgccaagtacatggaaaaccatagcattgaaggagtgaggcatgtcttcagcagagcttgtactatacatctcccaaagaaacccatggtgcatatgctttgggcagcttttgaggaacagcagggtaatattaatgaagccaggaatatcttgaaaacatttgaagaatgtgttctaggattggcaatggttcgtttacgaagagtaagtttagaacgacggcatggaaatctggaagaagctgaacatttgcttcaggatgccattaagaatgccaaatcaaataatgaatcttcattttatgctgtcaaactagcccggcatcttttcaaaatacagaaaaaccttccaaaatcaagaaaggtgcttttggaagcaatcgaaagagacaaagagaacacaaagttatacctcaatttacttgaaatggaatatagtggtgacctcaaacaaaatgaagaaaatatcctaaattgttttgacaaagctgtacatggttcattacctattaaaatgagaattacattttctcagagaaaagtggaatttcttgaagattttggttccgatgttaataagcttctgaatgcttatgatgaacatcaaacactcctgaaagaacaggattctttaaaaaggaaagcagaaaatggatcagaagaaccagaggaaaagaaagcacatacagaagatacaacttcatcatctacacagatgattgatggtgatttacaggcaaaccaagctgtatataattatagtgcgtggtatcaatacaattatcagaatccttggaattatggacaatattatcctccccctccaacctgatgggaaaaatgtaaatttcaaatgcagtgtgtgaaaagtatgaaattattattttttttaatgagggatgtaaacagtataagcttgttgtatttgataacctgtcttccttgtttctgtgtaacatgatttgtttagtaatagggggaaaatgtcaattagtagcttaccacagatactgtttcctaccatttataaaatttactttttattgaaaaactattttttgatttttgcattaagtggtctagaattcttttgcaatgcatttgcaacagaattttgtagccttaaggggtaggaagaaaaacctgactgcaaatcatgtcagtgtagtacaaaattctgaaaacacataagggctggttatttacctccttttttttttttttttttaaagaaaaaaggacttttaacctttgctgacaaggttttgtctgtttcagttatacttgtgaattgtgatctaactgcagaaaggatacattattaaaatactttgccttggaatagattataaatgagaaaatggaatgtttgcatccctttaaaaatgaaaatcatatcaaaagtatgttgtttcaggagactttgtatttagaatattcatgtaaaacttgtgaacaagctttcattttgatcaaactgatcttcatttttgtaataaaacggaagactcatccagtaaaaaaaaaaaaaaaaaaaaaaaaaaaa

SEQ ID NO: 1176 - protein, 669 aa, Homo sapiens
MQNSHMDEYRNSSNGSTGNSSEVVVEHPTDFSTEIMNVTEMEQSPDDSPNVNASTEETEMASAVDLPVTLTETEANFPPEYEKFWKTVENNPQDFTGWVYLLQYVEQENHLMAARKAFDRFFIHYPYCYGYWKKYADLEKRHDNIKPSDEVYRRGLQAIPLSVDLWIHYINFLKETLDPGDPETNNTIRGTFEHAVLAAGTDFRSDRLWEMYINWENEQGNLREVTAIYDRILGIPTQLYSHHFQRFKEHVQNNLPRDLLTGEQFIQLRRELASVNGHSGDDGPPGDDLPSGIEDITDPAKLITEIENMRHRIIEIHQEMFNYNEHEVSKRWTFEEGIKRPYFHVKPLEKAQLKNWKEYLEFEIENGTHERVVVLFERCVISCALYEEFWIKYAKYMENHSIEGVRHVFSRACTIHLPKKPMVHMLWAAFEEQQGNINEARNILKTFEECVLGLAMVRLRRVSLERRHGNLEEAEHLLQDAIKNAKSNNESSFYAVKLARHLFKIQKNLPKSRKVLLEAIERDKENTKLYLNLLEMEYSGDLKQNEENILNCFDKAVHGSLPIKMRITFSQRKVEFLEDFGSDVNKLLNAYDEHQTLLKEQDSLKRKAENGSEEPEEKKAHTEDTTSSSTQMIDGDLQANQAVYNYSAWYQYNYQNPWNYGQYYPPPPT

SEQ ID NO: 1177 - DNA, 1420 bp, Homo sapiens
gtcagcctacatttttttaagtaaggagtcctgatgttcaactattaaatctttattataggttatagactggactttaaaggcatagctgccttaaatgtgggtaatggttgataaatgtcgctaccatcagaggtcgcttcacaaggtgtctaattcagaatcgaagatctctagcggtcttctactcagtcgactgcagagacgaccgcggtaggtttttcaacccggactcaacaaagaagccctcatagcacagccttgacgtcactcaaagacaggccccaatcccgactgctagagcagaggcccgcccctcgacctccgtgagtggccccgccccgccctagggggcggggcgatgccgaactgcggcgggctggctcagtaaagcggaggcagcgggggaagatggcggcggccgttccacagcgggcgtggaccgtggagcagctgcgcagtgagcagctgcccaagaaggacattatcaagtttctgcaggaacacggttcagattcgtttcttgcagaacataaattattaggaaacattaaaaatgtggccaagacagctaacaaggaccacttggttacagcctataaccatctttttgaaactaagcgttttaagggtactgaaagtataagtaaagtgtctgagcaagtaaaaaatgtgaagcttaatgaagataaacccaaagaaaccaagtctgaagagaccctggatgagggtccaccaaaatatactaaatctgttctgaaaaagggagataaaaccaactttcccaaaaagggagatgttgttcactgctggtatacaggaacactacaagatgggactgtttttgatactaatattcaaacaagtgcaaagaagaagaaaaatgccaagcctttaagttttaaggtcggagtaggcaaagttatcagaggatgggatgaagctctcttgactatgagtaaaggagaaaaggctcgactggagattgaaccagaatgggcttacggaaagaaaggacagcctgatgccaaaattccaccaaatgcaaaactcacttttgaagtggaattagtggatattgattgaaatagcagtgcttcagctctaaggatattagcaacaatgataaaacttggccttgaagaaatttacacaactagttagaacttgttactattgtaaaggaagagtcaactggaaaattcaaggagttaataaaatttgtttacttggtcccagcttttgagagataaatcccttatgaatccctggtctaaaatactttcctacagctgtgtaaaatactggtcaaggagaactttttccttttacctcatgttgtaaacttaagtggctcaataaaaattgatccactgtcaaaaaaaaaaaaaaaaaaaaaaaaaaaaaaaaaaaaaaaaaa

SEQ ID NO: 1178 - protein, 224 aa, Homo sapiens
MAAAVPQRAWTVEQLRSEQLPKKDIIKFLQEHGSDSFLAEHKLLGNIKNVAKTANKDHLVTAYNHLFETKRFKGTESISKVSEQVKNVKLNEDKPKETKSEETLDEGPPKYTKSVLKKGDKTNFPKKGDVVHCWYTGTLQDGTVFDTNIQTSAKKKKNAKPLSFKVGVGKVIRGWDEALLTMSKGEKARLEIEPEWAYGKKGQPDAKIPPNAKLTFEVELVDID

SEQ ID NO: 1179 - DNA, 7144 bp, Homo sapiens
gagttttgtgcgaaggaaaccgatggggatcggaaccgtagcggttgagctgctgctgctacggatatctgacagaagccttcggtggttgtcggcctaatgagcggacggcaaagaacgctttttcagacgtggggctcaagtatctcccgatcatctgggactccgggttgcagctccggaactgagcgacctcagagccctggcagctccaaggcgcctttgccagcagcagcggaggctcagctggagtcggacgatgatgtgttgcttgtcgcggcgtacgaggctgagcggcagttgtgtctagagaatggcgggttctgcacctccgcgggcgccctgtggatttaccctaccaattgcccagtgcgggactaccagctgcacatttcccgggctgctctgttttgcaatacgctggtgtgtctgcctaccggactgggaaagacctttattgccgccgtggtcatgtacaatttctaccgctggttcccttcaggaaaggtggtcttcatggccccaacgaaacccttggtgacacagcagatcgaggcttgctaccaggtgatgggtatcccgcaatcccacatggccgaaatgacagggtctacacaagcttccaccaggaaggaaatatggtgcagtaagagagtgctttttcttacacctcaggtcatggtaaatgacctttctagaggagcttgtcccgctgctgaaataaagtgtttagttattgatgaagctcataaagctctcggaaactatgcttattgccaggttgtaagagaactagtcaaatatacaaatcactttagaatcttggctctaagtgccacaccaggtagtgatataaaggctgtgcaacaagttattactaacctgctaattgggcagatagagcttcgttctgaagattctccagatattttgacatattctcatgaaagaaaagttgaaaagcttattgttccgcttggtgaagaacttgcagccatccaaaagacctatatccagattttggaatcatttgctcgttctttgattcagaggaatgttttgatgagaagggatatcccaaatctaacaaaatatcagataattctggcaagagatcagtttaggaaaaacccatctccgaatattgtgggaatacaacaaggcataatcgagggagagtttgctatttgtattagtttatatcatggttatgaattattgcagcaaatgggaatgagatcattatatttcttcctttgtggaattatggatggaactaaagggatgacacggtcaaaaaatgaacttggccgaaatgaagacttcatgaaactctataatcatctagagtgtatgtttgcacgtacacgtagtacttcagcaaatggtatttctgctatccaacaaggagataaaaataaaaaatttgtttatagtcatccaaagttaaagaaattagaagaagttgtaattgaacacttcaagtcatggaatgctgaaaacactactgaaaagaaacgtgatgagacccgagttatgatcttctcttcatttcgagatagtgttcaagaaattgcagaaatgctttcacagcatcagccaattattagagtaatgacttttgtcggccatgcctcagggaaaagcacgaagggttttacccagaaggagcaactggaggtagtgaaacagtttcgtgacggtggttacaacacgctggtttctacctgtgtgggtgaagaaggtttggatataggagaagttgatcttataatatgttttgattcccagaagagcccaattcgtcttgtacaacgaatgggtagaactggccgtaaacgtcaaggcaggatagttattatcctttctgaaggacgagaggaacgtatttataatcagagtcagtccaacaaaagaagtatatataaagctatttcaagtaacaggcaggtccttcatttttaccaaagaagtccacgaatggttcctgatggaatcaacccaaaattacacaaaatgttcatcacacatggtgtctatgaaccagagaagccttctcggaacttgcagcgaaagtcatctatcttttcctatagggatggaatgaggcaaagtagcctaaagaaagattggttcttatcagaagaagaatttaaattatggaacagactttatagattaagggacagtgatgaaattaaagagataacattgcctcaagttcagttttcttctttacaaaatgaggaaaacaaaccagctcaagaatcaaccactggaattcatcaactctctctctctgaatggagactgtggcaagatcatcctttgcctacacatcaagttgatcactcagatcgatgccgccattttataggccttatgcaaatgatagagggaatgagacacgaagagggagaatgcagctatgaattggaagttgaatcttatttacaaatggaagatgttacctcaacatttattgctcccaggaatgaatctaataatcttgccagtgacacctttatcactcacaagaaatcgtcatttataaagaacataaatcaaggcagttcatcctcagtgatagaatctgatgaagaatgtgctgaaattgttaaacaaactcatatcaaacctactaaaattgtttctttaaagaaaaaagtgtctaaagaaataaaaaaagatcagcttaaaaaagaaaataatcacggtattatagattctgtagataatgacagaaattccactgttgaaaatatttttcaagaagacctaccaaatgataaaaggacatcagatacagatgaaattgctgccacatgtactattaatgaaaatgttattaaagaaccgtgtgtgttattaacagagtgtcagtttacaaataaatccactagttcacttgctggaaatgttttagattctggttataacagtttcaatgatgaaaaatctgtttcatctaacttatttcttccattcgaagaagagctttatattgttagaacagatgaccaattttataattgtcactcattgacaaaagaggtactagctaatgtagagagatttttatcttattctcctccgcctctcagtggactctcagacttggaatatgaaattgctaagggtactgcacttgagaatttgcttttcttaccctgtgcagagcatttacgaagtgataaatgcacctgtttgctgtcacattcagctgtgaattctcaacagaatttagaattgaattcacttaaatgtataaattatccatctgaaaaaagttgcctttatgatatacctaatgataatatttctgatgagccaagtctctgtgactgtgatgtacataaacataatcaaaatgaaaatttagtacctaacaatcgtgttcaaatacacagaagccctgcacagaatttagttggagagaacaatcatgatgttgataacagtgacctcccagtattgtccactgatcaagatgaaagtttgctgttatttgaagatgttaatacagagttcgacgatgtgagtctttcacccttgaacagtaaaagcgaatctttacctgtgtcagacaaaactgctattagtgaaacgcctctggtctctcagttcttaatttctgatgaacttttgttggacaataattctgaactccaagatcaaatcacccgtgatgctaatagttttaaatctcgtgatcagagaggtgtacaggaagaaaaagtgaagaatcatgaggatatttttgattgctctagggatttattttctgttacctttgatttaggattctgtagtccagattctgatgatgaaatattggaacatacatcagatagcaatagacctctagatgatctatatggaaggtatttggaaattaaggagataagtgatgcaaattatgtttcgaatcaagcactaataccaagagatcatagtaaaaattttactagtggaactgttattatcccatcaaatgaagatatgcagaatccaaattatgtacatttgccactgagtgcagcaaaaaatgaagaattgttatctcctggttattctcagttttctttaccagtgcaaaaaaaagttatgagtacaccactctctaaatcaaacacattgaactcattttctaagataagaaaggaaatacttaagacaccagattctagtaaggaaaaagtaaacctacaaagattcaaagaagcattgaattcaacttttgattattcagaattttctctagaaaagtctaaaagcagtggtccaatgtatctgcataaatcctgtcattctgttgaagatggacaattattaacaagtaacgaaagtgaagatgacgagattttccgaagaaaagttaaaagagcaaaaggaaatgttttaaactctcctgaggatcagaaaaatagtgaagttgattctccacttcatgctgtcaaaaagcgcagatttcctataaacagatcagaattatcatctagtgatgagagtgagaattttcccaaaccatgttcacaattagaagacttcaaggtttgtaacgggaatgccagaagaggcatcaaagtcccaaagagacagagtcacttaaagcatgtagctaggaagtttttagatgatgaagcagaactttctgaagaagatgcagaatatgtttcatcagatgaaaatgatgagtcagaaaatgaacaagattcctcattacttgactttttaaatgatgaaactcaactttcacaggctataaatgattctgaaatgagagctatttacatgaaatctttgcgtagtccaatgatgaacaataagtacaaaatgattcataagacacataaaaacataaacattttctcgcagattcctgaacaagatgaaacctatttagaggatagtttttgtgttgatgaagaggagtcttgcaaaggccaatcaagtgaagaagaagtttgtgttgattttaacttaataactgatgattgctttgcaaatagtaaaaagtataaaactcgacgtgcagtaatgctaaaagaaatgatggaacaaaattgtgcacattcaaaaaagaaattatccagaattattttaccagatgattcaagtgaggaggagaacaatgtaaatgataaaagagaatctaatattgcggttaacccaagcactgttaagaagaacaaacaacaggaccattgtttaaattcagtgccttctggatcttctgcgcagtccaaggtgcgttctactccaagagttaatccattagcaaagcagagcaaacagacatcgctgaatttaaaggatacaatttccgaagtctcagacttcaaacctcagaatcataatgaagtccagtctaccacaccacccttcactactgttgattcacagaaagactgtagaaaatttccagttccacagaaggatggtagtgctttggaggattctagcacttcaggggcatcctgttccaagtcaagaccacatttagctgggacacatacttctcttagacttccgcaggaaggaaaaggaacctgtattcttgtaggtggtcatgaaatcacttctggattagaagtaatttcttccctaagagcaattcatgggttgcaagtagaagtttgtcctcttaatggctgtgattacatcgtgagtaatcgcatggtggtggaaaggaggtctcaatctgagatgttaaatagtgtcaataagaacaagttcattgagcagatccagcacctgcagagtatgtttgaaagaatatgtgtgattgtggaaaaggacagagaaaaaacaggagacacatcaaggatgtttaggagaacaaagagctatgacagcctgctgactaccttaattggcgctggaatccgaattcttttcagttcctgccaagaagaaaccgcagatttgctaaaggaactgtctttagtggaacaaagaaagaatgttggtattcatgttccaacagtggtgaatagtaataaaagtgaggcactccagttttatttaagtattcccaatataagttatataactgcattaaatatgtgtcaccagttttcatctgtgaaaaggatggctaacagctcacttcaagaaatctccatgtatgcacaagtaactcatcagaaggctgaggagatctatagatatattcactatgtatttgacatacaaatgttaccaaatgatcttaaccaagatagactgaaatctgatatataatcaagctgctcaagatggggttttcaaagacctctcacaatattaaatgcacttcaataatcattgctgttttatgtttatttgtaaataagagaatattttatttaaatattttatattgtatacatttttatttatagattatagaaattattaaaaaagaaaaatctgatgttcagtgatcattttgactagattataaaactaatttttcttattaaataaaacaaggtttattaaaagtgttactaaggatagtttaagaaagtaaaagctaagctagagatatactttggaatgtttcccaaaattaaagttgtactgttgtgataaatagtaaagttgacatgtctatgactacagccaacttgtcgattttccctatgtgtagatagtatacttttaagtgtactgattctaaatacatgtacttggtaaggtgtgggtgatgggtgggttgtgagataaatgacccagtaactaggaaagtagaaaacttaactgaatgtttatctgaccaaaggtgtgtcccagttaagtactgtcaaatctattaatatgaactctgatatggtttggctgtgtccccaaccaaaatctcatcttgacttgtaatctgaattataatcccaatatattggggagggacctcctggaacgtgattagctcatgggggcggttcccccatgctgttctagtgatagttctcagaggatctgatggttttataagcttttcctctgttcactctgcagttctcttgcctactgccatgtggaaaaggaaacgtttgcttcccctccaccatgattgtaagttcccgaggcctccccagccatgcaggactgtgagtcaattaaacatcttttccttataaattaaaaaaaaaaaaaaaaa

SEQ ID NO: 1180 - protein, 2048 aa, Homo sapiens
MSGRQRTLFQTWGSSISRSSGTPGCSSGTERPQSPGSSKAPLPAAAEAQLESDDDVLLVAAYEAERQLCLENGGFCTSAGALWIYPTNCPVRDYQLHISRAALFCNTLVCLPTGLGKTFIAAVVMYNFYRWFPSGKVVFMAPTKPLVTQQIEACYQVMGIPQSHMAEMTGSTQASTRKEIWCSKRVLFLTPQVMVNDLSRGACPAAEIKCLVIDEAHKALGNYAYCQVVRELVKYTNHFRILALSATPGSDIKAVQQVITNLLIGQIELRSEDSPDILTYSHERKVEKLIVPLGEELAAIQKTYIQILESFARSLIQRNVLMRRDIPNLTKYQIILARDQFRKNPSPNIVGIQQGIIEGEFAICISLYHGYELLQQMGMRSLYFFLCGIMDGTKGMTRSKNELGRNEDFMKLYNHLECMFARTRSTSANGISAIQQGDKNKKFVYSHPKLKKLEEVVIEHFKSWNAENTTEKKRDETRVMIFSSFRDSVQEIAEMLSQHQPIIRVMTFVGHASGKSTKGFTQKEQLEVVKQFRDGGYNTLVSTCVGEEGLDIGEVDLIICFDSQKSPIRLVQRMGRTGRKRQGRIVIILSEGREERIYNQSQSNKRSIYKAISSNRQVLHFYQRSPRMVPDGINPKLHKMFITHGVYEPEKPSRNLQRKSSIFSYRDGMRQSSLKKDWFLSEEEFKLWNRLYRLRDSDEIKEITLPQVQFSSLQNEENKPAQESTTGIHQLSLSEWRLWQDHPLPTHQVDHSDRCRHFIGLMQMIEGMRHEEGECSYELEVESYLQMEDVTSTFIAPRNESNNLASDTFITHKKSSFIKNINQGSSSSVIESDEECAEIVKQTHIKPTKIVSLKKKVSKEIKKDQLKKENNHGIIDSVDNDRNSTVENIFQEDLPNDKRTSDTDEIAATCTINENVIKEPCVLLTECQFTNKSTSSLAGNVLDSGYNSFNDEKSVSSNLFLPFEEELYIVRTDDQFYNCHSLTKEVLANVERFLSYSPPPLSGLSDLEYEIAKGTALENLLFLPCAEHLRSDKCTCLLSHSAVNSQQNLELNSLKCINYPSEKSCLYDIPNDNISDEPSLCDCDVHKHNQNENLVPNNRVQIHRSPAQNLVGENNHDVDNSDLPVLSTDQDESLLLFEDVNTEFDDVSLSPLNSKSESLPVSDKTAISETPLVSQFLISDELLLDNNSELQDQITRDANSFKSRDQRGVQEEKVKNHEDIFDCSRDLFSVTFDLGFCSPDSDDEILEHTSDSNRPLDDLYGRYLEIKEISDANYVSNQALIPRDHSKNFTSGTVIIPSNEDMQNPNYVHLPLSAAKNEELLSPGYSQFSLPVQKKVMSTPLSKSNTLNSFSKIRKEILKTPDSSKEKVNLQRFKEALNSTFDYSEFSLEKSKSSGPMYLHKSCHSVEDGQLLTSNESEDDEIFRRKVKRAKGNVLNSPEDQKNSEVDSPLHAVKKRRFPINRSELSSSDESENFPKPCSQLEDFKVCNGNARRGIKVPKRQSHLKHVARKFLDDEAELSEEDAEYVSSDENDESENEQDSSLLDFLNDETQLSQAINDSEMRAIYMKSLRSPMMNNKYKMIHKTHKNINIFSQIPEQDETYLEDSFCVDEEESCKGQSSEEEVCVDFNLITDDCFANSKKYKTRRAVMLKEMMEQNCAHSKKKLSRIILPDDSSEEENNVNDKRESNIAVNPSTVKKNKQQDHCLNSVPSGSSAQSKVRSTPRVNPLAKQSKQTSLNLKDTISEVSDFKPQNHNEVQSTTPPFTTVDSQKDCRKFPVPQKDGSALEDSSTSGASCSKSRPHLAGTHTSLRLPQEGKGTCILVGGHEITSGLEVISSLRAIHGLQVEVCPLNGCDYIVSNRMVVERRSQSEMLNSVNKNKFIEQIQHLQSMFERICVIVEKDREKTGDTSRMFRRTKSYDSLLTTLIGAGIRILFSSCQEETADLLKELSLVEQRKNVGIHVPTVVNSNKSEALQFYLSIPNISYITALNMCHQFSSVKRMANSSLQEISMYAQVTHQKAEEIYRYIHYVFDIQMLPNDLNQDRLKSDI

SEQ ID NO: 1181 - DNA, 4584 bp, Homo sapiens
agaacgtcgcggaggaggtaagcgtcgcttggcgcctggccgccgcgggcaggatacaccgtgggcctgaggcgcgagcccggcggcgtgcggccctctctccgcgcggagccgagccggaactgcggcagtctctccctgccaggctcttcatccaaggtttctgtggatcccttctgaagttctatctgaaaattgcgcttaagtgaattttctgttagaagaacttggttgctactttcttgtcaagatgattgcaacacctttgaaacattcaagaatttacttacctccagaggcatcttctcaaaggagaaatctacccatggatgcaatcttttttgacagcattccttcaggcacacttactcctgtaaaagatttggtgaaatatcagaactcctccttaaaattgaatgaccataaaaagaatcagttcctaaaaatgacaacttttaacaataaaaatatatttcaatcaactatgctaacagaggctactacctctaacagttctcttgatatcagtgctataaagcccaacaaggatggattaaaaaataaagcaaactatgaatcaccaggaaaaatatttctaagaatgaaagaaaaagtactgcgtgacaagcaagaacagccatcaagaaacagtagtttgttggaaccacagaaaagtggaaataatgaaaccttcactcctaacagagttgaaaaaaaaaaattgcagcatacctacctatgtgaagaaaaggaaaacaacaaatcattccagtcagatgacagttcactaagagcctcagtccaaggagttcctctagaatcatcaaataatgatattttcctcccggtcaaacaaaagattcagtgccagcaggaaaagaaagcaccactgcacaatttaacttacgaacttccaactctgaaccaagaacaggaaaattttttggctgtagaagcccgaaacaagacattaactagagctcagttggctaaacaaatttttcactcaaaggagagtatagttgcaaccactaaatccaaaaaggacacgtttgttttagaaagcgttgattctgctgatgaacaatttcaaaatactaatgctgagactctcagtactaattgtattcctattaaaaatggcagcctgttaatggtttctgatagtgagaggacaacagaagggacttcgcaacagaaagttaaggaaggaaatggaaaaacagtgcctggagagacaggtcttccaggttccatgaaagatacatgtaaaattgtacttgcaacaccaagacttcatataacaatacctcggaggtcaaaaagaaatatttcaaagctttctcctccaagaatatttcaaactgttacaaatggacttaaaaaaaatcaggtagttcagctacaggaatggatgattaaaagcatcaataataatactgctatatgtgtagaaggaaaattgatagacgtcactaacatatattggcacagtaatgtaattatagagcggattgagcacaacaaacttaggactatatcaggcaacgtttatatattaaaaggcatgatagaccaaatttccatgaaagaagcaggatatccaaattatctcataaggaaatttatgtttggatttccagaaaattggaaagagcacattgataattttctggaacaattaagggctggtgaaaagaacagggaaaagaccaaacaaaaacagaaaactggaagatctgtccgtgacataaggaaatcaatgaaaaatgatgcacgagaaaaccaaacagatactgctcaaagagccaccaccacttacgattttgattgtgataatttggaactgaagagtaataagcacagtgagtcaccaggagctacagaattaaacatgtgccacagtaattgccaaaataaaccaacattaaggttcccagatgaccaagtaaataatactattcaaaatggaggaggagatgacttatctaatcaggaattaattggaaaaaaagaatataaaatgtcttcaaagaaactaaaaattggtgaaagaacaaatgaaaggataataaaaagtcagaagcaagagacaactgaagaattggatgtatccattgatattctaacctcaagggaacagtttttctcagatgaagaaagaaaatacatggccatcaatcagaagaaagcttatattttagtaacaccacttaaatctagaaaagtgatagagcaaagatgcatgaggtataatctgtccgctggcaccatcaaagcagtaacagattttgtaataccagagtgtcaaaaaaaaagtcccatcagcaagtccatggggactttagaaaatacatttgaaggtcataaaagtaaaaacaaggaagattgcgatgaacgtgacttacttactgtcaaccggaaaataaaaatatctaaccttgaaaaggaacaaatgctcacctctgactttaagaaaaataccagactattaccaaaattgaagaaaatagaaaatcaggtagctatgtcattttataagcatcagtcctcaccagatttgtcaagtgaagaaagtgaaacagaaaaggaaattaaaaggaaagctgaagttaagaaaaccaaagcaggaaacaccaaagaagcagtggttcacctgagaaagagcacaagaaacacaagtaatattccagtgattttggaacctgaaactgaagaaagtgaaaatgaattttatatcaaacaaaagaaagctagaccttccgtcaaagaaactcttcagaagtctggtgttaggaaagagtttccaattactgaggcagtaggatctgataagacaaataggcatcccttagaatgcttacctggtttaattcaggataaggaatggaatgagaaggagttacagaaacttcattgtgcttttgcatctcttccaaagcacaaacctggtttctggtcagaggtagctgcggctgtaggttctcgatctcctgaagaatgccagaggaaatacatggaaaatcccagaggaaaaggatcccagaaacatgtcactaagaagaagccagccaattccaaaggccaaaatggcaagagaggtgatgctgatcagaaacaaactattaagataactgccaaagtgggaactcttaaaaggaagcaacagatgagggaatttctggaacagttgccaaaagatgaccatgatgattttttcagtacaacacctttacagcatcaaagaatactgttgccaagtttccaggacagtgaagatgatgatgatattctgccaaatatggacaaaaatccaacaactccatcatcagttatctttccattggtaaaaactcctcaatgtcagcatgtcagtcctggcatgctaggttctataaataggaatgactgtgataaatatgtttttcgtatgcaaaaatatcataaaagtaatggtggtattgtctggggcaacatcaagaaaaaattagttgaaactgatttctcaactccaacaccaagaaggaaaaccccatttaacacagacttaggagaaaactctggtattggaaaacttttcactaatgctgtggaatctttagatgaagaagagaaagattattatttttcgaactctgattctgcatagtaaaatgagaaaatatgattcctgggatttttaccataaagcagacagtgtttgtattttcaactggagtacatgtattttctttgtaaagtagcttcctatgaaaatgtggacttttttgaaggtttcatatgtttgtgttcaaagtaaaatatcctcattgctgcagcttactaaaaatgtaaagaaaattgtttttgctcgtgtagatatctgtaaatttgtttttgcatattaaaatatatatagataattttttaataagcatccaagtctgtttactttaagaaaaccatttcccaaacagattttttttttatttcaagaaaattttgctaccatttaagtaagagaaggtgagaaggatgacagaggttgtattggtagctattgaattcatgaaaacttttaagttagcatttgttagcagttattatccaagccagagtaggatttgttaccagttgttatccaaacctaatgtttaaattacacattgttgaaattaaattacacattgttgacatgcttctctcctgattgtttttattttaaacttgtgataggcatatctatgaaacctttgtaaatttagtttattgctttaccattattttactaggtaaaattagagaacagattttgttctctaatttttaagccttatttacatatgcagaaacagcttaaatattttgactagattagacaaacagttaatagatccaccattaggaatcaatatattatgtcataataaacatcctttttctttcactgaaatttcttttagaaataaacttatttttgcttgttatgttttgaaacttgacataggatattttccctctggctacacattcacctacccttgttctctatttagattattcaaataaagttagtttgcttttatagtaaaaaaaaaaaaaaaa

SEQ ID NO: 1182 - protein, 1132 aa, Homo sapiens
MIATPLKHSRIYLPPEASSQRRNLPMDAIFFDSIPSGTLTPVKDLVKYQNSSLKLNDHKKNQFLKMTTFNNKNIFQSTMLTEATTSNSSLDISAIKPNKDGLKNKANYESPGKIFLRMKEKVLRDKQEQPSRNSSLLEPQKSGNNETFTPNRVEKKKLQHTYLCEEKENNKSFQSDDSSLRASVQGVPLESSNNDIFLPVKQKIQCQQEKKAPLHNLTYELPTLNQEQENFLAVEARNKTLTRAQLAKQIFHSKESIVATTKSKKDTFVLESVDSADEQFQNTNAETLSTNCIPIKNGSLLMVSDSERTTEGTSQQKVKEGNGKTVPGETGLPGSMKDTCKIVLATPRLHITIPRRSKRNISKLSPPRIFQTVTNGLKKNQVVQLQEWMIKSINNNTAICVEGKLIDVTNIYWHSNVIIERIEHNKLRTISGNVYILKGMIDQISMKEAGYPNYLIRKFMFGFPENWKEHIDNFLEQLRAGEKNREKTKQKQKTGRSVRDIRKSMKNDARENQTDTAQRATTTYDFDCDNLELKSNKHSESPGATELNMCHSNCQNKPTLRFPDDQVNNTIQNGGGDDLSNQELIGKKEYKMSSKKLKIGERTNERIIKSQKQETTEELDVSIDILTSREQFFSDEERKYMAINQKKAYILVTPLKSRKVIEQRCMRYNLSAGTIKAVTDFVIPECQKKSPISKSMGTLENTFEGHKSKNKEDCDERDLLTVNRKIKISNLEKEQMLTSDFKKNTRLLPKLKKIENQVAMSFYKHQSSPDLSSEESETEKEIKRKAEVKKTKAGNTKEAVVHLRKSTRNTSNIPVILEPETEESENEFYIKQKKARPSVKETLQKSGVRKEFPITEAVGSDKTNRHPLECLPGLIQDKEWNEKELQKLHCAFASLPKHKPGFWSEVAAAVGSRSPEECQRKYMENPRGKGSQKHVTKKKPANSKGQNGKRGDADQKQTIKITAKVGTLKRKQQMREFLEQLPKDDHDDFFSTTPLQHQRILLPSFQDSEDDDDILPNMDKNPTTPSSVIFPLVKTPQCQHVSPGMLGSINRNDCDKYVFRMQKYHKSNGGIVWGNIKKKLVETDFSTPTPRRKTPFNTDLGENSGIGKLFTNAVESLDEEEKDYYFSNSDSA

SEQ ID NO: 1183 - DNA, 4373 bp, Homo sapiens
ggcgccgacccatgctggctgggaacgtgtctcccggtgacgcagccccgggtggggaacgtggtgcggcggcggcggcggcggcgactgtacgcgcctccgccgcccccgagaggacgcgccgtgcagcggctgagtggcggcggcggcgacggcaaacccggagctgccggccggcgcgcgggaggaggacgcgggtgcggtctaggaaacggagctgcgggcggaggctccatgttgggaagcggcgccgttcgtgcttgttagcgggaatccgggagccgcggggtgagctggcgggggccgggccctaagtgaagatggaggccccgctgcggcctgccgcggacatcctgaggcggaacccgcagcaggactacgaactcgtccagagggtcggcagcggcacctacggggacgtctataaggccagaaatgtacacacaggagagctggctgcagtaaaaatcattaaattggagcctggagatgatttttctttgattcaacaagaaatatttatggttaaagaatgtaaacattgtaacatcgttgcctactttgggagttatcttagtcgggaaaaactatggatttgtatggaatactgtggtggcggatcacttcaagatatttaccatgttactggaccattatcagaattgcaaatagcctatgtatgcagagaaaccttacagggtcttgcctatttgcatactaaaggcaaaatgcatagagatatcaaaggtgctaatattttattgacagaccatggcgatgtaaaattagctgactttggtgtggctgcaaaaataacagctaccattgcaaaacgaaaatctttcattggcaccccttactggatggccccagaagttgcagcagtagagaagaatggtggctacaaccaactctgtgatatctgggcagtaggaataacagcaattgaacttggagaacttcagccacctatgtttgatctccacccaatgagggctctcttcttaatgtcaaaaagtaattttcagcctccaaaactaaaggacaaaacaaaatggtcatcaacattccataattttgtcaaaatagcactaaccaaaaacccaaaaaaaagaccaactgctgaaagacttctgactcacacttttgttgcacagccaggtctctctagagccctagcagttgaactgttagacaaagtgaacaatccagataaccacgcacattacactgaagcagatgacgatgactttgagccccatgcaatcattcgtcataccattagatctacaaacaggaatgccagagctgaacggacagcttcagaaataaattttgacaaattacaatttgaacctcctctgagaaaagaaacagaagcacgagatgaaatgggattgtcatcagacccaaatttcatgttacagtggaatccttttgttgatggtgcaaatactggcaaatcaacctcaaaacgtgcaataccacctcccctacctcctaagccaaggataagcagttaccctgaagacaactttccggatgaagaaaaagcatcaaccataaaacattgtcctgattcagaaagcagagctccccaaattctcagaagacagagtagcccaagttgtgggcctgtggcagagacttcttctattggaaatggtgatggtatttcaaaactgatgagtgaaaatacagaaggatcagcacaagcaccacagttaccacgaaaaaaggacaaacgagacttccctaaaccagccatcaatggccttccacccaccccaaaagttctgatgggagcatgcttttcaaaagtttttgatggctgtcctttgaaaattaattgtgcaacatcctggatacatcctgatacaaaagatcagtacattatttttggaactgaagatggtatttacacactgaatctcaatgagctacatgaggcaacgatggaacagttatttccacggaagtgtacttggctgtatgttatcaataatactttaatgtcattatcagaaggaaaaacctttcagctctactctcacaatcttatagctttgtttgaacatgccaaaaaaccaggattagctgcccatattcaaactcacaggtttccagaccgaatactaccaagaaaattcgctttaacaacaaagattcctgatacaaaaggctgccacaaatgttgcatagtcagaaacccttacacgggacataaatacctctgtggagctttacagtctggaattgttttacttcagtggtatgagccaatgcagaaattcatgttgataaagcactttgattttcctttgccaagtcctttgaatgtttttgaaatgctggtgatacctgaacaggaataccctatggtctgtgtagctattagcaaaggcactgaatcgaatcaggtagttcagtttgagacaatcaatttgaactctgcatcttcatggtttacagaaattggtgcaggcagccagcagttagattccattcatgtaacacagttggagagagataccgttttagtgtgtttagacaaatttgtgaaaattgtaaatctacaaggaaaattaaaatcaagtaagaaactggcctctgagttaagttttgattttcgcattgaatctgtagtatgccttcaagacagtgtgttggctttctggaaacatgggatgcagggtaaaagcttcaagtcagatgaggttacccaggagatttcagatgaaacaagagttttccgcttattaggatcagacagggttgtcgttttggaaagtaggccaacagaaaatcctactgcacacagcaatctctacatcttggctggacatgaaaatagttactaagcaacagaaactgatctcaaatgacaggaaaatgaatatactccattgaaaggaaaaataaggaaattcaatacaaactgcactatgatttgctttaactattatgggttatattgcaaatgatctgtactttagggtagaattcaatattttctgcagctggaaacagctagtctatctcttgccactgtgtggtggttatatcaagtttgcttaataaaagctatgagacaaatagtcctctagttccaggaaacacagtctttttttaaaaaaaacaatgtttgtaacaagggtgccatggtatttttagataactcgtgattatcttaagagaggtaaatttagtgatcattttatatcatgtcttattccttcttaatgaacataatttgttaaattctcaagcaaggttttcacttttatattggccattctgtatgtttttgtaaaacagaatatttaatccttatttattaatctcttgctggagtggtgtaatgtatctaacttttagcaaaggagggttgcagagcagcttaaattttttttataatgtataagaattttgtttatcttttaagagtagtaaagtactttgagtgtttgggggttcaacacacacatgcaattttgcttaacaaaagtattttataatacagtttcatacagaattaccttaaaagggagtcttatgttttcaactacagatagttgtaagggatcatacagaagatattgatgatagttgaaatattcttagaaggggtgtgtatgtctagctgtgtctaccatgtgtatgtattcttgacaagcagtataaaatacctgtgatttttctttacattagggataatgcataaggaattaatcttcatatatattatcatccctaatgtagcagggggaagtatttaattgcccatgatatgtattttacttatactatgccagagaggaaactataaagtaattacacatgtaatcttgggtttttcacatatgtaggtattcattttgagtaggttgaagaagaaaaaaaatatttaaatgaattgaattcctgatgggatagtatcaataagtatttaaaagccagtattctaaaaataataaagggtagggtcatttttgagtttgtttttcttttgctattgttaatattcaaaattaaagtgttacattggtacctgttgtcttaatgcatttattgagaacagcattgagatgatgaacaaggggttagcaatagcaaactctataattattttgactaattacttaagaggaaaacagtataagtatctcattcagtatttagcaattctgtaaaataagtattatctctatttttcagatgaggaagtaagggtttagcaaggttaagagatctatccaatttacacagcaagttagtagttgagcctgaccatgagtcttctgactctgttcttttcactatgcaatacgcaaacaataaaatgttatacaaataaaaaaaaaaaaaaaaaa

SEQ ID NO: 1184 - protein, 846 aa, Homo sapiens
MEAPLRPAADILRRNPQQDYELVQRVGSGTYGDVYKARNVHTGELAAVKIIKLEPGDDFSLIQQEIFMVKECKHCNIVAYFGSYLSREKLWICMEYCGGGSLQDIYHVTGPLSELQIAYVCRETLQGLAYLHTKGKMHRDIKGANILLTDHGDVKLADFGVAAKITATIAKRKSFIGTPYWMAPEVAAVEKNGGYNQLCDIWAVGITAIELGELQPPMFDLHPMRALFLMSKSNFQPPKLKDKTKWSSTFHNFVKIALTKNPKKRPTAERLLTHTFVAQPGLSRALAVELLDKVNNPDNHAHYTEADDDDFEPHAIIRHTIRSTNRNARAERTASEINFDKLQFEPPLRKETEARDEMGLSSDPNFMLQWNPFVDGANTGKSTSKRAIPPPLPPKPRISSYPEDNFPDEEKASTIKHCPDSESRAPQILRRQSSPSCGPVAETSSIGNGDGISKLMSENTEGSAQAPQLPRKKDKRDFPKPAINGLPPTPKVLMGACFSKVFDGCPLKINCATSWIHPDTKDQYIIFGTEDGIYTLNLNELHEATMEQLFPRKCTWLYVINNTLMSLSEGKTFQLYSHNLIALFEHAKKPGLAAHIQTHRFPDRILPRKFALTTKIPDTKGCHKCCIVRNPYTGHKYLCGALQSGIVLLQWYEPMQKFMLIKHFDFPLPSPLNVFEMLVIPEQEYPMVCVAISKGTESNQVVQFETINLNSASSWFTEIGAGSQQLDSIHVTQLERDTVLVCLDKFVKIVNLQGKLKSSKKLASELSFDFRIESVVCLQDSVLAFWKHGMQGKSFKSDEVTQEISDETRVFRLLGSDRVVVLESRPTENPTAHSNLYILAGHENSY

SEQ ID NO: 1185 - DNA, 4421 bp, Homo sapiens
ggcgccgacccatgctggctgggaacgtgtctcccggtgacgcagccccgggtggggaacgtggtgcggcggcggcggcggcggcgactgtacgcgcctccgccgcccccgagaggacgcgccgtgcagcggctgagtggcggcggcggcgacggcaaacccggagctgccggccggcgcgcgggaggaggacgcgggtgcggtctaggaagtaggtcccgggctccgcgctcaacaaagacggggccgcccccattagacggagctgcgggcggaggctccatgttgggaagcggcgccgttcgtgcttgttagcgggaatccgggagccgcggggtgagctggcgggggccgggccctaagtgaagatggaggccccgctgcggcctgccgcggacatcctgaggcggaacccgcagcaggactacgaactcgtccagagggtcggcagcggcacctacggggacgtctataaggccagaaatgtacacacaggagagctggctgcagtaaaaatcattaaattggagcctggagatgatttttctttgattcaacaagaaatatttatggttaaagaatgtaaacattgtaacatcgttgcctactttgggagttatcttagtcgggaaaaactatggatttgtatggaatactgtggtggcggatcacttcaagatatttaccatgttactggaccattatcagaattgcaaatagcctatgtatgcagagaaaccttacagggtcttgcctatttgcatactaaaggcaaaatgcatagagatatcaaaggtgctaatattttattgacagaccatggcgatgtaaaattagctgactttggtgtggctgcaaaaataacagctaccattgcaaaacgaaaatctttcattggcaccccttactggatggccccagaagttgcagcagtagagaagaatggtggctacaaccaactctgtgatatctgggcagtaggaataacagcaattgaacttggagaacttcagccacctatgtttgatctccacccaatgagggctctcttcttaatgtcaaaaagtaattttcagcctccaaaactaaaggacaaaacaaaatggtcatcaacattccataattttgtcaaaatagcactaaccaaaaacccaaaaaaaagaccaactgctgaaagacttctgactcacacttttgttgcacagccaggtctctctagagccctagcagttgaactgttagacaaagtgaacaatccagataaccacgcacattacactgaagcagatgacgatgactttgagccccatgcaatcattcgtcataccattagatctacaaacaggaatgccagagctgaacggacagcttcagaaataaattttgacaaattacaatttgaacctcctctgagaaaagaaacagaagcacgagatgaaatgggattgtcatcagacccaaatttcatgttacagtggaatccttttgttgatggtgcaaatactggcaaatcaacctcaaaacgtgcaataccacctcccctacctcctaagccaaggataagcagttaccctgaagacaactttccggatgaagaaaaagcatcaaccataaaacattgtcctgattcagaaagcagagctccccaaattctcagaagacagagtagcccaagttgtgggcctgtggcagagacttcttctattggaaatggtgatggtatttcaaaactgatgagtgaaaatacagaaggatcagcacaagcaccacagttaccacgaaaaaaggacaaacgagacttccctaaaccagccatcaatggccttccacccaccccaaaagttctgatgggagcatgcttttcaaaagtttttgatggctgtcctttgaaaattaattgtgcaacatcctggatacatcctgatacaaaagatcagtacattatttttggaactgaagatggtatttacacactgaatctcaatgagctacatgaggcaacgatggaacagttatttccacggaagtgtacttggctgtatgttatcaataatactttaatgtcattatcagaaggaaaaacctttcagctctactctcacaatcttatagctttgtttgaacatgccaaaaaaccaggattagctgcccatattcaaactcacaggtttccagaccgaatactaccaagaaaattcgctttaacaacaaagattcctgatacaaaaggctgccacaaatgttgcatagtcagaaacccttacacgggacataaatacctctgtggagctttacagtctggaattgttttacttcagtggtatgagccaatgcagaaattcatgttgataaagcactttgattttcctttgccaagtcctttgaatgtttttgaaatgctggtgatacctgaacaggaataccctatggtctgtgtagctattagcaaaggcactgaatcgaatcaggtagttcagtttgagacaatcaatttgaactctgcatcttcatggtttacagaaattggtgcaggcagccagcagttagattccattcatgtaacacagttggagagagataccgttttagtgtgtttagacaaatttgtgaaaattgtaaatctacaaggaaaattaaaatcaagtaagaaactggcctctgagttaagttttgattttcgcattgaatctgtagtatgccttcaagacagtgtgttggctttctggaaacatgggatgcagggtaaaagcttcaagtcagatgaggttacccaggagatttcagatgaaacaagagttttccgcttattaggatcagacagggttgtcgttttggaaagtaggccaacagaaaatcctactgcacacagcaatctctacatcttggctggacatgaaaatagttactaagcaacagaaactgatctcaaatgacaggaaaatgaatatactccattgaaaggaaaaataaggaaattcaatacaaactgcactatgatttgctttaactattatgggttatattgcaaatgatctgtactttagggtagaattcaatattttctgcagctggaaacagctagtctatctcttgccactgtgtggtggttatatcaagtttgcttaataaaagctatgagacaaatagtcctctagttccaggaaacacagtctttttttaaaaaaaacaatgtttgtaacaagggtgccatggtatttttagataactcgtgattatcttaagagaggtaaatttagtgatcattttatatcatgtcttattccttcttaatgaacataatttgttaaattctcaagcaaggttttcacttttatattggccattctgtatgtttttgtaaaacagaatatttaatccttatttattaatctcttgctggagtggtgtaatgtatctaacttttagcaaaggagggttgcagagcagcttaaattttttttataatgtataagaattttgtttatcttttaagagtagtaaagtactttgagtgtttgggggttcaacacacacatgcaattttgcttaacaaaagtattttataatacagtttcatacagaattaccttaaaagggagtcttatgttttcaactacagatagttgtaagggatcatacagaagatattgatgatagttgaaatattcttagaaggggtgtgtatgtctagctgtgtctaccatgtgtatgtattcttgacaagcagtataaaatacctgtgatttttctttacattagggataatgcataaggaattaatcttcatatatattatcatccctaatgtagcagggggaagtatttaattgcccatgatatgtattttacttatactatgccagagaggaaactataaagtaattacacatgtaatcttgggtttttcacatatgtaggtattcattttgagtaggttgaagaagaaaaaaaatatttaaatgaattgaattcctgatgggatagtatcaataagtatttaaaagccagtattctaaaaataataaagggtagggtcatttttgagtttgtttttcttttgctattgttaatattcaaaattaaagtgttacattggtacctgttgtcttaatgcatttattgagaacagcattgagatgatgaacaaggggttagcaatagcaaactctataattattttgactaattacttaagaggaaaacagtataagtatctcattcagtatttagcaattctgtaaaataagtattatctctatttttcagatgaggaagtaagggtttagcaaggttaagagatctatccaatttacacagcaagttagtagttgagcctgaccatgagtcttctgactctgttcttttcactatgcaatacgcaaacaataaaatgttatacaaataaaaaaaaaaaaaaaaaa

SEQ ID NO: 1186 - protein, 846 aa, Homo sapiens; identical to SEQ ID NO: 1184

SEQ ID NO: 1187 - DNA, 2271 bp, Homo sapiens
gtgtgacgctggtatctgtgtgaactcgggcttgtgatgctgagcttggttcatctgctttctcctcccttttcctccccactccttcccaccagcgccacagcaacatcctcagagtctgagcgaactgcgcccagcgcgggcacggagcctcccaccgccagcaacctgcggccccggagaaggcagcgagcgcagtgacagcgcctcaccgccaccagctcctggaccaccatggccaagaaccgcagggacagaaacagttggggtggattttcggaaaagacatatgaatggagctcagaagaggaggagccagtgaaaaaggcaggaccagtccaagtcctcattgtcaaagatgaccattcctttgagttagatgaaactgcattaaatcggatccttctctcggaggctgtcagagacaaggaggttgttgctgtatctgttgctggagcatttagaaaaggaaaatcattcctgatggacttcatgttgagatacatgtacaaccaggaatcagttgattgggttggagactacaatgaaccattgactggtttttcatggagaggtggatctgagcgagagaccacaggaattcagatatggagtgaaatcttccttatcaataaacctgatggtaaaaaggttgcagtgttattgatggatactcagggaacctttgatagtcagtcaactttgagagattcagccacagtatttgcccttagcacaatgatcagctcaatacaggtatataacttatcccaaaatgtccaggaggatgatcttcagcacctccagcttttcactgagtatggcagactggcaatggaggaaacattcctgaagccatttcagagtctgatatttcttgttcgagactggagtttcccatacgaattttcatatggagccgatggtggtgccaaattcttggaaaaacgcctcaaggtctcagggaaccagcatgaagaactacagaacgtcagaaaacacatccattcctgtttcaccaacatttcctgttttctgctacctcatcctggcttaaaagtagctaccaatccaaactttgatggaaaattgaaagaaatagatgatgaattcatcaaaaacttgaaaatactgattccttggctacttagtcccgagagcctagatattaaagagatcaatgggaataaaatcacctgccggggtctggtggagtacttcaaggcttatataaagatctatcaaggtgaagaattaccacatcccaaatccatgttacaggccacagcagaagctaacaatttagcagccgtggcaactgccaaggacacatacaacaaaaaaatggaagagatttgtggtggtgacaaaccatttctggccccaaatgacttgcagaccaaacacctgcaacttaaggaagaatctgtgaagctattccgaggggtgaagaagatgggtggggaagaatttagccggcgttacctgcagcagttggagagtgaaatagatgaactttacatccaatatatcaagcacaatgatagcaaaaatatcttccatgcagctcgtaccccagccacactgtttgtagtcatctttatcacatatgtgattgctggtgtgactggattcattggtttggacatcatagctagcctatgcaatatgataatgggactgacccttatcaccctgtgcacttgggcatatatccggtactctggagaataccgagagctgggagctgtaatagaccaggtggctgcagctctgtgggaccagggaagtacaaatgaggctttgtacaagctttacagtgcagcagcaacccacagacatctgtatcatcaagctttccctacaccaaagtcggaatctactgaacaatcagaaaagaaaaaaatgtaatgcaaattttaagaaatacaggtgcatgaccaattgtcaattaaatattcagttttatgtctccatgcaaacattcaaagtgcttccatcagaacggagtaaaatactaaacacctctgaagactgcaaactggattagttcttttacttcagtgtttaataagcagatgtatgtatgcatggttatactattttgttaacatgtacaatttcctgatttttcttcaaaaatgctgttataaagtatttgtctatttatgataacagtacacgtgttctgcttgaatttactaaattctactactgggttataattaaatcatgtgatattccaaaaaaaaaaaaaaaaaaaaaaaaaaa

SEQ ID NO: 1188 - protein, 558 aa, Homo sapiens
MAKNRRDRNSWGGFSEKTYEWSSEEEEPVKKAGPVQVLIVKDDHSFELDETALNRILLSEAVRDKEVVAVSVAGAFRKGKSFLMDFMLRYMYNQESVDWVGDYNEPLTGFSWRGGSERETTGIQIWSEIFLINKPDGKKVAVLLMDTQGTFDSQSTLRDSATVFALSTMISSIQVYNLSQNVQEDDLQHLQLFTEYGRLAMEETFLKPFQSLIFLVRDWSFPYEFSYGADGGAKFLEKRLKVSGNQHEELQNVRKHIHSCFTNISCFLLPHPGLKVATNPNFDGKLKEIDDEFIKNLKILIPWLLSPESLDIKEINGNKITCRGLVEYFKAYIKIYQGEELPHPKSMLQATAEANNLAAVATAKDTYNKKMEEICGGDKPFLAPNDLQTKHLQLKEESVKLFRGVKKMGGEEFSRRYLQQLESEIDELYIQYIKHNDSKNIFHAARTPATLFVVIFITYVIAGVTGFIGLDIIASLCNMIMGLTLITLCTWAYIRYSGEYRELGAVIDQVAAALWDQGSTNEALYKLYSAAATHRHLYHQAFPTPKSESTEQSEKKKM

SEQ ID NO: 1189 - DNA, 2256 bp, Homo sapiens
gtgtgacgctggtatctgtgtgaactcgggcttgtgatgctgagcttggttcatctgctttctcctcccttttcctccccactccttcccaccagcgccacagcaacatcctcagagtctgagcgaactgcgcccagcgcgggcacggagcctcccaccgccagcaacctgcggccccggagaaggcagcgagcgcagtgacagcgcctcaccgccaccagctcctggaccaccatggccaagaaccgcagggacagaaacagttggggtggattttcggaaaagacatatgaatggagctcagaagaggaggagccagtgaaaaaggcaggaccagtccaagtcctcattgtcaaagatgaccattcctttgagttagatgaaactgcattaaatcggatccttctctcggaggctgtcagagacaaggaggttgttgctgtatctgttgctggagcatttagaaaaggaaaatcattcctgatggacttcatgttgagatacatgtacaaccaggaatcagttgattgggttggagactacaatgaaccattgactggtttttcatggagaggtggatctgagcgagagaccacaggaattcagatatggagtgaaatcttccttatcaataaacctgatggtaaaaaggttgcagtgttattgatggatactcagggaacctttgatagtcagtcaactttgagagattcagccacagtatttgcccttagcacaatgatcagctcaatacaggtatataacttatcccaaaatgtccaggaggatgatcttcagcacctccagcttttcactgagtatggcagactggcaatggaggaaacattcctgaagccatttcagagtctgatatttcttgttcgagactggagtttcccatacgaattttcatatggagccgatggtggtgccaaattcttggaaaaacgcctcaaggtctcagggaaccagcatgaagaactacagaacgtcagaaaacacatccattcctgtttcaccaacatttcctgttttctgctacctcatcctggcttaaaagtagctaccaatccaaactttgatggaaaattgaaagaaatagatgatgaattcatcaaaaacttgaaaatactgattccttggctacttagtcccgagagcctagatattaaagagatcaatgggaataaaatcacctgccggggtctggtggagtacttcaaggcttatataaagatctatcaaggtgaagaattaccacatcccaaatccatgttacaggccacagcagaagctaacaatttagcagccgtggcaactgccaaggacacatacaacaaaaaaatggaagagatttgtggtggtgacaaaccatttctggccccaaatgacttgcagaccaaacacctgcaacttaaggaagaatctgtgaagctattccgaggggtgaagaagatgggtggggaagaatttagccggcgttacctgcagcagttggagagtgaaatagatgaactttacatccaatatatcaagcacaatgatagcaaaaatatcttccatgcagctcgtaccccagccacactgtttgtagtcatctttatcacatatgtgattgctggtgtgactggattcattggtttggacatcatagctagcctatgcaatatgataatgggactgacccttatcaccctgtgcacttgggcatatatccggtactctggagaataccgagagctgggagctgtaatagaccaggtggctgcagctctgtgggaccaggctttgtacaagctttacagtgcagcagcaacccacagacatctgtatcatcaagctttccctacaccaaagtcggaatctactgaacaatcagaaaagaaaaaaatgtaatgcaaattttaagaaatacaggtgcatgaccaattgtcaattaaatattcagttttatgtctccatgcaaacattcaaagtgcttccatcagaacggagtaaaatactaaacacctctgaagactgcaaactggattagttcttttacttcagtgtttaataagcagatgtatgtatgcatggttatactattttgttaacatgtacaatttcctgatttttcttcaaaaatgctgttataaagtatttgtctatttatgataacagtacacgtgttctgcttgaatttactaaattctactactgggttataattaaatcatgtgatattccaaaaaaaaaaaaaaaaaaaaaaaaaaa

SEQ ID NO: 1190 - protein, 553 aa, Homo sapiens
MAKNRRDRNSWGGFSEKTYEWSSEEEEPVKKAGPVQVLIVKDDHSFELDETALNRILLSEAVRDKEVVAVSVAGAFRKGKSFLMDFMLRYMYNQESVDWVGDYNEPLTGFSWRGGSERETTGIQIWSEIFLINKPDGKKVAVLLMDTQGTFDSQSTLRDSATVFALSTMISSIQVYNLSQNVQEDDLQHLQLFTEYGRLAMEETFLKPFQSLIFLVRDWSFPYEFSYGADGGAKFLEKRLKVSGNQHEELQNVRKHIHSCFTNISCFLLPHPGLKVATNPNFDGKLKEIDDEFIKNLKILIPWLLSPESLDIKEINGNKITCRGLVEYFKAYIKIYQGEELPHPKSMLQATAEANNLAAVATAKDTYNKKMEEICGGDKPFLAPNDLQTKHLQLKEESVKLFRGVKKMGGEEFSRRYLQQLESEIDELYIQYIKHNDSKNIFHAARTPATLFVVIFITYVIAGVTGFIGLDIIASLCNMIMGLTLITLCTWAYIRYSGEYRELGAVIDQVAAALWDQALYKLYSAAATHRHLYHQAFPTPKSESTEQSEKKKM

SEQ ID NO: 1191 - DNA, 3031 bp, Homo sapiens
gtggtagcggttattcggcggcccgcggcggaccatggccctggccctggcccggcgtcgctgggctttcctcacggcgtccccgagcagcgtcgcagagcgggccgacttccgggaaggaactgaccagcgactgagcggcggccggcgcgcttagcgccctgaacatgcggcagtccctgcgggcgaccccgggctccggacaggcggcggcggaggcggcggctcgggagggaaggaggcggcggcgccggcggaggtggcggcggagacggccggcgcccggcgcggagccctagggaggcagttcagcgcggcctcgggcctcgtcgagaaggatgctgtcccgaaagaaaaccaaaaacgaagtgtccaagccggccgaggtgcaggggaagtacgtgaagaaggagacgtcgcctctgcttcggaatcttatgccttcattcatccggcatggtccaacaattccaagacgaactgatatctgtcttccagattcaagccctaatgccttttcaacttctggagatgtagtttcaagaaaccagagtttccttagaactccaattcaaagaacacctcatgaaataatgagaagagaaagcaacagattatctgcaccttcttatcttgccagaagtctagcagatgtccctagagagtatggttcttctcagtcatttgtaacggaagttagttttgctgttgaaaatggagactctggttcccgatattattattcagacaatttttttgatggtcagagaaagcggccacttggagatcgtgcacatgaagactacagatattatgaatacaaccatgatctcttccaaagaatgccacagaatcaggggaggcatgcttcaggtattgggagagttgctgctacatctttaggaaatttgactaaccatggttctgaagatttaccccttcctcctggctggtctgtggactggacaatgagagggagaaaatattatatagatcataacacaaatacaactcactggagccatcctcttgagcgagaaggacttcctcctggatgggaacgagttgagtcatccgaatttggaacctattatgtagatcacacaaataagaaggcccaatacaggcatccctgtgctcctagtgtacctcggtatgatcaaccacctcctgtcacataccagccacagcaaactgaaagaaatcagtcccttctggtacctgcaaatccatatcatactgcagaaattcctgactggcttcaggtttacgcacgagcccctgtgaaatatgaccacattctgaagtgggaactcttccagctggctgacctggatacataccagggaatgctaaagttgctcttcatgaaagaattggagcagattgttaaaatgtatgaagcatacagacaagcccttcttacagagttggaaaaccgaaagcagagacagcagtggtatgcccaacaacatggaaaaaatttttgagctgattttttaaaaatttaagttttgtaagagctttaaaatattttcacagataaaaaattgcaaacaagtactctggttaataaatgctgcttcctttgtggaaattataaaattctaactttacatgtattttgttattagaaattttcttttattgaatgagaaaaattagtctatcattttaagagccaatatggcaaacactttcaaatactgtatattaggaaactgttttggtattcttgatggaaaaaaacgcagcggaaatgtcattatgaacagatgttaaataggaaattattacttgttaacttcttacagcagtagtaccttctttaaaaaaaaaaaagaatctgcggtatttttttaaaaaaaaagtttaccgctgtagtgtgaaatattgtctggaaagggatggtttaaatattaccatgatgtagttgaaatataaaataggatttggaaccttattgtgataaatatttatatatgatgtatgtttgtctcccctctccaaagtaaggaacccagctgggcgtggtggctcactcctgtaatcccagcattttgggaggccgaggtgggtggaccgcttgagtccacgagtttaagaccagcctgggcaacatggtgaagccccatctctacaaaaaatacaaaaaaattagccgggtatgatggtgtgtgcctctagtcccagctacttgggaggctgaggtcagaggatggcttgagcccaagaggcagaggttgcagggtcaagatcgcaccacttgcactgcagcctgagagagagagagccagaccttgtctcaaaaaataaaaaataaaaaaataaaaacaaaataaggaatccttttaaagcatgttgagaaagtattttttggtatgaatgggtgacgggccttttaatctttcaggaatacatataagcaggaatacttagcctgtattgggaaggtgcgtgaaactcaaagttgctaacatcatcttccttattttcagccagtgctgttactgcatttagcatggctctgacgaggcagtggagagttcctgacagcatagcatactgccttctgacagactgggttaagctaccaaaaatgacaaccagggattcaaaaaaaatttttggtcattaaatcgaatgtatattattactttttaattttctaagtatttatcacaggactttaacaccatatatttccctcccagtttttctccccttttggtttaatagttaaaacatttttcataattagtgctgtacatttgattgcaaacaaattggtgatacttctaaactataactataaatctctagaattctgtgaatttcaacattatttgaagtagttcttcagttatatttacatgtgttgtaaatatgtaaatatacttttagcttaggaagtcttccagaatacaaactactcccagttagatatcagtgagtttgaataactgaagaaatgttgacaatgttaagtgtttgattttatataacaagcttattaaatatatttttgtgg

SEQ ID NO: 1192 - protein, 383 aa, Homo sapiens
MLSRKKTKNEVSKPAEVQGKYVKKETSPLLRNLMPSFIRHGPTIPRRTDICLPDSSPNAFSTSGDVVSRNQSFLRTPIQRTPHEIMRRESNRLSAPSYLARSLADVPREYGSSQSFVTEVSFAVENGDSGSRYYYSDNFFDGQRKRPLGDRAHEDYRYYEYNHDLFQRMPQNQGRHASGIGRVAATSLGNLTNHGSEDLPLPPGWSVDWTMRGRKYYIDHNTNTTHWSHPLEREGLPPGWERVESSEFGTYYVDHTNKKAQYRHPCAPSVPRYDQPPPVTYQPQQTERNQSLLVPANPYHTAEIPDWLQVYARAPVKYDHILKWELFQLADLDTYQGMLKLLFMKELEQIVKMYEAYRQALLTELENRKQRQQWYAQQHGKNF

SEQ ID NO: 1193 - DNA, 2356 bp, Homo sapiens
gatgtttcgcgaccaggtcggggtgctggcgggctggtttaagggctggaacgagtgcgagcagactgttgcgctgctgtcgctgctcaagcgcgtgagccagacccaggcccgcttcctccagctctgcctggagcactcgctggccgactgcgccgagctgcacgtcctcgaacgcgaggccaacagccccggaatcattaaccaatggcaacaggaatccaaggataaagtgatttccctcctgttaactcatctgcctttgctgaagccaggaaacctcgacgcgaaagtagaatatatgaaactgctgcccaaaatcctggctcactctattgaacacaaccagcacattgaggagagcaggcagctgctgtcctatgctttgatacatccagccacttcgttaaaagaccgtagtgctttagccatgtggctgaatcacttggaggaccgcacgtcgaccagctttggtggccagaaccgaggccgctcagactctgtggattatggacagacacactactatcaccaaagacagaactctgatgacaagctcaatgggtggcagaactctcgggattctgggatttgcatcaatgcctccaactggcaggacaaaagcatggggtgtgagaatggccatgtgcccctctactcctcctcatctgtccccaccacaatcaatacgattggaaccagcacaagtacaattctctcaggccaggcacaccacagccctttgaaacgatctgtgtcccttaccccacccatgaatgtgccaaaccagcctctaggacatggatggatgtctcatgaggacttacgagctagaggaccccagtgcctcccatccgatcatgcccccctgtctccacaaagcagtgtagcctcttcaggaagtggtgggagtgaacacttagaagatcagaccactgctcgtaacacattccaagaagaaggtagtgggatgaaagatgttccagcctggctgaaaagcctccgcctgcacaaatatgccgcgcttttctcccagatgacctatgaggagatgatggccctcaccgagtgccagctggaggcgcagaatgttaccaaaggtgcaagacacaaaattgtcatcagtattcagaagctcaaagaaagacaaaatctcctgaagtctttggaaagggacatcatcgaggggggcagcctgcgcatcccgctccaggaactgcaccagatgatcctgactccgatcaaggcctacagctccccgagcaccacccccgaggctcgccgccgggagccccaggccccgcgtcagccctcactgatgggccccgagagccagagccccgactgcaaagatggggccgcagccactggcgccacggccaccccctcggccggggccagcggggggctccagccgcaccagctgagcagctgcgatggggagctggccgtcgcccccctgccagagggggacctccccgggcagttcacacgcgtcatggggaaagtgtgcacacagctcttggtctccagacctgatgaggaaaatataagttcctatttacagctcatagacaagtgtctaattcatgaggcatttacagagacacagaaaaaaagattgttgtcatggaaacagcaggtgcagaagctctttcggtctttccctcggaaaacccttctagacatatcaggatatcgacagcaaagaaatcgaggctttgggcaatccaactccctcccgacggctggctctgtgggcggtggcatgggcagacggaacccgcgccagtaccagatcccctctcggaacgtcccttccgcccgcctgggcctcttgggcaccagtggattcgtcagctccaaccagcgcaacaccacagctacccccaccatcatgaaacaaggaagacagaacctgtggtttgccaaccccgggggcagcaatagcatgccaagccgcacccacagctcagtccagaggacccgctcgctgcccgtgcacacttccccacagaacatgctgatgttccagcagccagaattccagcttcccgtgaccgaacctgacatcaacaacaggctggagtcgttgtgcctcagtatgaccgaacacgccctgggagacggggttgaccggacctccaccatctagaagctgaagatgagagtgaccgcgctggccgtgaaatcgactgctgcgggtccagtgtccgccatcttcagggttgcacagaatcctccaagatactttgcagccttttttccccctggtccctctcccgttttgattttgtgagagcgtaggtcatcctcgtaaacatatcagtagacctggaaaaaaaaaaaaaaaaaa

SEQ ID NO: 1194 - protein, 717 aa, Homo sapiens
MFRDQVGVLAGWFKGWNECEQTVALLSLLKRVSQTQARFLQLCLEHSLADCAELHVLEREANSPGIINQWQQESKDKVISLLLTHLPLLKPGNLDAKVEYMKLLPKILAHSIEHNQHIEESRQLLSYALIHPATSLKDRSALAMWLNHLEDRTSTSFGGQNRGRSDSVDYGQTHYYHQRQNSDDKLNGWQNSRDSGICINASNWQDKSMGCENGHVPLYSSSSVPTTINTIGTSTSTILSGQAHHSPLKRSVSLTPPMNVPNQPLGHGWMSHEDLRARGPQCLPSDHAPLSPQSSVASSGSGGSEHLEDQTTARNTFQEEGSGMKDVPAWLKSLRLHKYAALFSQMTYEEMMALTECQLEAQNVTKGARHKIVISIQKLKERQNLLKSLERDIIEGGSLRIPLQELHQMILTPIKAYSSPSTTPEARRREPQAPRQPSLMGPESQSPDCKDGAAATGATATPSAGASGGLQPHQLSSCDGELAVAPLPEGDLPGQFTRVMGKVCTQLLVSRPDEENISSYLQLIDKCLIHEAFTETQKKRLLSWKQQVQKLFRSFPRKTLLDISGYRQQRNRGFGQSNSLPTAGSVGGGMGRRNPRQYQIPSRNVPSARLGLLGTSGFVSSNQRNTTATPTIMKQGRQNLWFANPGGSNSMPSRTHSSVQRTRSLPVHTSPQNMLMFQQPEFQLPVTEPDINNRLESLCLSMTEHALGDGVDRTSTI

SEQ ID NO: 1195 - DNA, 2941 bp, Homo sapiens
cctgtggccgctcccggctcggagtgtgatctaagcaggttgcgtaccttcctcaggtgactccggccacagcccattgtccgcggccaccggcggagtttagccgcagacctcgaagcgccccggggtccttcccgaacggcagcggctgcggcgggtccatggagaagggccctgtgcgggcaccggcggagaagccgcggggcgccaggtgcagcaatgggttccccgagcgggatccgccgcggcccgggcccagcaggccggcggagaagcccccgcggcccgaggccaagagcgcgcagcccgcggacggctggaagggcgagcggccccgcagcgaggaggataacgagctgaacctccctaacctggcagccgcctactcgtccatcctgagctcgctgggcgagaacccccagcggcaagggctgctcaagacgccctggagggcggcctcggccatgcagttcttcaccaagggctaccaggagaccatctcagatgtcctaaacgatgctatatttgatgaagatcatgatgagatggtgattgtgaaggacatagacatgttttccatgtgtgagcatcacttggttccatttgttggaaaggtccatattggttatcttcctaacaagcaagtccttggcctcagcaaacttgcgaggattgtagaaatctatagtagaagactacaagttcaggagcgccttacaaaacaaattgctgtagcaatcacggaagccttgcggcctgctggagtcggggtagtggttgaagcaacacacatgtgtatggtaatgcgaggtgtacagaaaatgaacagcaaaactgtgaccagcacaatgttgggtgtgttccgggaggatccaaagactcgggaagagttcctgactctcattaggagctgagcttcattcagtgtgtgtgcgttggttgccgatcgtactgccagtagcattgtctgtctgtccggtcttgtttgtacattccattttcaattgttacagatgtgaactttattccttgtcactaattatatttaaaattatttctaggaagtcaaataaatataataaagggttgagccctctactttcttcttgccacctttttgtggcaatattaaagtgaactgctaatagtgtaagtacgtgcacaaaaccactgccagataaccagaggggcctgggaagggagaagaattagtgtatttttttcaaatagtacagtaatttgcctcataagcataggagcattgggaatgagagggaactgtgcccagtatactgttttttttcttcctccaataaaagtggtgtagtgccgaaagtgctaaaatatttagtgcggtattgctctgtgaattcaagttcaacagacttcactttggtcatgtttattaaaccaccagtgacatttaaaaatatatttttagcagtcgtaatgttagtcaccaagggaaggtggtggaatgtctatgtttttgattttactgtgagttaaaaaggcacatttctaccttctattgtttttaaattcaagaatagggaattagttcctggtgttgtttacgagtgtattctcgtgtcaacatacagggatttagacatttaactctctgtgccttgataagaatatcatttagagtgtagatacttttgcctttttaaaaaagccattattttatgagacttagtactcacactgcaaataactagtcagctcagttttaactttataggtttattgagtttcctttgtgtgatccatgtagatgcctcaaaatgtttcttcttcttcttttttttaatcttataagatatttttctaagtatttccagaaacatttgagagtgcccatcattttcaggtctgcagaaccatagcttccacgcacctgaacgagcacagaatgaactgacggtggaagacattatgagctgtgtccaacgttttaaccaaagcgtatcgtaccaacgatctgtgaaaatgcactggaagcttctggtcccggtttcctttgtggtctatgtgggtcttgtcctcattgtaactccgtatagatggtataggtattttaatcctggaagctgttgccttattaatgattatcttaaaatttcctccattggggcagcgtgggccaaattaaaacaaacaaaaccgcaactcctccacagaaacacaaacacagttattccatgaagtttagtatttggttgacatagtgctcttcaaattcatcccattaccctaaaagtaataactttgatgcttgctttaactttagtcccatctctgccactttgatgctatttgggttatgatggggcaagatggcagaggtattgggtttttttgtttttttccattcctctctacttctgtttcctagctttttctttctggagtttaagtacagtgatggttggcttgagtacctttttaaatctagcccagtataaacattagcctgcttaatatttagacatttataggtagaattctgagcactcaactcatgtttggcattttaaagtaaaaacaagtgtgacttcgaggaccaaagaaattgtcagctatacatttatctttatgaactcatttatattcctttttaatgactcgttgttctaacatttcctagaagtgttcttataaaggtctaatgtatccacaggctgttgtcttattagtaaatgcaaagtaatgactttgtctgttttactctagtctttagtacttcaaaattaccttttcatatccatgatcttgagtccatttgggggatttttaagaatttgatgtatttcaatacactgttcaaaattaaattgtttaattttatgtatgagtatgtatgttcctgaagttggtcctatttaaattattaaactattgtaactttgttcttgtgaaaaaaaaaaaaaaaaaa

SEQ ID NO: 1196 - protein, 250 aa, Homo sapiens
MEKGPVRAPAEKPRGARCSNGFPERDPPRPGPSRPAEKPPRPEAKSAQPADGWKGERPRSEEDNELNLPNLAAAYSSILSSLGENPQRQGLLKTPWRAASAMQFFTKGYQETISDVLNDAIFDEDHDEMVIVKDIDMFSMCEHHLVPFVGKVHIGYLPNKQVLGLSKLARIVEIYSRRLQVQERLTKQIAVAITEALRPAGVGVVVEATHMCMVMRGVQKMNSKTVTSTMLGVFREDPKTREEFLTLIRS

SEQ ID NO: 1197 - DNA, 1995 bp, Homo sapiens
cctgtggccgctcccggctcggagtgtgatctaagcaggttgcgtaccttcctcaggtgactccggccacagcccattgtccgcggccaccggcggagtttagccgcagacctcgaagcgccccggggtccttcccgaacggcagcggctgcggcgggtccatggagaagggccctgtgcgggcaccggcggagaagccgcggggcgccaggtgcagcaatgggttccccgagcgggatccgccgcggcccgggcccagcaggccggcggagaagcccccgcggcccgaggccaagagcgcgcagcccgcggacggctggaagggcgagcggccccgcagcgaggaggataacgagctgaacctccctaacctggcagccgcctactcgtccatcctgagctcgctgggcgagaacccccagcggcaagggctgctcaagacgccctggagggcggcctcggccatgcagttcttcaccaagggctaccaggagaccatctcagatgtcctaaacgatgctatatttgatgaagatcatgatgagatggtgattgtgaaggacatagacatgttttccatgtgtgagcatcacttggttccatttgttggaaaggtccatattggttatcttcctaacaagcaagtccttggcctcagcaaacttgcgaggattgtagaaatctatagtagaagactacaagttcaggagcgccttacaaaacaaattgctgtagcaatcacggaagccttgcggcctgctggagtcggggtagtggttgaagcaacacacatgtgtatggtaatgcgaggtgtacagaaaatgaacagcaaaactgtgaccagcacaatgttgggtgtgttccgggaggatccaaagactcgggaagagttcctgactctcattaggagctgagcttcattcagtgtgtgtctgcagaaccatagcttccacgcacctgaacgagcacagaatgaactgacggtggaagacattatgagctgtgtccaacgttttaaccaaagcgtatcgtaccaacgatctgtgaaaatgcactggaagcttctggtcccggtttcctttgtggtctatgtgggtcttgtcctcattgtaactccgtatagatggtataggtattttaatcctggaagctgttgccttattaatgattatcttaaaatttcctccattggggcagcgtgggccaaattaaaacaaacaaaaccgcaactcctccacagaaacacaaacacagttattccatgaagtttagtatttggttgacatagtgctcttcaaattcatcccattaccctaaaagtaataactttgatgcttgctttaactttagtcccatctctgccactttgatgctatttgggttatgatggggcaagatggcagaggtattgggtttttttgtttttttccattcctctctacttctgtttcctagctttttctttctggagtttaagtacagtgatggttggcttgagtacctttttaaatctagcccagtataaacattagcctgcttaatatttagacatttataggtagaattctgagcactcaactcatgtttggcattttaaagtaaaaacaagtgtgacttcgaggaccaaagaaattgtcagctatacatttatctttatgaactcatttatattcctttttaatgactcgttgttctaacatttcctagaagtgttcttataaaggtctaatgtatccacaggctgttgtcttattagtaaatgcaaagtaatgactttgtctgttttactctagtctttagtacttcaaaattaccttttcatatccatgatcttgagtccatttgggggatttttaagaatttgatgtatttcaatacactgttcaaaattaaattgtttaattttatgtatgagtatgtatgttcctgaagttggtcctatttaaattattaaactattgtaactttgttcttgtgaaaaaaaaaaaaaaaaaa

SEQ ID NO: 1198 - protein, 250 aa, Homo sapiens; identical to SEQ ID NO: 1196

SEQ ID NO: 1199 - DNA, 1940 bp, Homo sapiens
cctgtggccgctcccggctcggagtgtgatctaagcaggttgcgtaccttcctcaggtgactccggccacagcccattgtccgcggccaccggcggagtttagccgcagacctcgaagcgccccggggtccttcccgaacggcagcggctgcggcgggtccatggagaagggccctgtgcgggcaccggcggagaagccgcggggcgccaggtgcagcaatgggttccccgagcgggatccgccgcggcccgggcccagcaggccggcggagaagcccccgcggcccgaggccaagagcgcgcagcccgcggacggctggaagggcgagcggccccgcagcgaggaggataacgagctgaacctccctaacctggcagccgcctactcgtccatcctgagctcgctgggcgagaacccccagcggcaagggctgctcaagacgccctggagggcggcctcggccatgcagttcttcaccaagggctaccaggagaccatctcagatgtcctaaacgatgctatatttgatgaagatcatgatgagatggtgattgtgaaggacatagacatgttttccatgtgtgagcatcacttggttccatttgttggaaaggtccatattggttatcttcctaacaagcaagtccttggcctcagcaaacttgcgaggattgtagaaatctatagtagaagactacaagttcaggagcgccttacaaaacaaattgctgtagcaatcacggaagccttgcggcctgctggagtcggggtagtggttgaagcaacgaagtcaaataaatataataaagggttgagccctctactttcttcttgccacctttttgtggcaatattaaagtgaactgctaatagtgtctgcagaaccatagcttccacgcacctgaacgagcacagaatgaactgacggtggaagacattatgagctgtgtccaacgttttaaccaaagcgtatcgtaccaacgatctgtgaaaatgcactggaagcttctggtcccggtttcctttgtggtctatgtgggtcttgtcctcattgtaactccgtatagatggtataggtattttaatcctggaagctgttgccttattaatgattatcttaaaatttcctccattggggcagcgtgggccaaattaaaacaaacaaaaccgcaactcctccacagaaacacaaacacagttattccatgaagtttagtatttggttgacatagtgctcttcaaattcatcccattaccctaaaagtaataactttgatgcttgctttaactttagtcccatctctgccactttgatgctatttgggttatgatggggcaagatggcagaggtattgggtttttttgtttttttccattcctctctacttctgtttcctagctttttctttctggagtttaagtacagtgatggttggcttgagtacctttttaaatctagcccagtataaacattagcctgcttaatatttagacatttataggtagaattctgagcactcaactcatgtttggcattttaaagtaaaaacaagtgtgacttcgaggaccaaagaaattgtcagctatacatttatctttatgaactcatttatattcctttttaatgactcgttgttctaacatttcctagaagtgttcttataaaggtctaatgtatccacaggctgttgtcttattagtaaatgcaaagtaatgactttgtctgttttactctagtctttagtacttcaaaattaccttttcatatccatgatcttgagtccatttgggggatttttaagaatttgatgtatttcaatacactgttcaaaattaaattgtttaattttatgtatgagtatgtatgttcctgaagttggtcctatttaaattattaaactattgtaactttgttcttgtgaaaaaaaaaaaaaaaaaa

SEQ ID NO: 1200 - protein, 233 aa, Homo sapiens
MEKGPVRAPAEKPRGARCSNGFPERDPPRPGPSRPAEKPPRPEAKSAQPADGWKGERPRSEEDNELNLPNLAAAYSSILSSLGENPQRQGLLKTPWRAASAMQFFTKGYQETISDVLNDAIFDEDHDEMVIVKDIDMFSMCEHHLVPFVGKVHIGYLPNKQVLGLSKLARIVEIYSRRLQVQERLTKQIAVAITEALRPAGVGVVVEATKSNKYNKGLSPLLSSCHLFVAILK

SEQ ID NO: 1201 - DNA, 1852 bp, Homo sapiens
cctgtggccgctcccggctcggagtgtgatctaagcaggttgcgtaccttcctcaggtgactccggccacagcccattgtccgcggccaccggcggagtttagccgcagacctcgaagcgccccggggtccttcccgaacggcagcggctgcggcgggtccatggagaagggccctgtgcgggcaccggcggagaagccgcggggcgccaggtgcagcaatgggttccccgagcgggatccgccgcggcccgggcccagcaggccggcggagaagcccccgcggcccgaggccaagagcgcgcagcccgcggacggctggaagggcgagcggccccgcagcgaggaggataacgagctgaacctccctaacctggcagccgcctactcgtccatcctgagctcgctgggcgagaacccccagcggcaagggctgctcaagacgccctggagggcggcctcggccatgcagttcttcaccaagggctaccaggagaccatctcagatgtcctaaacgatgctatatttgatgaagatcatgatgagatggtgattgtgaaggacatagacatgttttccatgtgtgagcatcacttggttccatttgttggaaaggtccatattggttatcttcctaacaagcaagtccttggcctcagcaaacttgcgaggattgtagaaatctatagtagaagactacaagttcaggagcgccttacaaaacaaattgctgtagcaatcacggaagccttgcggcctgctggagtcggggtagtggttgaagcaacgtctgcagaaccatagcttccacgcacctgaacgagcacagaatgaactgacggtggaagacattatgagctgtgtccaacgttttaaccaaagcgtatcgtaccaacgatctgtgaaaatgcactggaagcttctggtcccggtttcctttgtggtctatgtgggtcttgtcctcattgtaactccgtatagatggtataggtattttaatcctggaagctgttgccttattaatgattatcttaaaatttcctccattggggcagcgtgggccaaattaaaacaaacaaaaccgcaactcctccacagaaacacaaacacagttattccatgaagtttagtatttggttgacatagtgctcttcaaattcatcccattaccctaaaagtaataactttgatgcttgctttaactttagtcccatctctgccactttgatgctatttgggttatgatggggcaagatggcagaggtattgggtttttttgtttttttccattcctctctacttctgtttcctagctttttctttctggagtttaagtacagtgatggttggcttgagtacctttttaaatctagcccagtataaacattagcctgcttaatatttagacatttataggtagaattctgagcactcaactcatgtttggcattttaaagtaaaaacaagtgtgacttcgaggaccaaagaaattgtcagctatacatttatctttatgaactcatttatattcctttttaatgactcgttgttctaacatttcctagaagtgttcttataaaggtctaatgtatccacaggctgttgtcttattagtaaatgcaaagtaatgactttgtctgttttactctagtctttagtacttcaaaattaccttttcatatccatgatcttgagtccatttgggggatttttaagaatttgatgtatttcaatacactgttcaaaattaaattgtttaattttatgtatgagtatgtatgttcctgaagttggtcctatttaaattattaaactattgtaactttgttcttgtgaaaaaaaaaaaaaaaaaa

SEQ ID NO: 1202 - protein, 213 aa, Homo sapiens
MEKGPVRAPAEKPRGARCSNGFPERDPPRPGPSRPAEKPPRPEAKSAQPADGWKGERPRSEEDNELNLPNLAAAYSSILSSLGENPQRQGLLKTPWRAASAMQFFTKGYQETISDVLNDAIFDEDHDEMVIVKDIDMFSMCEHHLVPFVGKVHIGYLPNKQVLGLSKLARIVEIYSRRLQVQERLTKQIAVAITEALRPAGVGVVVEATSAEP

SEQ ID NO: 1203 - DNA, 8522 bp, Homo sapiens
acttccggcgtatgaggcggtgacaatgggagcagcgcgggcggcgccgggaggcagctgacaagcgtttgcggcttcgcttcatggccgctctcccgcccctcctgggatctgtggggagctggggagcccgcagcggcccggagccggagctggcgagccgagcggagacctgtgcgccgcgcctctgaggcgcagcatgtgaagcggagacggcatccagtggggggcgagcctctcagccggccgggatggctaccacggccgagctcttcgaggagccttttgtggcagatgaatatattgaacgtcttgtatggagaaccccaggaggaggctctagaggtggacctgaagcttttgatcctaaaagattattagaagaatttgtaaatcatattcaggaactccagataatggatgaaaggattcagaggaaagtagagaaactagagcaacaatgtcagaaagaagccaaggaatttgccaagaaggtacaagagctgcagaaaagcaatcaggttgccttccaacatttccaagaactagatgagcacattagctatgtagcaactaaagtctgtcaccttggagaccagttagagggggtaaacacacccagacaacgggcagtggaggctcagaaattgatgaaatactttaatgagtttctagatggagaattgaaatctgatgtttttacaaattctgaaaagataaaggaagcagcagacatcattcagaagttgcacctaattgcccaagagttaccttttgatagattttcagaagttaaatccaaaattgcaagtaaataccatgatttagaatgccagctgattcaggagtttaccagtgctcaaagaagaggtgaaatctccagaatgagagaagtagcagcagttttacttcattttaagggttattcccattgtgttgatgtttatataaagcagtgccaggagggtgcttatttgagaaatgatatatttgaagacgctggaatactctgtcaaagagtgaacaaacaagttggagatatcttcagtaatccagaaacagtcctggctaaacttattcaaaatgtatttgaaatcaaactacagagttttgtgaaagagcagttagaagaatgtaggaagtccgatgcagagcaatatctcaaaaatctctatgatctgtatacaagaaccaccaatctttccagcaagctgatggagtttaatttaggtactgataaacagactttcttgtctaagcttatcaaatccattttcatttcctatttggagaactatattgaggtggagactggatatttgaaaagcagaagtgctatgatcctacagcgctattatgattcgaaaaaccatcaaaagagatccattggcacaggaggtattcaagatttgaaggaaagaattagacagcgtaccaacttaccacttgggccaagtatcgatactcatggggagacttttctatcccaagaagtggtggttaatcttttacaagaaaccaaacaagcctttgaaagatgtcataggctctctgatccttctgacttaccaaggaatgccttcagaatttttaccattcttgtggaatttttatgtattgagcatattgattatgctttggaaacaggacttgctggaattccctcttcagattctaggaatgcaaatctttattttttggacgttgtgcaacaggccaatactatttttcatctttttgacaaacagtttaatgatcaccttatgccactaataagctcttctcctaagttatctgaatgccttcagaagaaaaaagaaataattgaacaaatggagatgaaattggatactggcattgataggacattaaattgtatgattggacagatgaagcatattttggctgcagaacagaagaaaacagattttaagccagaagatgaaaacaatgttttgattcaatatactaatgcctgtgtaaaagtctgtgcttacgtaagaaaacaagtggagaagattaaaaattccatggatgggaagaatgtggatacagttttgatggaacttggagtacgttttcatcgacttatctatgagcatcttcaacaatattcctacagttgtatgggtggcatgttggccatttgtgatgtagccgaatataggaagtgtgccaaagacttcaagattccaatggtattacatctttttgatactctgcatgctctttgcaatcttctggtagttgccccagataatttaaagcaagtctgctcaggagaacaacttgctaatctggacaagaatatacttcactccttcgtacaacttcgtgctgattatagatctgcccgccttgctcgacacttcagctgagattgaatttacaaaggaattcagtgtcagttcctttacagaggaatgtcttatacttcagcagccctcggttgatagaaagcacaggagataccttatgacacagccaacattttgtgaaacaatgactggaacaaaacagcagccatacttacctttgaggttttatttaaagtttggataccactagctatattttgcttttttcccctcacattgaattttaattccattcttgaatgtagaaatttcagattctctaaaactacatgtcactgtttttatcctagaaaatgttgctgtcagaaggcaaaggaaatgttaccagtgttttcggttcttgtacttttaacatattccatttagaaattttgccattctgttttccattaataataggtgaaatacaggaaaactacatttgttattcctcagtttttaatgaccttttcagcatcaattgttaatcagattattttaggttttcgtaaataatttttttgcctctttcaaaaggttaacaattaagcatactttctgcagttggttgattggatttttttctgaggtacagcattaatactagtccaaaaaatgtcataaactgaactaaaatgatgaactattttatgtagacattaggagtggatcggaatacttctgctttctgggtaaaacttaaaagtttactatttcttatttggtaaatagattttaagccaattctagtaagaaattaataaaactaccttattttgtatttcacttaaggtggaggaccttaactaaaggaccatatttattcattattttaatattataagggaagtaaaaaaaagtgaggtatagtctaaatggtgcatataggaaatactgacagtgtttagcaacatgcagccctttgagatttctgtcgtaatgctaaacttgaataagatggaatggctgaacatgtggttagtcttttattttaagaagaattgagaattgatagatttggagatgagctttgcaaaggctgtttgcttttcatgtctataggtctgtcattgtcctttttcaaagcatttctgaagttattcctacttggatatagttaatggaattggcttaatttgatgacataataaatcacttataaaattttaaatatcaagtgaaaatttagaaaggccattactattctataaaccttataaacttgctctgggagaatgcattctaaattatatatagtgtttcagctcccattgtggtgttcatagtcttctaggaacagataaacttaagtattcaattcactcttggcattttttctttaatataggctttttagcctatttttggaaaactgcttttcttctgagaaccttattctgaatgtcatcaactttaccaaaccttctaagtccagagctaacttagtactgtttaagttactattgactgaattttcttcattttctgtttagtccagtgttaccaaggtaagctggggaatgaagtataccaacttctttcagagcattttaggacattatggcagctttagaaggctgtcttgtttctagccaagggagagccagcgcaggttttggatactagagaaagtcatttgcttgtactattgccattttagaaagctctgatgtgaattcaaattttacctctgttacttaaagccaacaattttaaggcagtagttttactggccatttaagctctttgtacagtgtcaatttgtaaaaaagaaaaaacgaaaaaaaatctcaaataaaacatgagataacattttaagacttccaaatcagagaagtgcttcaaattattttgtttggattaatttttaaaatgtaaagcatatacttgttgcttagttattttgtttattattttcatgtttgagttctgtgcaatattttctattatgtccgttgataggacagtgacaaaattcgtaagtgaatacttaatttaaaagtgttaacattaatgctcaataaacaaattccctgcagttgttttttttatttcactctttttatattttagagccatccatcctgaattttataaatgattttttatttaaaaatttgagatttttaaaatttttcacagcacaggtcttctcattttcttttttagcaaaaaatacttgactatataaacaagactagaaatttatcctaaacagatggtctttctctgagggaaaaaaaaaaatgtgtcatgtgaggcaatatgcattctttgtattctgattttttaagtgttttcatatttatagccatcacaaaattttgcccaaagtgtatggctcagaagagatgatcaataactaaaatgtttttcgttttgcacatggtaaaattttaggtagagagtggagctttgtataattggtaactttaaccaacatttacgtaagtacggtctttgcagtattacacaataccgcatgagctaatatgcagtatttaggtaatgcattgaatgaagttgaaaatatgctcttaacacactgtgcattgtttttctaaaattgagaaatatctgaaatacagaatacgaatttaataaaggaagcctaccttatgtaaattatgatgttgaaaatgacagtcaaccagagtagatgaagtgtccttatgaagaattattaaatagtagctggatggatctttagatggatgaccacctgaccattccaggacaatttttggtcccattttgaggattgccatagttgcaagtccttaggatcttccttgttttaaaaaactatcaaagtaggttaaattaaaatctaatttaaattaggttaatttatattacattgtagatcattcttttttcccccctctttcacttctaaatattttgctttctaaatactagccttctggttcacagtgaaataatttaattatcaatcagtagattgattccaagtggagaattcactgcttccctaaaatgcgtttttcttacctgtaatggtgaatatttacaaggatctggataaagagattttgatttttgaaatgccacaaaaccccttaaagtggtcaagtacctaaggtagtggctaaggcatgcttgaactgtgtttgagagacagcagttcagtcagtacataatttgttggtgactaacaaagctcacatctgggagattaactttttttaacgcaaaaatattctgcacattacccatatattgttgaattttacatacaaagcattttgtgctttcattcaattagtttaactatattcagtttctgtattatttctctctgatctatcctgtaattattctatactttagaagaaaagatcagttcatattgttagactgaataattctacatgaagttaaaagttagcaatttaaaaaattttgctgcataataaagataattatagttacatgtattgatttaagtctcacacactgtgctaataagtcctttgcacatattattggattctagagcaaccctaggatttgggtactattatttccatttgacagatgaaaaacctaatgcatagaaagataagtagaccagtcaaggtctacagctagtaaaatgctcagattgaaacctaaatcttttctcactcacttttaggttctatatgctattctccttacgtaacgttaaatagatcctttagtttgataggttcattagttttgcttaatcgttgcttccaatatgattcttattgtagtatttatattacaaagttggcatacagggtcaatatctaatttactgttgtgtttttcttaatatgttcaatgtatggtcatactttttaaatttgattttttaaatattataagtggtcatgaaattttaatgttaagtttgtacctaatagaaatatgtctatcacaaatctttattggtattattttatatacttttccagcttgataattttcacaatagaaagagaccaaatattttgtactatattttgtgacatagaagtaaatgacaactctaccttggaagatatgaagaaatcagtgtttttatgttcaaaaactattttaaatgtcataggcttgccaattgtgttaactatttagtacattggtagtttttaaatgactaatgctggagtgaaaatgtaaggcaaaatatttagtatattaacagtagatagtcattttcatgtaatcagaattgcatgttaagggttttaaaagctgtcataactcttaccttttatttctaccagtgatcaatcatttctctttacaaatttagggaggaaacaactgttcaaatgtataggggacagaaacctgacatttagagaacagaaattttaattgccaaattaaagcagctaggctgcccctgggcttaacaaaattcctatttttgaactagacccgaggtattttatcattattatttgataggtaccattaacctttgttttgtgattatcgacttttggggggaaagatgagtaattaaacacactcgcccattttctaagtggtttagaaggttgcagtctgcctcaccatacaaagccagtttaaataggaatatatcacatcatacttcacatagcagtcaacctcagaggaaagtcatttattcagaaggcatagattttgctagacagcagtgatgcattacaaatatataattatttgcactaatatttgagcaggtggaatggattagaacatggtcaacatcatgctgctgataacatgtatttttctatattaatatgtactgtgcaacatgtattaaaattgtcaataattcattttagccaagatactaatatttatattactgtgtttaagagacagtatccaactgagccacttttaatttaaaagtctgaaactggaattaagtttactttcaaaaatcacttaaattactttataatcagtgaaaggtcagtaaaatgtagaattataagtgcctagtgacttaataggaggaaatatggagggttaaggaaggaagtaggaacctggaataagaaagctaagtttcatttatagttccaatgagtgactttctttgttttcaccactgggaatcttaaatgaagaaagtgtcgtatcccttccagttatctttatgttaataaactaagtgaagtttggatagaactaacaaaggaattagtctccattggtggacttccagagttttgagattaaactttgagaggtgagaagccttcctgatgcccctgtaatcttaaattggcaggtgcctctaagtgaggccatccctctttgcctgcctatcattttaatctttatactgtaactggttcctttcaactctggccttttattgtagcacttttatcaagtctgcagcttcccagctacttgggaggctgaggtgggaagaacacttgaagctaggagttcaagaccactctgggcaacatagtgagtccctgtttttagaaaaataaataacctttaggtttttgctatagaaaatatccaaatagagtctggacaatgctggatgtaaagaaaactgtgaagctacctctaagcatattgtttgtgaatactgtgtaccatttagaggataacatgggggattcacatgaagttatgtgaaaatattttataaggaataatacctaagtgcctctcttaagttctccagtagaatgtattttcaatttttgccacaagggggagaagttatttttatagtaatatgtacatttttttattttaaaaatagaattcacacaactttacagcatctatgaacattttgctatcccaattatgtgtgtgtgtgcatgtgtgtaaacaagattctgaaagtcttgcatgagaaaaatttcaaaggaaattaataacaaaaccaaaacagttttgaagaacatgtgcacagtggacacaggaattgaacaaagtttaccatgattaacattatgttttcttagttatatatcacattgaattcctttatcaactctaataagaatctactgattagtgttctacattctgctttttaaagaaaaatttttgaaacaatcagacttaacagaagggttgtaaatactgtacaaataaaatttttcccttttgagaataaaaaaaaaaaaa

SEQ ID NO: 1204 - protein, 708 aa, Homo sapiens
MATTAELFEEPFVADEYIERLVWRTPGGGSRGGPEAFDPKRLLEEFVNHIQELQIMDERIQRKVEKLEQQCQKEAKEFAKKVQELQKSNQVAFQHFQELDEHISYVATKVCHLGDQLEGVNTPRQRAVEAQKLMKYFNEFLDGELKSDVFTNSEKIKEAADIIQKLHLIAQELPFDRFSEVKSKIASKYHDLECQLIQEFTSAQRRGEISRMREVAAVLLHFKGYSHCVDVYIKQCQEGAYLRNDIFEDAGILCQRVNKQVGDIFSNPETVLAKLIQNVFEIKLQSFVKEQLEECRKSDAEQYLKNLYDLYTRTTNLSSKLMEFNLGTDKQTFLSKLIKSIFISYLENYIEVETGYLKSRSAMILQRYYDSKNHQKRSIGTGGIQDLKERIRQRTNLPLGPSIDTHGETFLSQEVVVNLLQETKQAFERCHRLSDPSDLPRNAFRIFTILVEFLCIEHIDYALETGLAGIPSSDSRNANLYFLDVVQQANTIFHLFDKQFNDHLMPLISSSPKLSECLQKKKEIIEQMEMKLDTGIDRTLNCMIGQMKHILAAEQKKTDFKPEDENNVLIQYTNACVKVCAYVRKQVEKIKNSMDGKNVDTVLMELGVRFHRLIYEHLQQYSYSCMGGMLAICDVAEYRKCAKDFKIPMVLHLFDTLHALCNLLVVAPDNLKQVCSGEQLANLDKNILHSFVQLRADYRSARLARHFS

SEQ ID NO: 1205 - DNA, 3088 bp, Homo sapiens
cgcgccagggaggttgtcgggaggggccggcgaataaaacgagcggcgaaagaaccgaaaaaaggctcgacgctaccgtgtatgaggaactttgatccttgcgggccaccattccggaagtagaatttagaggaagaaaataccggagttgcagggtataggtaaatttctcaaggttataggttggggttcttagaactttttgtggtgtgtgttggcctagagcgactcagaagcgttagtgacttcacctaaaaaagctaacctctctgctgagcgcgaccggtatgcggcgcaggatgagcctcagggcttctgttaagagtctgtctgagaaagccggtctgcgctgttcctcggtggcgaccttaattatgagatgagctaatgctttactgacttaaccatggcgcagcgggcagtgtggctcataagccacgaaccgggaactccactttgtggcaccgtgagattctccagacggtatccaactgttgaaaaacgagccagagtcttcaatggagcaagttatgtgcctgttcctgaagatggtccctttcttaaagcactgctctttgaacttagattattggatgatgataaagacttcgttgagagtcgtgatagctgttcacgcatcaataaaacatccatttatggactcctgataggaggtgaagaactctggccagttgttgcttttctgaagaatgacatgatatatgcttgtgttccactagttgaacaaactctgtcccctcgtccgccactaattagtgtcagtggagtttcacaaggctttgaatttctttttgggatacaggattttctttattcaggtcaaaaaaatgactctgagctgaatacaaaattgagccagttgcctgacttgcttctgcaggcttgtccatttggtactttattagatgccaacttacagaattcattagataataccaattttgcatctgtgactcagccacagaaacagccagcttggaaaactgggacgtacaaaggaaaaccacaagtttctatttctatcactgaaaaggtaaaatccatgcaatatgataaacagggtatagcagatacatggcaagttgttggaacagtgacttgcaagtgtgatttggaaggaatcatgccaaatgttaccatcagcttgagtctccccaccaatggatctccacttcaggatattctagttcacccttgtgtaacttctcttgactctgcaattctgacttctagtagtattgatgcaatggatgactctgcatttagtgggccttacaaatttccattcactccacctttagagtcattcaacttatgcttctacacttcccaggtccctgccccaccaattttgggtttttatcaaatgaaggaggaagaagtacaactaagaataaccattaatttaaaacttcatgaaagtgtgaaaaataattttgaattctgtgaagcccatatacctttttacaatagaggtccaattacacatttggaatacaaaactagttttggccagcttgaagtatttcgagagaaaagcttattgatctggattattggccagaagttcccaaaatcaatggaaattagtctttctggaactgtaacttttggagccaagagccatgagaagcagccatttgacccaatttgtactggagaaacagcatatttaaagcttcattttaggatcttagattacacacttactggatgttatgcagatcagcattcagttcaagtttttgcatcaggaaaaccaaaaataagtgcacaccggaaactaatttcttctgattattacatctggaattctaaagcccctgctccagtaacatatggatcattattattgtaatagtctcatgtttaaatgggattatataatgataacagtttaaagaaaatcataatcttatatttttaatgtggatgcatataacctgtgagtgaaaaatcactgaatgatttaattgtaaaagtagtcttatgtggtgtttgtagtctgatagagcttgaaaggacattttaaaagctaatgtctccaattttgtcaaccttcgattttatgccagtataattcagaacatagaaaagtaatgattcacttgggctcattttagactggtcctgggtcaccctgccacacttgtttcctagtgtttctgtggcagacattgctaatcaattacagcccttttctgtactgagccttggataaagggtcaggctcctttttagttcagagattcaggcagccactcccagtgggttgtagataatgtgcaagataaaaactattttctcttccaaatctaagtactaagctcctagtataaggtgttgttacagaataccagagaccatgttagagacaactacatctcttcaaaaaacagccaacagagacaaaggaaaagtgtttaaatagtaagctgttcttcttaatcagaactatcctattgactaataaataatctgcataattctacttaaggtgtgtaatctctgttctagagttagtttttaagtaagcttgttaatctgccactttgacattttgcttaggatgtcagtagccatattaagatgtgtagaataccttcagaagatgatcatagtgttttgtaatcatttaatgtctgcagccaaatttttaaaggtaatttagacctaatactgctcttgctgtgtcttattaagttaaaattaatgaatgaattctggtaaaaattcaaaaggcactctgtgagtagagagtatcatttaagcttattttagtcacatgtagtatatatctccttaaagctgtcactctcactttcttaccattctcttgatttcttcagaaaccatctagtcatcatctttatactctacctgcttctgcaattatatatcatattatgttttcagagcagttcattgtcaagttggactttaagtgaccattcaagaaaagatgaaatctcacgaacctcaaaacttcattcatgtctttttacaaatgagaaaaaaaaatgcattaaagattaatactcaatttgaaaaaaaaaaaaaaaaaaaa

SEQ ID NO: 1206 - protein, 490 aa, Homo sapiens
MAQRAVWLISHEPGTPLCGTVRFSRRYPTVEKRARVFNGASYVPVPEDGPFLKALLFELRLLDDDKDFVESRDSCSRINKTSIYGLLIGGEELWPVVAFLKNDMIYACVPLVEQTLSPRPPLISVSGVSQGFEFLFGIQDFLYSGQKNDSELNTKLSQLPDLLLQACPFGTLLDANLQNSLDNTNFASVTQPQKQPAWKTGTYKGKPQVSISITEKVKSMQYDKQGIADTWQVVGTVTCKCDLEGIMPNVTISLSLPTNGSPLQDILVHPCVTSLDSAILTSSSIDAMDDSAFSGPYKFPFTPPLESFNLCFYTSQVPAPPILGFYQMKEEEVQLRITINLKLHESVKNNFEFCEAHIPFYNRGPITHLEYKTSFGQLEVFREKSLLIWIIGQKFPKSMEISLSGTVTFGAKSHEKQPFDPICTGETAYLKLHFRILDYTLTGCYADQHSVQVFASGKPKISAHRKLISSDYYIWNSKAPAPVTYGSLLL

SEQ ID NO: 1207 - DNA, 3082 bp, Homo sapiens
gcccgcgccgccgctgcctctgtcctccgcgcgctgctcagctgaaggcgcacaggattcaattactggacttgtcaactctgccagtgtacgtgccatttctcttccactatgagaggaccgattgtattgcacatttgtctggctttctgtagccttctgcttttcagcgttgccacacaatgtctggccttccccaaaatagaaaggaggagggagatagcacatgttcatgcggaaaaagggcagtccgataagatgaacaccgatgacctagaaaatagctctgttacctcaaagcagactccccaactggtggtctctgaagatccaatgatgatgtcagcagtaccatcggcaacatcattaaataaagcattctcgattaacaaagaaacccagcctggacaagctgggctcatgcaaacagaacgccctggtgtttccacacctactgagtcaggtgtcccctcagctgaagaagtatttggttccagccagccagagagaatatctcctgaaagtggacttgccaaggccatgttaaccattgctatcactgcgactccttctctgactgttgatgaaaaggaggaactccttacaagcactaactttcagcccattgtagaagagatcacagaaaccacaaaaggttttctgaagtatatggataatcaatcatttgcaactgaaagtcaggaaggagttggtttgggacattcaccttcatcctatgtgaatactaaggaaatgctaaccaccaatccaaagactgagaaatttgaagcagacacagaccacaggacaacttcttttcctggtgctgagtccacagcaggcagtgagcctggaagcctcacccctgataaggagaagccttcgcagatgacagctgataacacccaggctgctgccaccaagcaaccactcgaaacttccgagtacaccctgagtgttgagccagaaactgatagtctgctgggagccccagaagtcacagtgagtgtcagcacagctgttccagctgcctctgccttaagtgatgagtgggatgacaccaaattagagagtgtaagccggataaggacccccaagcttggagacaatgaagagactcaggtgagaacggagatgtctcagacagcacaagtaagccatgagggtatggaaggaggccagccttggacagaggctgcacaggtggctctggggctgcctgaaggggaaacacacacgggcacagccctgctaatagcgcatgggaatgagagatcacctgctttcactgatcaaagttcctttacccccacaagtctgatggaagacatgaaagtttccattgtgaacttgctccaaagtacgggagacttcacggaatccaccaaggaaaacgatgccctgtttttcttagaaaccactgtttctgtctctgtatatgagtctgaggcagaccaactgttgggaaatacaatgaaagacatcatcactcaagagatgacaacagctgttcaagagccagatgccactttatccatggtgacacaagagcaggttgctaccctcgagcttatcagagacagtggcaagactgaggaagaaaaggaggacccctctcctgtgtctgacgttcctggtgttactcagctgtcaagaagatgggagcctctggccactacaatttcaactacagtcgtccctttgtcttttgaagttactcccactgtggaagaacaaatggacacagtcacagggccaaatgaggagttcacaccagttctgggatctccagtgacacctcctggaataatggtgggggaacccagcatttcccctgcacttcctgctttggaggcatcctctgagagaagaactgttgttccatctattactcgtgttaatacagctgcctcatatggcctggaccaacttgaatctgaagagggacaagaagatgaggatgaagaggatgaagaagatgaagatgaagaagaggaagatgaggaagaagatgaggaagataaagatgcagactcgctggatgagggcttggatggtgacactgagctgccaggttttaccctccctggtatcacatcccaggaaccaggcttagaggagggaaacatggacctgttggagggagctacctaccaggtgccagatgccctcgagtgggaacagcagaatcaaggcctggtgagaagctggatggaaaaattaaaagacaaggctggttacatgtctgggatgctggtgcctgtaggggttgggatagctggagccttgttcatcttgggagccctctacagcattaaggttatgaatcgccgaaggagaaatggcttcaaaaggcataaaagaaagcagagagaattcaacagcatgcaagatcgagtaatgctcttagccgacagctctgaagatgaattttgaattggactgggttttaattgggatattcaacgatgctactattctaatttttattttggagcagaaaaaaaaaaagaacaacctgccacattgctgctatcaggccgttagtcctagtgtctgctgggtgctgggtagtagatttttcttgtactgagcagaaatggcatgttgtatactaaacgtatcatgcagtatttggttttattctgtagtgaattttccacaaccgtgggctacaactcataaatatgcaacatatatgtttttcagtaggagttgctacattaggcagagtaaatattttgtagttttccacagtgtcttttccttggtttgaattacctgcattgagaataatgattgttgccaccaaggcatgcttgactctgagatataaatcttaacaaagaataacttctcaagatatactctacctacttgaaaccacagggttgtgggccatggtacatactgcatttgcatcaaactagcagtaactcagaatgaaatcattttcattaagaagctctctcagcatattaggattatatgtagatttgtatgtattttgcattatgtacttcagtctcctagttttattattctcaccttccgttttattcttggcgaggaaaaaaatgca

SEQ ID NO: 1208 - protein, 774 aa, Homo sapiens
MRGPIVLHICLAFCSLLLFSVATQCLAFPKIERRREIAHVHAEKGQSDKMNTDDLENSSVTSKQTPQLVVSEDPMMMSAVPSATSLNKAFSINKETQPGQAGLMQTERPGVSTPTESGVPSAEEVFGSSQPERISPESGLAKAMLTIAITATPSLTVDEKEELLTSTNFQPIVEEITETTKGFLKYMDNQSFATESQEGVGLGHSPSSYVNTKEMLTTNPKTEKFEADTDHRTTSFPGAESTAGSEPGSLTPDKEKPSQMTADNTQAAATKQPLETSEYTLSVEPETDSLLGAPEVTVSVSTAVPAASALSDEWDDTKLESVSRIRTPKLGDNEETQVRTEMSQTAQVSHEGMEGGQPWTEAAQVALGLPEGETHTGTALLIAHGNERSPAFTDQSSFTPTSLMEDMKVSIVNLLQSTGDFTESTKENDALFFLETTVSVSVYESEADQLLGNTMKDIITQEMTTAVQEPDATLSMVTQEQVATLELIRDSGKTEEEKEDPSPVSDVPGVTQLSRRWEPLATTISTTVVPLSFEVTPTVEEQMDTVTGPNEEFTPVLGSPVTPPGIMVGEPSISPALPALEASSERRTVVPSITRVNTAASYGLDQLESEEGQEDEDEEDEEDEDEEEEDEEEDEEDKDADSLDEGLDGDTELPGFTLPGITSQEPGLEEGNMDLLEGATYQVPDALEWEQQNQGLVRSWMEKLKDKAGYMSGMLVPVGVGIAGALFILGALYSIKVMNRRRRNGFKRHKRKQREFNSMQDRVMLLADSSEDEF

SEQ ID NO: 1209 - DNA, 2451 bp, Homo sapiens
gtcgccgacgcccgagcgccggagccccggccccgccccgcgagcgccgagacttgttggccgcggagactgcgaccctcttctctcagtctgccttactaccatgccgctctacgagggcctggggagcggcggggagaagacggcggtcgtgatcgacctgggagaggcctttaccaagtgtggatttgctggagaaactggtccaagatgtataattcctagtgtgataaaaagagctgggatgcctaagcctgtcagagttgttcagtataatatcaatacagaagaattatattcctacctaaaggaattcatccacatactatatttcaggcatctattggtgaatcccagagaccgccgagttgtgattatcgaatcggtattatgtccttctcacttcagagagacactcactcgtgttcttttcaaatattttgaggttccatctgtcttgcttgctccaagtcatctaatggctcttctgacgcttggaattaattctgccatggtcctagattgtggatatagggaaagcctggtgttacccatatatgaaggaatcccagttctaaattgttggggagcactacccctaggaggaaaagctcttcacaaagagttggaaactcaactattggaacaatgtactgttgacacaagtgttgctaaagaacagagccttccctcagtgatgggttcagttccggaaggtgtcttagaggacattaaagcgcgtacttgctttgtaagtgatctgaagcgaggactaaaaatccaagcagcaaaatttaatattgatgggaataatgagcgtccctccccacccccaaatgttgactatccattagatggagagaagattttacatatccttggatcaatcagagattcagttgtggaaattctttttgaacaagataatgaagagcaatcagttgccactttaatattggattcccttatacagtgtccgatagacaccaggaagcaactagcagagaatttggtagtcataggtggcacttctatgttgccaggatttctccacagattgcttgcagaaataaggtatttggtagaaaaaccaaaatataaaaaagcacttggcactaagacatttcgaattcatactccacctgcaaaagctaattgtgtggcctggttgggaggggctatttttggagcattacaagatatacttgggagccgttctgtttcaaaggaatattataatcagacgggccgtatacctgattggtgttctctcaataacccacctttggaaatgatgtttgatgtcgggaaaactcaaccacctctgatgaagagagcattttccactgagaaatagaagtttgattaaaaatcaaccttgcttcatatcaaatatttaaccaattataagcaaattgtacaaagtatgtaggatgttttgttatagaggactatagtggaagtgaaagcattctgtgtttactctttgcattaatatataattcttttgactttgtttctcttgtgtagtggtaaaatggtagctggtgcttattgagatttgctgtatttatatcaataaagtatagtaaagcagtttgattttggaagtttgttatgtggctttttttttttttttttttttgagacggagtctcgctctgtcacttaggctggagtgcagtggcacaatctctactcattgcaagctccgcctcccgggtttacgccattctgtctcagcctcctgagtagctgggactataggcatacgccaccccgcccggctaattttttgtatatttagtagagacggggtttcaccatgttagccaggatggtctcaatttcctgacctcgtgatccaccctcctcggcctcccaaagtgttgggattacaggcgtgaaccactgtaccagcctatgttgcttgtctttcaaaaagaacagtatttctccacagttcacataacctgttctgggctcattaattgtgtttccagcagttactccatttaaagcataaatagtgttaaccattaccagttatttcaaatactaacatgggtccatttaaaaaaaatatttattttggtacttgggtgtccatattataataatgttgtttttccagaaatatatttgatctttggactgagaatgtttggtaacatagtcaagcatttgttaagccaagtgtggaaatgttcactttttaactttacagtttttttaatgagcaattctacatttctaagaaaaaagatacttcatttttatataaggttacaactgctttataaaaatgtattcacaatgtcattaatctttgcgtttgtgctttatatcttctcagggcagaggttcttgaaatatgtactcaatcatttaacttttattttattttttcatttgtttttaatgaactacctcttgttgaaaaaaaaaaaa

SEQ ID NO: 1210 - protein, 417 aa, Homo sapiens
MPLYEGLGSGGEKTAVVIDLGEAFTKCGFAGETGPRCIIPSVIKRAGMPKPVRVVQYNINTEELYSYLKEFIHILYFRHLLVNPRDRRVVIIESVLCPSHFRETLTRVLFKYFEVPSVLLAPSHLMALLTLGINSAMVLDCGYRESLVLPIYEGIPVLNCWGALPLGGKALHKELETQLLEQCTVDTSVAKEQSLPSVMGSVPEGVLEDIKARTCFVSDLKRGLKIQAAKFNIDGNNERPSPPPNVDYPLDGEKILHILGSIRDSVVEILFEQDNEEQSVATLILDSLIQCPIDTRKQLAENLVVIGGTSMLPGFLHRLLAEIRYLVEKPKYKKALGTKTFRIHTPPAKANCVAWLGGAIFGALQDILGSRSVSKEYYNQTGRIPDWCSLNNPPLEMMFDVGKTQPPLMKRAFSTEK

SEQ ID NO: 1211 - DNA, 949 bp, Homo sapiens
gcgctccgggcctggaatccctacgcgtccctttgggtttagcacgatgagctcaatcggcactgggtatgacctgtcagcctctacattctctcctgacggaagagtttttcaagttgaatatgctatgaaggctgtggaaaatagtagtacagctattggaatcagatgcaaagatggtgttgtctttggggtagaaaaattagtcctttctaaactttatgaagaaggttccaacaaaagactttttaatgttgatcggcatgttggaatggcagtagcaggtttgttggcagatgctcgttctttagcagacatagcaagagaagaagcttccaacttcagatctaactttggctacaacattccactaaaacatcttgcagacagagtggccatgtatgtgcatgcatatacactctacagtgctgttagaccttttggctgcagtttcatgttagggtcttacagtgtgaatgacggtgcgcaactctacatgattgacccatcaggtgtttcatacggttattggggctgtgccatcggcaaagccaggcaagctgcaaagacggaaatagagaagcttcagatgaaagaaatgacctgccgtgatatcgttaaagaagttgcaaaaataatttacatagtacatgacgaagttaaggataaagcttttgaactagaactcagctgggttggtgaattaactaatggaagacatgaaattgttccaaaagatataagagaagaagcagagaaatatgctaaggaatctctgaaggaagaagatgaatcagatgatgataatatgtaacatttactccagcatctattgtattttaaatttctactccagtccaatgtaactatttagccctggattatacatactgtccaattttcattaaatttttgtcttataactataaaaaaaaaaaaaaaaaaaaaa

SEQ ID NO: 1212 - protein, 255 aa, Homo sapiens
MSSIGTGYDLSASTFSPDGRVFQVEYAMKAVENSSTAIGIRCKDGVVFGVEKLVLSKLYEEGSNKRLFNVDRHVGMAVAGLLADARSLADIAREEASNFRSNFGYNIPLKHLADRVAMYVHAYTLYSAVRPFGCSFMLGSYSVNDGAQLYMIDPSGVSYGYWGCAIGKARQAAKTEIEKLQMKEMTCRDIVKEVAKIIYIVHDEVKDKAFELELSWVGELTNGRHEIVPKDIREEAEKYAKESLKEEDESDDDNM

SEQ ID NO: 1213 - DNA, 938 bp, Homo sapiens
gcgctccgggcctggaatccctacgcgtccctttgggtttagcacgatgagctcaatcggcactgggtatgacctgtcagcctctacattctctcctgacggaagagtttttcaagttgaatatgctatgaaggctgtggaaaatagtagtacagctattggaatcagatgcaaagatggtgttgtctttggggtagaaaaattagtcctttctaaactttatgaagaaggttccaacaaaagactttttaatgttgatcggcatgttggaatggcagtagcaggtttgttggcagatgctcgttctttagcagacatagcaagagaagaagcttccaacttcagatctaactttggctacaacattccactaaaacatcttgcagacagagtggccatgtatgtgcatgcatatacactctacagtgctgttagaccttttggctgcagtgtgaatgacggtgcgcaactctacatgattgacccatcaggtgtttcatacggttattggggctgtgccatcggcaaagccaggcaagctgcaaagacggaaatagagaagcttcagatgaaagaaatgacctgccgtgatatcgttaaagaagttgcaaaaataatttacatagtacatgacgaagttaaggataaagcttttgaactagaactcagctgggttggtgaattaactaatggaagacatgaaattgttccaaaagatataagagaagaagcagagaaatatgctaaggaatctctgaaggaagaagatgaatcagatgatgataatatgtaacatttactccagcatctattgtattttaaatttctactccagtccaatgtaactatttagccctggattatacatactgtccaattttcattaaatttttgtcttataactataaaaaaaaaaaaaaaaaaaaaaaaaaaaaaaa

SEQ ID NO: 1214 - protein, 248 aa, Homo sapiens
MSSIGTGYDLSASTFSPDGRVFQVEYAMKAVENSSTAIGIRCKDGVVFGVEKLVLSKLYEEGSNKRLFNVDRHVGMAVAGLLADARSLADIAREEASNFRSNFGYNIPLKHLADRVAMYVHAYTLYSAVRPFGCSVNDGAQLYMIDPSGVSYGYWGCAIGKARQAAKTEIEKLQMKEMTCRDIVKEVAKIIYIVHDEVKDKAFELELSWVGELTNGRHEIVPKDIREEAEKYAKESLKEEDESDDDNM

SEQ ID NO: 1215 - DNA, 5792 bp, Homo sapiens
caataggagttcgtgtagaagcgagtctgctcaacagcttgttatttggtggattgtggcagtaaatcggggcgagtggggaacccggcgcaggaactgcagccgcggctgggagtggtgctgcccggacgggggcccacggaggtcagaggggaggaggactctggagctgacagcgcgcacttcacccgcagttgttctagcgactgcgaagatagctcgctgagctggaaccccacagatcaccaacaaaaatgaaggcggcagatgagcctgcctacctgacagtgggaaccgatgtcagtgccaagtaccgaggtgccttctgtgaggcaaagattaagactgtgaaaaggctggtgaaagttaaggtactcctgaaacaggataataccacacaattggtacaagatgaccaagtaaagggtcctttaagagttggagctattgttgaaacaaggacatctgatggatcttttcaggaagctattatcagcaagttgacagatgctagttggtataccgtggtgtttgatgatggtgatgagcgaacattgagacgtacctcactttgtctgaaaggagagagacattttgcagagagtgagacacttgaccagcttccattaacaaatccagagcattttggaactccagtaattgcaaagaagacgaacagaggaaggagatcttctcttcctgttactgaagatgaaaaggaagaagaaagcagtgaagaggaagatgaagacaagcgccgtctcaatgatgaattactaggaaaagttgtaagtgtggtgtctgcaacggagaggactgaatggtatcctgctttggtaatatctcccagctgtaatgatgacatcacagtgaaaaaggatcagtgtttagttcgatcatttattgattctaaattttactctatagcaagaaaggacattaaggaagtagacattctcaatctaccggaatctgagctctccactaaaccagggcttcagaaagcaagcatcttcttaaaaactagagttgttcctgataattggaaaatggatataagtgaaatccttgagtcatccagtagtgatgatgaagatggcccagctgaagaaaatgatgaagagaaggaaaaggaggccaaaaagacagaagaagaggtgcctgaggaagaacttgatcctgaagagagggacaacttcctccagcagctttataagtttatggaagacagaggtactccaatcaacaaaccacctgttttgggctataaagatctcaatctcttcaaactcttcagactggtttatcatcagggtggatgtgacaatattgatagtggtgctgtatggaagcaaatttatatggaccttggcattcctattttgaattcagctgcttcctacaatgtaaaaactgcttatagaaagtatctctatggttttgaggagtactgccgttcggcaaatattcagttcagaactgttcatcaccatgaaccaaaagtaaaagaggaaaaaaaagacttagaagaatcaatggaagaggctctcaaattagatcaagaaatgcctttaacagaagtgaagagtgaacctgaggaaaatatcgattcaaacagtgaaagtgaaagagaagagatagaattaaaatctccgaggggacgaaggagaattgctcgagatgtaaattctattaaaaaggaaattgaagaagagaaaacagaagacaaattaaaagataatgatacagaaaataaggatgtagatgatgactatgaaactgcagagaaaaaagaaaatgagctactactggggagaaaaaatacaccaaagcaaaaagagaagaaaattaaaaaacaggaggattctgacaaagactcagatgaagaggaagagaaaagccaagagagggaagaaactgaaagcaaatgtgactctgaaggagaggaagatgaggaagacatggaaccctgcctaacaggaaccaaagtgaaagtaaaatatggacgagggaagactcagaaaatttatgaagccagtattaaaagcactgaaattgatgacggagaagttttatatttggtacattactatggatggaatgtcaggtatgatgagtgggtgaaggctgacaggataatctggcctttggacaaaggtggaccaaagaaaaaacagaagaaaaaagctaaaaataaagaagatagtgaaaaggacgaaaagagagatgaggagaggcagaagtcaaaacggggacgacctcctttaaaatcaaccctctcatcaaacatgccgtatggcttatctaagacagcaaacagtgaaggaaaatcagactcttgttcatctgatagtgaaacagaagatgctttagaaaagaatttaataaatgaagaactttctcttaaagatgaactagaaaaaaatgaaaatttgaatgatgataagctagatgaagaaaatccaaagatttctgcacatatattaaaagaaaatgataggactcaaatgcagcctttagaaaccctgaagttagaagttggagagaatgaacaaatagtacagatttttgggaacaaaatggaaaaaacagaagaagttaagaaagaagccgaaaaatctccaaaaggaaagggaagacgaagcaagacaaaagatctttctttagaaattataaagatttcatcatttggccagaatgaagcaggaagtgaacctcatatagaagctcatagtcttgaattgtcttcattagacaataaaaacttttcttctgctacagaagatgaaattgaccaatgtgtgaaagaaaagaagttgaaacggaaaatactaggacaatcatcgccagagaaaaaaataagaattgagaatggaatggaaatgacaaatactgtatctcaagaaaggaccagtgattgtattggatctgagggaatgaaaaacttaaattttgaacagcactttgaaagagaaaatgaaggaatgccatcattgatagcagagtcaaaccaatgcatccaacaactgactagtgaaagatttgatagtccagctgaagaaactgtaaatattccactaaaagaagatgaggatgcaatgcctctgatcgggcctgaaaccttggtttgccatgaagtagatttggatgatttggatgaaaaggataagaccagcattgaggatgtagcagttgaaagctctgagtctaactctcttgtttctattccacctgccctacctcctgtagtccaacataacttttcagtagcttcaccacttactcttagtcaagatgagtctcgaagcgtaaaaagtgagagtgatataacgattgaagttgatagtattgctgaagaatctcaagaaggtctctgtgagagggaatcggcaaatggatttgaaactaatgttgcctctggtacctgtagtataattgtacaagagagagagagcagagagaagggtcagaagaggccaagtgatggaaatagtggattaatggcaaaaaagcaaaagcgtaccccaaagcgaacaagtgctgcagccaaaaatgaaaagaatggaacaggacaaagcagtgatagtgaagatcttcctgtcctagacaattcaagtaaatgtaccccagtaaagcatcttaatgtatctaagccacagaaacttgcacgatctcctgcaagaatatccccgcacatcaaagatggagagaaagataaacacagagaaaaacatccgaattcatcccctaggacatataaatggagctttcagctcaatgaattagataatatgaacagtacagagagaatctcatttctccaagaaaaactacaggaaatcagaaaatattatatgtctttgaagtctgaagttgcaaccatagacaggaggagaaaaagattaaaaaagaaagacagggaagtgtctcatgcgggagcctccatgtcatctgcttcatcagacactggaatgagtccctcatcatcatctcccccacaaaatgtacttgctgtagaatgcaggtgataaacattttctctaccttcccagcagtttgctgccatggacataaatccccaaaccctgaattacaaccacagaaagcactcaactggtttgacattgctaagtatatcctgtatacttttccaggctggattgtatctattcccctctctcttcttttttcttgttgcaaaaaataagctgattaataagtgaaggttaagcagcctgccatatttgtcataatttttcctctttacttttgtttttcgtttgttgtgatatagaacaaagggcacttagcaaatttgaatttgtataataaagctttcaggtgttacagaaatcgtagacaagcaagtgcacatgataaacatcaaaatattacccagctgaatagttactgctgcactttcactaagatgtatttgaacacttggtgagtagggggtttatgttgtgttttttttcattatcgttttttttatttttgtggaagcacttgctatttagaactgccaaagtatatgttcagcagtgtgcccaggattgaaggtgtaaatgggacaaaataaattgtgaaaggaagtgtagttgactgaaaactacagttgtaataagtcttccactttttataggatttttgagcacaaaattatgcaaatattttaatgtttattaatgtttacagtggaattgtgaataagttttcagtggactatcttatcccttgacaaaaatattttgtcttttttctatgtaatttcagagtttttattttgttacaaaaagacaaaaatgaaatatataacaacaatgaagttatttaacaagatttctaaagctgaaatttttgtgtaaaataaggtattatcttgcaacttgttaaatatatttattcagacattggatgttgtatttttatgtattttttaaaatattaataaaatttaaaaaaagaaaattctaggttaattcactctttggatgacaatagctctcagctgtcctttttacaggaggttgcatcctgcagccttgcctgtgttaaagggagtctgtctcagtccatcaaacagtatagaactataaatgggcatctggatcattaaagtatgtccttgtttagaaactttggcagtcctagtatttaaactgttttgaggatcaaatttttggttgcccttaagatactttgtcacagtttttatgtttgctatactgccgaatgaatttatatctcccaaagttgagatgcaacaactaagtaaagcaactatgtatgctttgtctgtgaattgttccacagactgatagattttgtaaataattcttccaaaatcatgtatttaaagcagttttgcatatacattatgtaaaaaggtgattttataaaagcagtttttaaattcatgtttgtacattgaaaggggttttttttttaaacctccttttctgtgtttaatatgctgtagaataataacctagatgctctagactgtatatcaggatctgatttacaagaaaaagtcagagctaaacactagtgatggcatagcattactgaaatcattgtttcttaatttcattttactacattgtgaacttgtgattcagattccattttctcagagaattaaaaacaaaaaaagtactcttgtaaaatgcacttttctgtcttttctttgcaaagcagaagtatctcaatgtaaaataaaaatggagctcagtgggcagtattaataaaggccatgttttaaacataaaaaaaaaaaaaaaaaaaaa

SEQ ID NO: 1216 - protein, 1257 aa, Homo sapiens
MKAADEPAYLTVGTDVSAKYRGAFCEAKIKTVKRLVKVKVLLKQDNTTQLVQDDQVKGPLRVGAIVETRTSDGSFQEAIISKLTDASWYTVVFDDGDERTLRRTSLCLKGERHFAESETLDQLPLTNPEHFGTPVIAKKTNRGRRSSLPVTEDEKEEESSEEEDEDKRRLNDELLGKVVSVVSATERTEWYPALVISPSCNDDITVKKDQCLVRSFIDSKFYSIARKDIKEVDILNLPESELSTKPGLQKASIFLKTRVVPDNWKMDISEILESSSSDDEDGPAEENDEEKEKEAKKTEEEVPEEELDPEERDNFLQQLYKFMEDRGTPINKPPVLGYKDLNLFKLFRLVYHQGGCDNIDSGAVWKQIYMDLGIPILNSAASYNVKTAYRKYLYGFEEYCRSANIQFRTVHHHEPKVKEEKKDLEESMEEALKLDQEMPLTEVKSEPEENIDSNSESEREEIELKSPRGRRRIARDVNSIKKEIEEEKTEDKLKDNDTENKDVDDDYETAEKKENELLLGRKNTPKQKEKKIKKQEDSDKDSDEEEEKSQEREETESKCDSEGEEDEEDMEPCLTGTKVKVKYGRGKTQKIYEASIKSTEIDDGEVLYLVHYYGWNVRYDEWVKADRIIWPLDKGGPKKKQKKKAKNKEDSEKDEKRDEERQKSKRGRPPLKSTLSSNMPYGLSKTANSEGKSDSCSSDSETEDALEKNLINEELSLKDELEKNENLNDDKLDEENPKISAHILKENDRTQMQPLETLKLEVGENEQIVQIFGNKMEKTEEVKKEAEKSPKGKGRRSKTKDLSLEIIKISSFGQNEAGSEPHIEAHSLELSSLDNKNFSSATEDEIDQCVKEKKLKRKILGQSSPEKKIRIENGMEMTNTVSQERTSDCIGSEGMKNLNFEQHFERENEGMPSLIAESNQCIQQLTSERFDSPAEETVNIPLKEDEDAMPLIGPETLVCHEVDLDDLDEKDKTSIEDVAVESSESNSLVSIPPALPPVVQHNFSVASPLTLSQDESRSVKSESDITIEVDSIAEESQEGLCERESANGFETNVASGTCSIIVQERESREKGQKRPSDGNSGLMAKKQKRTPKRTSAAAKNEKNGTGQSSDSEDLPVLDNSSKCTPVKHLNVSKPQKLARSPARISPHIKDGEKDKHREKHPNSSPRTYKWSFQLNELDNMNSTERISFLQEKLQEIRKYYMSLKSEVATIDRRRKRLKKKDREVSHAGASMSSASSDTGMSPSSSSPPQNVLAVECR

SEQ ID NO: 1217 - DNA, 5630 bp, Homo sapiens
caataggagttcgtgtagaagcgagtctgctcaacagcttgttatttggtggattgtggcagtaaatcggggcgagtggggaacccggcgcaggaactgcagccgcggctgggagtggtgctgcccggacgggggcccacggaggtcagaggggaggaggactctggagctgacagcgcgcacttcacccgcagttgttctagcgactgcgaagatagctcgctgagctggaaccccacagatcaccaacaaaaatgaaggcggcagatgagcctgcctacctgacagtgggaaccgatgtcagtgccaagtaccgaggtgccttctgtgaggcaaagattaagactgtgaaaaggctggtgaaagttaaggtactcctgaaacaggataataccacacaattggtacaagatgaccaagtaaagggtcctttaagagttggagctattgttgaaacaaggacatctgatggatcttttcaggaagctattatcagcaagttgacagatgctagttggtataccgtggtgtttgatgatggtgatgagcgaacattgagacgtacctcactttgtctgaaaggagagagacattttgcagagagtgagacacttgaccagcttccattaacaaatccagagcattttggaactccagtaattgcaaagaagacgaacagaggaaggagatcttctcttcctgttactgaagatgaaaaggaagaagaaagcagtgaagaggaagatgaagacaagcgccgtctcaatgatgaattactaggaaaagttgtaagtgtggtgtctgcaacggagaggactgaatggtatcctgctttggtaatatctcccagctgtaatgatgacatcacagtgaaaaaggatcagtgtttagttcgatcatttattgattctaaattttactctatagcaagaaaggacattaaggaagtagacattctcaatctaccggaatctgagctctccactaaaccagggcttcagaaagcaagcatcttcttaaaaactagagttgttcctgataattggaaaatggatataagtgaaatccttgagtcatccagtagtgatgatgaagatggcccagctgaagaaaatgatgaagagaaggaaaaggaggccaaaaagacagaagaagaggtgcctgaggaagaacttgatcctgaagagagggacaacttcctccagcagctttataagtttatggaagacagaggtactccaatcaacaaaccacctgttttgggctataaagatctcaatctcttcaaactcttcagactggtttatcatcagggtggatgtgacaatattgatagtggtgctgtatggaagcaaatttatatggaccttggcattcctattttgaattcagctgcttcctacaatgtaaaaactgcttatagaaagtatctctatggttttgaggagtactgccgttcggcaaatattcagttcagaactgttcatcaccatgaaccaaaagtaaaagaggaaaaaaaagacttagaagaatcaatggaagaggctctcaaattagatcaagaaatgcctttaacagaagtgaagagtgaacctgaggaaaatatcgattcaaacagtgaaagtgaaagagaagagatagaattaaaatctccgaggggacgaaggagaattgctcgagatgtaaattctattaaaaaggaaattgaagaagagaaaacagaagacaaattaaaagataatgatacagaaaataaggatgtagatgatgactatgaaactgcagagaaaaaagaaaatgagctactactggggagaaaaaatacaccaaagcaaaaagagaagaaaattaaaaaacaggaggattctgacaaagactcagatgaagaggaagagaaaagccaagagagggaagaaactgaaagcaaatgtgactctgaaggagaggaagatgaggaagacatggaaccctgcctaacaggaaccaaagtgaaagtaaaatatggacgagggaagactcagaaaatttatgaagccagtattaaaagcactgaaattgatgacggagaagttttatatttggtacattactatggatggaatgtcaggtatgatgagtgggtgaaggctgacaggataatctggcctttggacaaaggtggaccaaagaaaaaacagaagaaaaaagctaaaaataaagaagatagtgaaaaggacgaaaagagagatgaggagaggcagaagtcaaaacggggacgacctcctttaaaatcaaccctctcatcaaacatgccgtatggcttatctaagacagcaaacagtgaaggaaaatcagactcttgttcatctgatagtgaaacagaagatgctttagaaaagaatttaataaatgaagaactttctcttaaagatgaactagaaaaaaatgaaaatttgaatgatgataagctagatgaagaaaatccaaagatttctgcacatatattaaaagaaaatgataggactcaaatgcagcctttagaaaccctgaagttagaagttggagagaatgaacaaatagtacagatttttgggaacaaaatggaaaaaacagaagaagttaagaaagaagccgaaaaatctccaaaaggaaagggaagacgaagcaagacaaaagatctttctttagaaattataaagatttcatcatttggccagaatgaagcaggaagtgaacctcatatagaagctcatagtcttgaattgtcttcattagacaataaaaacttttcttctgctacagaagatgaaattgaccaatgtgtgaaagaaaagaagttgaaacggaaaatactaggacaatcatcgccagagaaaaaaataagaattgagaatggaatggaaatgacaaatactgtatctcaagaaaggaccagtgattgtattggatctgagggaatgaaaaacttaaattttgaacagcactttgaaagagaaaatgaaggaatgccatcattgatagcagagtcaaaccaatgcatccaacaactgactagtgaaagatttgatagtccagctgaagaaactgtaaatattccactaaaagaagatgaggatgcaatgcctctgatcgggcctgaaaccttggtttgccatgaagtagatttggatgatttggatgaaaaggataagaccagcattgaggatgtagcagttgaaagctctgagtctaactctcttgtttctattccacctgccctacctcctgtagtccaacataacttttcagtagcttcaccacttactcttagtcaagatgagtctcgaagcgtaaaaagtgagagtgatataacgattgaagttgatagtattgctgaagaatctcaagaaggtctctgtgagagggaatcggcaaatggatttgaaactaatgttgcctctggtacctgtagtataattgtacaagagagagagagcagagagaagggtcagaagaggccaagtgatggaaatagtggattaatggcaaaaaagcaaaagcgtaccccaaagcgaacaagtgctgcagccaaaaatgaaaagaatggaacaggacaaagcagtgatagtgaagatcttcctgtcctagacaattcaaatgaattagataatatgaacagtacagagagaatctcatttctccaagaaaaactacaggaaatcagaaaatattatatgtctttgaagtctgaagttgcaaccatagacaggaggagaaaaagattaaaaaagaaagacagggaagtgtctcatgcgggagcctccatgtcatctgcttcatcagacactggaatgagtccctcatcatcatctcccccacaaaatgtacttgctgtagaatgcaggtgataaacattttctctaccttcccagcagtttgctgccatggacataaatccccaaaccctgaattacaaccacagaaagcactcaactggtttgacattgctaagtatatcctgtatacttttccaggctggattgtatctattcccctctctcttcttttttcttgttgcaaaaaataagctgattaataagtgaaggttaagcagcctgccatatttgtcataatttttcctctttacttttgtttttcgtttgttgtgatatagaacaaagggcacttagcaaatttgaatttgtataataaagctttcaggtgttacagaaatcgtagacaagcaagtgcacatgataaacatcaaaatattacccagctgaatagttactgctgcactttcactaagatgtatttgaacacttggtgagtagggggtttatgttgtgttttttttcattatcgttttttttatttttgtggaagcacttgctatttagaactgccaaagtatatgttcagcagtgtgcccaggattgaaggtgtaaatgggacaaaataaattgtgaaaggaagtgtagttgactgaaaactacagttgtaataagtcttccactttttataggatttttgagcacaaaattatgcaaatattttaatgtttattaatgtttacagtggaattgtgaataagttttcagtggactatcttatcccttgacaaaaatattttgtcttttttctatgtaatttcagagtttttattttgttacaaaaagacaaaaatgaaatatataacaacaatgaagttatttaacaagatttctaaagctgaaatttttgtgtaaaataaggtattatcttgcaacttgttaaatatatttattcagacattggatgttgtatttttatgtattttttaaaatattaataaaatttaaaaaaagaaaattctaggttaattcactctttggatgacaatagctctcagctgtcctttttacaggaggttgcatcctgcagccttgcctgtgttaaagggagtctgtctcagtccatcaaacagtatagaactataaatgggcatctggatcattaaagtatgtccttgtttagaaactttggcagtcctagtatttaaactgttttgaggatcaaatttttggttgcccttaagatactttgtcacagtttttatgtttgctatactgccgaatgaatttatatctcccaaagttgagatgcaacaactaagtaaagcaactatgtatgctttgtctgtgaattgttccacagactgatagattttgtaaataattcttccaaaatcatgtatttaaagcagttttgcatatacattatgtaaaaaggtgattttataaaagcagtttttaaattcatgtttgtacattgaaaggggttttttttttaaacctccttttctgtgtttaatatgctgtagaataataacctagatgctctagactgtatatcaggatctgatttacaagaaaaagtcagagctaaacactagtgatggcatagcattactgaaatcattgtttcttaatttcattttactacattgtgaacttgtgattcagattccattttctcagagaattaaaaacaaaaaaagtactcttgtaaaatgcacttttctgtcttttctttgcaaagcagaagtatctcaatgtaaaataaaaatggagctcagtgggcagtattaataaaggccatgttttaaacataaaaaaaaaaaaaaaaaaaaa

SEQ ID NO: 1218 - protein, 1203 aa, Homo sapiens
MKAADEPAYLTVGTDVSAKYRGAFCEAKIKTVKRLVKVKVLLKQDNTTQLVQDDQVKGPLRVGAIVETRTSDGSFQEAIISKLTDASWYTVVFDDGDERTLRRTSLCLKGERHFAESETLDQLPLTNPEHFGTPVIAKKTNRGRRSSLPVTEDEKEEESSEEEDEDKRRLNDELLGKVVSVVSATERTEWYPALVISPSCNDDITVKKDQCLVRSFIDSKFYSIARKDIKEVDILNLPESELSTKPGLQKASIFLKTRVVPDNWKMDISEILESSSSDDEDGPAEENDEEKEKEAKKTEEEVPEEELDPEERDNFLQQLYKFMEDRGTPINKPPVLGYKDLNLFKLFRLVYHQGGCDNIDSGAVWKQIYMDLGIPILNSAASYNVKTAYRKYLYGFEEYCRSANIQFRTVHHHEPKVKEEKKDLEESMEEALKLDQEMPLTEVKSEPEENIDSNSESEREEIELKSPRGRRRIARDVNSIKKEIEEEKTEDKLKDNDTENKDVDDDYETAEKKENELLLGRKNTPKQKEKKIKKQEDSDKDSDEEEEKSQEREETESKCDSEGEEDEEDMEPCLTGTKVKVKYGRGKTQKIYEASIKSTEIDDGEVLYLVHYYGWNVRYDEWVKADRIIWPLDKGGPKKKQKKKAKNKEDSEKDEKRDEERQKSKRGRPPLKSTLSSNMPYGLSKTANSEGKSDSCSSDSETEDALEKNLINEELSLKDELEKNENLNDDKLDEENPKISAHILKENDRTQMQPLETLKLEVGENEQIVQIFGNKMEKTEEVKKEAEKSPKGKGRRSKTKDLSLEIIKISSFGQNEAGSEPHIEAHSLELSSLDNKNFSSATEDEIDQCVKEKKLKRKILGQSSPEKKIRIENGMEMTNTVSQERTSDCIGSEGMKNLNFEQHFERENEGMPSLIAESNQCIQQLTSERFDSPAEETVNIPLKEDEDAMPLIGPETLVCHEVDLDDLDEKDKTSIEDVAVESSESNSLVSIPPALPPVVQHNFSVASPLTLSQDESRSVKSESDITIEVDSIAEESQEGLCERESANGFETNVASGTCSIIVQERESREKGQKRPSDGNSGLMAKKQKRTPKRTSAAAKNEKNGTGQSSDSEDLPVLDNSNELDNMNSTERISFLQEKLQEIRKYYMSLKSEVATIDRRRKRLKKKDREVSHAGASMSSASSDTGMSPSSSSPPQNVLAVECR

SEQ ID NO: 1219 - DNA, 5585 bp, Homo sapiens
caataggagttcgtgtagaagcgagtctgctcaacagcttgttatttggtggattgtggcagtaaatcggggcgagtggggaacccggcgcaggaactgcagccgcggctgggagtggtgctgcccggacgggggcccacggaggtcagaggggaggaggactctggagctgacagcgcgcacttcacccgcagttgttctagcgactgcgaagatagctcgctgagctggaaccccacagatcaccaacaaaaatgaaggcggcagatgagcctgcctacctgacagtgggaaccgatgtcagtgccaagtaccgaggtgccttctgtgaggcaaagattaagactgtgaaaaggctggtgaaagttaaggtactcctgaaacaggataataccacacaattggtacaagatgaccaagtaaagggtcctttaagagttggagctattgttgaaacaaggacatctgatggatcttttcaggaagctattatcagcaagttgacagatgctagttggtataccgtggtgtttgatgatggtgatgagcgaacattgagacgtacctcactttgtctgaaaggagagagacattttgcagagagtgagacacttgaccagcttccattaacaaatccagagcattttggaactccagtaattgcaaagaagacgaacagaggaaggagatcttctcttcctgttactgaagatgaaaaggaagaagaaagcagtgaagaggaagatgaagacaagcgccgtctcaatgatgaattactaggaaaagttgtaagtgtggtgtctgcaacggagaggactgaatggtatcctgctttggtaatatctcccagctgtaatgatgacatcacagtgaaaaaggatcagtgtttagttcgatcatttattgattctaaattttactctatagcaagaaaggacattaaggaagtagacattctcaatctaccggaatctgagctctccactaaaccagggcttcagaaagcaagcatcttcttaaaaactagagttgttcctgataattggaaaatggatataagtgaaatccttgagtcatccagtagtgatgatgaagatggcccagctgaagaaaatgatgaagagaaggaaaaggaggccaaaaagacagaagaagaggtgcctgaggaagaacttgatcctgaagagagggacaacttcctccagcagctttataagtttatggaagacagaggtactccaatcaacaaaccacctgttttgggctataaagatctcaatctcttcaaactcttcagactggtttatcatcagggtggatgtgacaatattgatagtggtgctgtatggaagcaaatttatatggaccttggcattcctattttgaattcagctgcttcctacaatgtaaaaactgcttatagaaagtatctctatggttttgaggagtactgccgttcggcaaatattcagttcagaactgttcatcaccatgaaccaaaagtaaaagaggaaaaaaaagacttagaagaatcaatggaagaggctctcaaattagatcaagaaatgcctttaacagaagtgaagagtgaacctgaggaaaatatcgattcaaacagtgaaagtgaaagagaagagatagaattaaaatctccgaggggacgaaggagaattgctcgagatgtaaattctattaaaaaggaaattgaagaagagaaaacagaagacaaattaaaagataatgatacagaaaataaggatgtagatgatgactatgaaactgcagagaaaaaagaaaatgagctactactggggagaaaaaatacaccaaagcaaaaagagaagaaaattaaaaaacaggaggattctgacaaagactcagatgaagaggaagagaaaagccaagagagggaagaaactgaaagcaaatgtgactctgaaggagaggaagatgaggaagacatggaaccctgcctaacaggaaccaaagtgaaagtaaaatatggacgagggaagactcagaaaatttatgaagccagtattaaaagcactgaaattgatgacggagaagttttatatttggtacattactatggatggaatgtcaggtatgatgagtgggtgaaggctgacaggataatctggcctttggacaaaggtggaccaaagaaaaaacagaagaaaaaagctaaaaataaagaagatagtgaaaaggacgaaaagagagatgaggagaggcagaagtcaaaacggggacgacctcctttaaaatcaaccctctcatcaaacatgccgtatggcttatctaagacagcaaacagtgaaggaaaatcagactcttgttcatctgatagtgaaacagaagatgctttagaaaagaatttaataaatgaagaactttctcttaaagatgaactagaaaaaaatgaaaatttgaatgatgataagctagatgaagaaaatccaaagatttctgcacatatattaaaagaaaatgataggactcaaatgcagcctttagaaaccctgaagttagaagttggagagaatgaacaaatagtacagatttttgggaacaaaatggaaaaaacagaagaagttaagaaagaagccgaaaaatctccaaaaggaaagggaagacgaagcaagacaaaagatctttctttagaaattataaagatttcatcatttggccagaatgaagcaggaagtgaacctcatatagaagctcatagtcttgaattgtcttcattagacaataaaaacttttcttctgctacagaagatgaaattgaccaatgtgtgaaagaaaagaagttgaaacggaaaatactaggacaatcatcgccagagaaaaaaataagaattgagaatggaatggaaatgacaaatactgtatctcaagaaaggaccagtgattgtattggatctgagggaatgaaaaacttaaattttgaacagcactttgaaagagaaaatgaaggaatgccatcattgatagcagagtcaaaccaatgcatccaacaactgactagtgaaagatttgatagtccagctgaagaaactgtaaatattccactaaaagaagatgaggatgcaatgcctctgatcgggcctgaaaccttggtttgccatgaagtagatttggatgatttggatgaaaaggataagaccagcattgaggatgtagcagttgaaagctctgagtctaactctcttgtttctattccacctgccctacctcctgtagtccaacataacttttcagtagcttcaccacttactcttagtcaagatgagtctcgaagcgtaaaaagtgagagtgatataacgattgaagttgatagtattgctgaagaatctcaagaaggtctctgtgagagggaatcggcaaatggatttgaaactaatgttgcctctggtacctgtagtataattgtacaagagagagagagcagagagaagggtcagaagaggccaagtgatggaaatagtggattaatggcaaaaaagcaaaagcgtaccccaaagcgaacaagtgctgcagccaaaaatgaaaagaatggaacagatgaattagataatatgaacagtacagagagaatctcatttctccaagaaaaactacaggaaatcagaaaatattatatgtctttgaagtctgaagttgcaaccatagacaggaggagaaaaagattaaaaaagaaagacagggaagtgtctcatgcgggagcctccatgtcatctgcttcatcagacactggaatgagtccctcatcatcatctcccccacaaaatgtacttgctgtagaatgcaggtgataaacattttctctaccttcccagcagtttgctgccatggacataaatccccaaaccctgaattacaaccacagaaagcactcaactggtttgacattgctaagtatatcctgtatacttttccaggctggattgtatctattcccctctctcttcttttttcttgttgcaaaaaataagctgattaataagtgaaggttaagcagcctgccatatttgtcataatttttcctctttacttttgtttttcgtttgttgtgatatagaacaaagggcacttagcaaatttgaatttgtataataaagctttcaggtgttacagaaatcgtagacaagcaagtgcacatgataaacatcaaaatattacccagctgaatagttactgctgcactttcactaagatgtatttgaacacttggtgagtagggggtttatgttgtgttttttttcattatcgttttttttatttttgtggaagcacttgctatttagaactgccaaagtatatgttcagcagtgtgcccaggattgaaggtgtaaatgggacaaaataaattgtgaaaggaagtgtagttgactgaaaactacagttgtaataagtcttccactttttataggatttttgagcacaaaattatgcaaatattttaatgtttattaatgtttacagtggaattgtgaataagttttcagtggactatcttatcccttgacaaaaatattttgtcttttttctatgtaatttcagagtttttattttgttacaaaaagacaaaaatgaaatatataacaacaatgaagttatttaacaagatttctaaagctgaaatttttgtgtaaaataaggtattatcttgcaacttgttaaatatatttattcagacattggatgttgtatttttatgtattttttaaaatattaataaaatttaaaaaaagaaaattctaggttaattcactctttggatgacaatagctctcagctgtcctttttacaggaggttgcatcctgcagccttgcctgtgttaaagggagtctgtctcagtccatcaaacagtatagaactataaatgggcatctggatcattaaagtatgtccttgtttagaaactttggcagtcctagtatttaaactgttttgaggatcaaatttttggttgcccttaagatactttgtcacagtttttatgtttgctatactgccgaatgaatttatatctcccaaagttgagatgcaacaactaagtaaagcaactatgtatgctttgtctgtgaattgttccacagactgatagattttgtaaataattcttccaaaatcatgtatttaaagcagttttgcatatacattatgtaaaaaggtgattttataaaagcagtttttaaattcatgtttgtacattgaaaggggttttttttttaaacctccttttctgtgtttaatatgctgtagaataataacctagatgctctagactgtatatcaggatctgatttacaagaaaaagtcagagctaaacactagtgatggcatagcattactgaaatcattgtttcttaatttcattttactacattgtgaacttgtgattcagattccattttctcagagaattaaaaacaaaaaaagtactcttgtaaaatgcacttttctgtcttttctttgcaaagcagaagtatctcaatgtaaaataaaaatggagctcagtgggcagtattaataaaggccatgttttaaacataaaaaaaaaaaaaaaaaaaaa

SEQ ID NO: 1220 - protein, 1188 aa, Homo sapiens
MKAADEPAYLTVGTDVSAKYRGAFCEAKIKTVKRLVKVKVLLKQDNTTQLVQDDQVKGPLRVGAIVETRTSDGSFQEAIISKLTDASWYTVVFDDGDERTLRRTSLCLKGERHFAESETLDQLPLTNPEHFGTPVIAKKTNRGRRSSLPVTEDEKEEESSEEEDEDKRRLNDELLGKVVSVVSATERTEWYPALVISPSCNDDITVKKDQCLVRSFIDSKFYSIARKDIKEVDILNLPESELSTKPGLQKASIFLKTRVVPDNWKMDISEILESSSSDDEDGPAEENDEEKEKEAKKTEEEVPEEELDPEERDNFLQQLYKFMEDRGTPINKPPVLGYKDLNLFKLFRLVYHQGGCDNIDSGAVWKQIYMDLGIPILNSAASYNVKTAYRKYLYGFEEYCRSANIQFRTVHHHEPKVKEEKKDLEESMEEALKLDQEMPLTEVKSEPEENIDSNSESEREEIELKSPRGRRRIARDVNSIKKEIEEEKTEDKLKDNDTENKDVDDDYETAEKKENELLLGRKNTPKQKEKKIKKQEDSDKDSDEEEEKSQEREETESKCDSEGEEDEEDMEPCLTGTKVKVKYGRGKTQKIYEASIKSTEIDDGEVLYLVHYYGWNVRYDEWVKADRIIWPLDKGGPKKKQKKKAKNKEDSEKDEKRDEERQKSKRGRPPLKSTLSSNMPYGLSKTANSEGKSDSCSSDSETEDALEKNLINEELSLKDELEKNENLNDDKLDEENPKISAHILKENDRTQMQPLETLKLEVGENEQIVQIFGNKMEKTEEVKKEAEKSPKGKGRRSKTKDLSLEIIKISSFGQNEAGSEPHIEAHSLELSSLDNKNFSSATEDEIDQCVKEKKLKRKILGQSSPEKKIRIENGMEMTNTVSQERTSDCIGSEGMKNLNFEQHFERENEGMPSLIAESNQCIQQLTSERFDSPAEETVNIPLKEDEDAMPLIGPETLVCHEVDLDDLDEKDKTSIEDVAVESSESNSLVSIPPALPPVVQHNFSVASPLTLSQDESRSVKSESDITIEVDSIAEESQEGLCERESANGFETNVASGTCSIIVQERESREKGQKRPSDGNSGLMAKKQKRTPKRTSAAAKNEKNGTDELDNMNSTERISFLQEKLQEIRKYYMSLKSEVATIDRRRKRLKKKDREVSHAGASMSSASSDTGMSPSSSSPPQNVLAVECR

SEQ ID NO: 1221 - DNA, 622 bp, Homo sapiens
cggacgcgtgggcaacgctcggcttgtgggacgcccgcggtcggatgccctccgtccgctccctcctccgcctcttggccgccgcggcggcctgtggcgccttcgccttcctgggctattgtatttacctcaaccggaagcggcgcggggaccccgcgttcaagcgccgcctgcgggacaaaagaagagcagagcctcaaaaggctgaggagcagggcacgcagttgtgggatccaacgaagaataaaaagttgcaagaacttttcttgcaagaggtacggatgggagaactttggttatctagaggagagcacagaatggggattcaacacctcggcaatgcccttttagtgtgcgagcaaccacgggaacttctgaaagttttcaaacacactctccctcccaaggtatttgagatgctgttgcacaaaattccccttatttgccagcaatttgaggcagacatgaatgaacaggactgcttggaggatgatcctgattgaaaaacatttcaacgtatccacagtccagtgagaatactatggtaccatacagtataaacaactgctcagtgatatttccatttattttactttgagtaataaaaatttttctatctcat

SEQ ID NO: 1222 - protein, 152 aa, Homo sapiens
MPSVRSLLRLLAAAAACGAFAFLGYCIYLNRKRRGDPAFKRRLRDKRRAEPQKAEEQGTQLWDPTKNKKLQELFLQEVRMGELWLSRGEHRMGIQHLGNALLVCEQPRELLKVFKHTLPPKVFEMLLHKIPLICQQFEADMNEQDCLEDDPD

SEQ ID NO: 1223 - DNA, 1282 bp, Homo sapiens
ctgcgatcccgcagggcagcgacgcgactctggtgcgggccgtcttcttccccccgagctgggcgtgcgcggccgcaatgaactgggagctgctgctgtggctgctggtgctgtgcgcgctgctcctgctcttggtgcagctgctgcgcttcctgagggctgacggcgacctgacgctactatgggccgagtggcagggacgacgcccagaatgggagctgactgatatggtggtgtgggtgactggagcctcgagtggaattggtgaggagctggcttaccagttgtctaaactaggagtttctcttgtgctgtcagccagaagagtgcatgagctggaaagggtgaaaagaagatgcctagagaatggcaatttaaaagaaaaagatatacttgttttgccccttgacctgaccgacactggttcccatgaagcggctaccaaagctgttctccaggagtttggtagaatcgacattctggtcaacaatggtggaatgtcccagcgttctctgtgcatggataccagcttggatgtctacagaaagctaatagagcttaactacttagggacggtgtccttgacaaaatgtgttctgcctcacatgatcgagaggaagcaaggaaagattgttactgtgaatagcatcctgggtatcatatctgtacctctttccattggatactgtgctagcaagcatgctctccggggtttttttaatggccttcgaacagaacttgccacatacccaggtataatagtttctaacatttgcccaggacctgtgcaatcaaatattgtggagaattccctagctggagaagtcacaaagactataggcaataatggagaccagtcccacaagatgacaaccagtcgttgtgtgcggctgatgttaatcagcatggccaatgatttgaaagaagtttggatctcagaacaacctttcttgttagtaacatatttgtggcaatacatgccaacctgggcctggtggataaccaacaagatggggaagaaaaggattgagaactttaagagtggtgtggatgcagactcttcttattttaaaatctttaagacaaaacatgactgaaaagagcacctgtacttttcaagccactggagggagaaatggaaaacatgaaaacagcaatcttcttatgcttctgaataatcaaagactaatttgtgattttactttttaatagatatgactttgcttccaacatggaatgaaataaaaaataaataataaaagattgccatgaatcttgcaaa

SEQ ID NO: 1224 - protein, 339 aa, Homo sapiens
MNWELLLWLLVLCALLLLLVQLLRFLRADGDLTLLWAEWQGRRPEWELTDMVVWVTGASSGIGEELAYQLSKLGVSLVLSARRVHELERVKRRCLENGNLKEKDILVLPLDLTDTGSHEAATKAVLQEFGRIDILVNNGGMSQRSLCMDTSLDVYRKLIELNYLGTVSLTKCVLPHMIERKQGKIVTVNSILGIISVPLSIGYCASKHALRGFFNGLRTELATYPGIIVSNICPGPVQSNIVENSLAGEVTKTIGNNGDQSHKMTTSRCVRLMLISMANDLKEVWISEQPFLLVTYLWQYMPTWAWWITNKMGKKRIENFKSGVDADSSYFKIFKTKHD

SEQ ID NO: 1225 - DNA, 2409 bp, Homo sapiens
gtggttggggaggggggggtggggggactctagacagctgaggcgcgaaagcgatgagtcctcggctcttcctcctccttctccgggacccgctctctgcctccctctccaacgcccggatgatctgagccgcgagggcgccgacagccgggggcccggacgcagcccggctcctcccctcctccgccccttccccagcctgacctggcccgccgctgcagcggtgacccctcccccggctgccgccgtcgccgccgcggtgaccccctccccggctgccgccgccgccgcctcggccgaccagggacctgcccgcctgcggctgctccggacctagaggatcaagacataatgggagcatttttagacaagccaaagatggaaaagcataatgcccaggggcagggtaatgggttgcgatatgggctaagcagcatgcaaggctggcgtgttgaaatggaggatgcacatacggctgtgatcggtttgccaagtggacttgaatcgtggtcattctttgctgtgtatgatgggcatgctggttctcaggttgccaaatactgctgtgagcatttgttagatcacatcaccaataaccaggattttaaagggtctgcaggagcaccttctgtggaaaatgtaaagaatggaatcagaacaggttttctggagattgatgaacacatgagagttatgtcagagaagaaacatggtgcagatagaagtgggtcaacagctgtaggtgtcttaatttctccccaacatacttatttcattaactgtggagactcaagaggtttactttgtaggaacaggaaagttcatttcttcacacaagatcacaaaccaagtaatccgctggagaaagaacgaattcagaatgcaggtggctctgtaatgattcagcgtgtgaatggctctctggctgtatcgagggcccttggggattttgattacaaatgtgtccatggaaaaggtcctactgagcagcttgtctcaccagagcctgaagtccatgatattgaaagatctgaagaagatgatcagttcattatccttgcatgtgatggtatctgggatgttatgggaaatgaagagctctgtgattttgtaagatccagacttgaagtcactgatgaccttgagaaagtttgcaatgaagtagtcgacacctgtttgtataagggaagtcgagacaacatgagtgtgattttgatctgttttccaaatgcacccaaagtatcgccagaagcagtgaagaaggaggcagagttggacaagtacctggaatgcagagtagaagaaatcataaagaagcagggggaaggcgtccccgacttagtccatgtgatgcgcacattagcgagtgagaacatccccagcctcccaccagggggtgaattggcaagcaagaggaatgttattgaagccgtttacaatagactgaatccttacaaaaatgacgacactgactctacatcaacagatgatatgtggtaaaactgctcatctagccatggagtttaccttcacctccaaaggagagtacagctcaactttgttgaaacttttaacatccatcctcaactttaaggaaggggatatgacatgggtgagaatgattacatcagagaacttcagcagtacaacagctagcccagaactgatttttttttttttttttgtaaatttgagacttatgtaagcgtgatttcaaaccataattcgtgttgtaaatcagactccagcaatttttgttgtatgattttgtttttttgtaaagtgtaattgtccttgtacaaaatgctcatatttaattatgaactgctttaaatcactatcaaagttacaagaaatgtttggcttattgtgtgatgcaacagatatatagccctttcaagtcatgttgtgtttggacttggggttggaacagggagagcagcagccatgtcagctacacgctcaaatgtgcagatgattatggaaaataacctcaaaatcttacaaagctgaacatccaaggagttattgaaaactatcttaaatgttcttggtaggggagttggcattgttgataaagccagtcccttcatttaactgtctttcaggatgttccttcgttgtttccatgagtattgcaggtaataatacagtgtattcataagaatctcaatcttggggctaaatgccttgtttctttgcacctcttttcaagtccttacatttaattactaattgataagcagcagcttcctacatatagtaggaaactgccacatttttgctatcatgattggctgggcctgctgctgttcctagtaagatattctgaattccattttatcaataaagcttgatttaacaaacaagaaaaaaaaaaaaaaaaaaaaaaaaaaaaaaaaaaaaaaa

SEQ ID NO: 1226 - protein, 382 aa, Homo sapiens
MGAFLDKPKMEKHNAQGQGNGLRYGLSSMQGWRVEMEDAHTAVIGLPSGLESWSFFAVYDGHAGSQVAKYCCEHLLDHITNNQDFKGSAGAPSVENVKNGIRTGFLEIDEHMRVMSEKKHGADRSGSTAVGVLISPQHTYFINCGDSRGLLCRNRKVHFFTQDHKPSNPLEKERIQNAGGSVMIQRVNGSLAVSRALGDFDYKCVHGKGPTEQLVSPEPEVHDIERSEEDDQFIILACDGIWDVMGNEELCDFVRSRLEVTDDLEKVCNEVVDTCLYKGSRDNMSVILICFPNAPKVSPEAVKKEAELDKYLECRVEEIIKKQGEGVPDLVHVMRTLASENIPSLPPGGELASKRNVIEAVYNRLNPYKNDDTDSTSTDDMW

SEQ ID NO: 1227 - DNA, 2373 bp, Homo sapiens
gtggttggggaggggggggtggggggactctagacagctgaggcgcgaaagcgatgagtcctcggctcttcctcctccttctccgggacccgctctctgcctccctctccaacgcccggatgatctgagccgcgagggcgccgacagccgggggcccggacgcagcccggctcctcccctcctccgccccttccccagcctgacctggcccgccgctgcagcggtgacccctcccccggctgccgccgtcgccgccgcggtgaccccctccccggctgccgccgccgccgcctcggccgaccagggacctgcccgcctgcggctgctccggattttaaataaacttggagccttttcttgaaagacagctggctgtggagagccttctaccaactgcagttttagatacgttttgaaaatttcatcacctgagacctagaggatcaagacataatgggagcatttttagacaagccaaagatggaaaagcataatgcccaggggcagggtaatgggttgcgatatgggctaagcagcatgcaaggctggcgtgttgaaatggaggatgcacatacggctgtgatcggtttgccaagtggacttgaatcgtggtcattctttgctgtgtatgatgggcatgctggttctcaggttgccaaatactgctgtgagcatttgttagatcacatcaccaataaccaggattttaaagggtctgcaggagcaccttctgtggaaaatgtaaagaatggaatcagaacaggttttctggagattgatgaacacatgagagttatgtcagagaagaaacatggtgcagatagaagtgggtcaacagctgtaggtgtcttaatttctccccaacatacttatttcattaactgtggagactcaagaggtttactttgtaggaacaggaaagttcatttcttcacacaagatcacaaaccaagtaatccgctggagaaagaacgaattcagaatgcaggtggctctgtaatgattcagcgtgtgaatggctctctggctgtatcgagggcccttggggattttgattacaaatgtgtccatggaaaaggtcctactgagcagcttgtctcaccagagcctgaagtccatgatattgaaagatctgaagaagatgatcagttcattatccttgcatgtgatggtatctgggatgttatgggaaatgaagagctctgtgattttgtaagatccagacttgaagtcactgatgaccttgagaaagtttgcaatgaagtagtcgacacctgtttgtataagggaagtcgagacaacatgagtgtgattttgatctgttttccaaatgcacccaaagtatcgccagaagcagtgaagaaggaggcagagttggacaagtacctggaatgcagagtagaaggtggatcatttaacaaaaaataagtagctttattaaagaaaaatcttcaacacaatcaaactttaacattttagcttttagatttttatgtgtctttgacagctagtgtctagtgtatgaaagtggaaaaggacatttctgtagtagctgttaagatgtatgcagttgtcctatcacagttatattagaaataacaactagtgtggaaagtaacccacattctgttcaggatacttttgttttaaaaggctaaaatgtttgtgtgctttaaaattcttaatgaattcactggcatgagtaattttatgccgggaaaatctgatttgtggtctatttaattacaaagagattgtgatggtgataatttgaataccatctttctatgaaaagctgtgtatattaattttaatctctagggccttttttcaataacttgaaaatcacagcctcatcattagcaactttatatacacagctttaaaaaatttgctttaaactgtttcagagcttcttccctaagccataaactgtctcacctaaacaagatagacctcaataaaagacataatatttctccacctggcagaaaagtaactgccaagtaagattaagaaataagttgagcatttctggagtatatttctcataattctgcagagacttccagtttattgcatatatgcagtaaagtgtatatattatgcagtttctctaagtggaaaaacttgacatgactttaatagtgttaaaacatgaaaatgctggtgagctgaggtagaaaaaaaacaagaaaaaaattttaaaaatagcgttaaaatgcattttaggctcctaatgtcgttaatttgcacgttaaagacctctaatcgcatgcaagcattgacctaccacacctacatcccactgtgcctgcattattgaaattactactcactttaattttttttcccctttttactgtttgatac

SEQ ID NO: 1228 - protein, 324 aa, Homo sapiens
MGAFLDKPKMEKHNAQGQGNGLRYGLSSMQGWRVEMEDAHTAVIGLPSGLESWSFFAVYDGHAGSQVAKYCCEHLLDHITNNQDFKGSAGAPSVENVKNGIRTGFLEIDEHMRVMSEKKHGADRSGSTAVGVLISPQHTYFINCGDSRGLLCRNRKVHFFTQDHKPSNPLEKERIQNAGGSVMIQRVNGSLAVSRALGDFDYKCVHGKGPTEQLVSPEPEVHDIERSEEDDQFIILACDGIWDVMGNEELCDFVRSRLEVTDDLEKVCNEVVDTCLYKGSRDNMSVILICFPNAPKVSPEAVKKEAELDKYLECRVEGGSFNKK

SEQ ID NO: 1229 - DNA, 2373 bp, Homo sapiens
aatgtattatgatgtaggggagggaggaaggagggccagggtagggggcacaccctctccctgaatgaaattcatttaggggcactgtctgctcgcatgttctgttctgggagaaaatgggtagcagaagctacaatttgtactaagctaatgaaaagagagaaaagaagaatggggaagagaagggcaaagaaggcaaaaagagaagagaagaaaaagggaggagagagaaggagaaatgagaaaagaggaaaccaaatgaagaggatgtgtgagagaaaaaaatatgaaacagacctagaggatcaagacataatgggagcatttttagacaagccaaagatggaaaagcataatgcccaggggcagggtaatgggttgcgatatgggctaagcagcatgcaaggctggcgtgttgaaatggaggatgcacatacggctgtgatcggtttgccaagtggacttgaatcgtggtcattctttgctgtgtatgatgggcatgctggttctcaggttgccaaatactgctgtgagcatttgttagatcacatcaccaataaccaggattttaaagggtctgcaggagcaccttctgtggaaaatgtaaagaatggaatcagaacaggttttctggagattgatgaacacatgagagttatgtcagagaagaaacatggtgcagatagaagtgggtcaacagctgtaggtgtcttaatttctccccaacatacttatttcattaactgtggagactcaagaggtttactttgtaggaacaggaaagttcatttcttcacacaagatcacaaaccaagtaatccgctggagaaagaacgaattcagaatgcaggtggctctgtaatgattcagcgtgtgaatggctctctggctgtatcgagggcccttggggattttgattacaaatgtgtccatggaaaaggtcctactgagcagcttgtctcaccagagcctgaagtccatgatattgaaagatctgaagaagatgatcagttcattatccttgcatgtgatggtatctgggatgttatgggaaatgaagagctctgtgattttgtaagatccagacttgaagtcactgatgaccttgagaaagtttgcaatgaagtagtcgacacctgtttgtataagggaagtcgagacaacatgagtgtgattttgatctgttttccaaatgcacccaaagtatcgccagaagcagtgaagaaggaggcagagttggacaagtacctggaatgcagagtagaagaaatcataaagaagcagggggaaggcgtccccgacttagtccatgtgatgcgcacattagcgagtgagaacatccccagcctcccaccagggggtgaattggcaagcaagaggaatgttattgaagccgtttacaatagactgaatccttacaaaaatgacgacactgactctacatcaacagatgatatgtggtaaaactgctcatctagccatggagtttaccttcacctccaaaggagagtacagctcaactttgttgaaacttttaacatccatcctcaactttaaggaaggggatatgacatgggtgagaatgattacatcagagaacttcagcagtacaacagctagcccagaactgatttttttttttttttttgtaaatttgagacttatgtaagcgtgatttcaaaccataattcgtgttgtaaatcagactccagcaatttttgttgtatgattttgtttttttgtaaagtgtaattgtccttgtacaaaatgctcatatttaattatgaactgctttaaatcactatcaaagttacaagaaatgtttggcttattgtgtgatgcaacagatatatagccctttcaagtcatgttgtgtttggacttggggttggaacagggagagcagcagccatgtcagctacacgctcaaatgtgcagatgattatggaaaataacctcaaaatcttacaaagctgaacatccaaggagttattgaaaactatcttaaatgttcttggtaggggagttggcattgttgataaagccagtcccttcatttaactgtctttcaggatgttccttcgttgtttccatgagtattgcaggtaataatacagtgtattcataagaatctcaatcttggggctaaatgccttgtttctttgcacctcttttcaagtccttacatttaattactaattgataagcagcagcttcctacatatagtaggaaactgccacatttttgctatcatgattggctgggcctgctgctgttcctagtaagatattctgaattccattttatcaataaagcttgatttaacaaacaagaaaaaaaaaaaaaaaaaaaaaaaaaaaaaaaaaaaaaaa

SEQ ID NO: 1230 - protein, 382 aa, Homo sapiens; identical to SEQ ID NO: 1226

SEQ ID NO: 1231 - DNA, 3137 bp, Homo sapiens
gggtctgaggttgtaactttaacaggtgtaagtatttctttcctctgtttcagctggaagttttgagagtgaaatattcacagccattaagagacctccaaattaatttctcaacatgcttattctatagttcacattcaatccagagcactgaaggaactgaacaactggacactgtagacatcagatagctggccatggtgttggccatggcgtctcaggatgttcagaacttcttccagcctttctcttcctggatatctcgggtttatgaagctctccagcaagcaggagatatgttatctgcttcgctggttaacataagcaaacaagactctaaattgagtgacaaactagatcaggacttagataatattcagattcaggaaacgtactttgaagatgaagaacaagacaatgattggagtcaagaggatgcaaattccttgtttcttgaagtggatcatttctcatgttgtaatagtgatttgcaggactctgcccaaaattcaagcccaagccttagccaacatgcaaaggactcatgttccacaatgtcccagtggcccaattgggccagtgatgaccgcaagttaccacatgtgctttcttctattgcggaggaagagcatcaccttgaaaagcaaagaagtggccttcaacatggctttgacagccagctccctggtactttagaaactgttaatggaaaaaagcaagtcaacagctttggggatgacgaagagctgtccacatcttctgacagtgacgaggaggtgatcaaacaatttgagatttccgtgtcccggtcccagagtttccgttcagtgacatctgagaaaggaaagcagacaggattggagcagaaaccaaaattcagccgttcgttgttgacacacggagaagatggcacagaagtatctgcctgcgaagatttggatggagccagccaacggcgttattctgagaatctctcctacggtgaagatgaccacatccctgctcactcacagtccccatgtgaaagaggggatgccaaacaccacggcacatctcaccaagagtccagtgtggtccaaagcctcaggcgccaatccacagagggcagcttggagatggagacagcttttaatagccggggatttgaagattcctatgccactgacagctcctccatgtggagtccagaggaacaggacaggaccaatttgcaggtgccatccggggtctcagagcccatctcaaagtgtggtgacctagatgtcatctttgaatatagagccgccagccagaagctcacagtgaccattgtgagggcacagggcctcccagataaggaccgaagtggtgtcaactcctggcaagttcatgtagtgctgctgcctggtaagaaacacaggggcaggacgaacatacagagagggcccaaccccgtcttcagggagaaggtcacctttgccaagctggagcccagagatgtggctgcctgtgctgtccgcttccgcctgtacgctgcccggaagatgacccgagagagaatgatgggagagaaactattctatctcagccacctgcacccagaaggggaaatgaaagtgactctggttctggagccaagaagtaatataagcagtggagggtctccgctcagcccatctgcggtttctcacagtgatagtacttcatccacgcagtcgctgtctcatggaggggcgccagagctgttggtggggctctcgtacaatgccacaacggggcgattatctgtggaaatgatcaaaggcagccatttccgaaacctcgctgttaaccgagcacctgatacatatggaaaactctttctcctcaattctgtgggtcaagagatgtcccgttgcaagacgtccattcggcgtggtcagcccaatcctgtctataaggagacctttgttttccaggtggccctctttcagctgtctgatgtcacgttgatgatttccgtttataacaggcgtactatgaagcgtaaagagatgattggctggattgccctgggccagaacagcagtggagaggaggaacaagatcactgggaggagatgaaggaaaccaaaggccagcagatctgcagatggcacactttgctggaatcctaggtttgctaacctgcatttgtgtgctgtgtccaccttggttacctgtgttgctgtctactgacactaagtgtcctggcaagggtttcagggtttcaaaaacagattccactaacccctaggacattgtgagtgggagttttgggtttctcaatggtctgatttggatttaaatattgtaattttaaaaacacacatacacagtgaagtgtccgtatggaaaatattataccacaattaagaccactgatgagttaatttgtgccaatagatcattgagttttagttcagggtatggggtgaagcttcttctgctgtctctgtttgcttgaagagtaacctgagattgcaagggagctgttaattgttactatttgcaaccatttaggtggatgaatcagaattttcttaatatggtacaaaaaactccaaaatatagatatgaatcagatgctgagcctcataaaagaatcaaactctaatccataaactcttatttcacatttttctctttatcaaagaaacctatttacctaacgagtaaatattataaacttgcacttttaaaataaatttgtattaattaaatacctcttttatcttatattttgtggtttctatgagatttggttagatgaatcattttgaagcaagaaaagagttcagaaactactgttttaagacaacttgtctccttttgaatatgtaagatttcaaacttgtgactttcaaggtttttatgctgtctttctcacccaataagttcttacagaataagaaaacaaaaaacaagactactgcagtcatagatttattgattttttctgcttctggtgttcttttggattatcctttttctatgttcaattatatatactcatatatgaatattttgaatgtactgcatgtaaaccatgctctttttaaactgagtattttccatcactagagcatagtaaattgtacacagtgagtccttaataaatattgatttgattgactctt

SEQ ID NO: 1232 - protein, 645 aa, Homo sapiens
MVLAMASQDVQNFFQPFSSWISRVYEALQQAGDMLSASLVNISKQDSKLSDKLDQDLDNIQIQETYFEDEEQDNDWSQEDANSLFLEVDHFSCCNSDLQDSAQNSSPSLSQHAKDSCSTMSQWPNWASDDRKLPHVLSSIAEEEHHLEKQRSGLQHGFDSQLPGTLETVNGKKQVNSFGDDEELSTSSDSDEEVIKQFEISVSRSQSFRSVTSEKGKQTGLEQKPKFSRSLLTHGEDGTEVSACEDLDGASQRRYSENLSYGEDDHIPAHSQSPCERGDAKHHGTSHQESSVVQSLRRQSTEGSLEMETAFNSRGFEDSYATDSSSMWSPEEQDRTNLQVPSGVSEPISKCGDLDVIFEYRAASQKLTVTIVRAQGLPDKDRSGVNSWQVHVVLLPGKKHRGRTNIQRGPNPVFREKVTFAKLEPRDVAACAVRFRLYAARKMTRERMMGEKLFYLSHLHPEGEMKVTLVLEPRSNISSGGSPLSPSAVSHSDSTSSTQSLSHGGAPELLVGLSYNATTGRLSVEMIKGSHFRNLAVNRAPDTYGKLFLLNSVGQEMSRCKTSIRRGQPNPVYKETFVFQVALFQLSDVTLMISVYNRRTMKRKEMIGWIALGQNSSGEEEQDHWEEMKETKGQQICRWHTLLES

SEQ ID NO: 1233 - DNA, 3308 bp, Homo sapiens
catccccccctcccccgccgcggatcctggccgctgctctccagacccaggatgccggggggcaagagagggctggtggcaccgcagaacacatttttggagaacatcgtcaggcgctccagtgaatcaagtttcttactgggaaatgcccagattgtggattggcctgtagtttatagtaatgacggtttttgtaaactctctggatatcatcgagctgacgtcatgcagaaaagcagcacttgcagttttatgtatggggaattgactgacaagaagaccattgagaaagtcaggcaaacttttgacaactacgaatcaaactgctttgaagttcttctgtacaagaaaaacagaacccctgtttggttttatatgcaaattgcaccaataagaaatgaacatgaaaaggtggtcttgttcctgtgtactttcaaggatattacgttgttcaaacagccaatagaggatgattcaacaaaaggttggacgaaatttgcccgattgacacgggctttgacaaatagccgaagtgttttgcagcagctcacgccaatgaataaaacagaggtggtccataaacattcaagactagctgaagttcttcagctgggatcagatatccttcctcagtataaacaagaagcgccaaagacgccaccacacattattttacattattgtgcttttaaaactacttgggattgggtgattttaattcttaccttctacaccgccattatggttccttataatgtttccttcaaaacaaagcagaacaacatagcctggctggtactggatagtgtggtggacgttatttttctggttgacatcgttttaaattttcacacgactttcgtggggcccggtggagaggtcatttctgaccctaagctcataaggatgaactatctgaaaacttggtttgtgatcgatctgctgtcttgtttaccttatgacatcatcaatgcctttgaaaatgtggatgagggaatcagcagtctcttcagttctttaaaagtggtgcgtctcttacgactgggccgtgtggctaggaaactggaccattacctagaatatggagcagcagtcctcgtgctcctggtgtgtgtgtttggactggtggcccactggctggcctgcatatggtatagcatcggagactacgaggtcattgatgaagtcactaacaccatccaaatagacagttggctctaccagctggctttgagcattgggactccatatcgctacaataccagtgctgggatatgggaaggaggacccagcaaggattcattgtacgtgtcctctctctactttaccatgacaagccttacaaccataggatttggaaacatagctcctaccacagatgtggagaagatgttttcggtggctatgatgatggttggctctcttctttatgcaactatttttggaaatgttacaacaattttccagcaaatgtatgccaacaccaaccgataccatgagatgctgaataatgtacgggacttcctaaaactctatcaggtcccaaaaggccttagtgagcgagtcatggattatattgtctcaacatggtccatgtcaaaaggcattgatacagaaaaggtcctctccatctgtcccaaggacatgagagctgatatctgtgttcatctaaaccggaaggtttttaatgaacatcctgcttttcgattggccagcgatgggtgtctgcgcgccttggcggtagagttccaaaccattcactgtgctcccggggacctcatttaccatgctggagaaagtgtggatgccctctgctttgtggtgtcaggatccttggaagtcatccaggatgatgaggtggtggctattttagggaagggtgatgtatttggagacatcttctggaaggaaaccacccttgcccatgcatgtgcgaacgtccgggcactgacgtactgtgacctacacatcatcaagcgggaagccttgctcaaagtcctggacttttatacagcttttgcaaactccttctcaaggaatctcactcttacttgcaatctgaggaaacggatcatctttcgtaagatcagtgatgtgaagaaagaggaggaggagcgcctccggcagaagaatgaggtgaccctcagcattcccgtggaccacccagtcagaaagctcttccagaagttcaagcagcagaaggagctgcggaatcagggctcaacacagggtgaccctgagaggaaccaactccaggtagagagccgctccttacagaatggagcctccatcaccggaaccagcgtggtgactgtgtcacagattactcccattcagacgtctctggcctatgtgaaaaccagtgaatcccttaagcagaacaaccgtgatgccatggaactcaagcccaacggcggtgctgaccaaaaatgtctcaaagtcaacagcccaataagaatgaagaatggaaatggaaaagggtggctgcgactcaagaataatatgggagcccatgaggagaaaaaggaagactggaataatgtcactaaagctgagtcaatggggctattgtctgaggaccccaagagcagtgattcagagaacagtgtgaccaaaaacccactaaggaaaacagattcttgtgacagtggaattacaaaaagtgaccttcgtttggataaggctggggaggcccgaagtccgctagagcacagtcccatccaggctgatgccaagcaccccttttatcccatccccgagcaggccttacagaccacactgcaggaagtcaaacacgaactcaaagaggacatccagctgctcagctgcagaatgactgccctagaaaagcaggtggcagaaattttaaaaatactgtcggaaaaaagcgtaccccaggcctcatctcccaaatcccaaatgccactccaagtacccccccagataccatgtcaggatatttttagtgtctcaaggcctgaatcacctgaatctgacaaagatgaaatccacttttaatatatatacatatatatttgttaatatattaaaacagtatatacatatgtgtgtatatacagtatatacatatatatattttcacttgctttcaagatgatgaccacacatggattttgatatgtaaatattgcatgtccagctggattctggcctgccaaagaagatgatgattaaaaacatagatattgcttgtatattatgcagttgactgcatgcacactttacatttatttataatctctattctataataaaagagtatgatttttgttacccaaaaaaaaaaa

SEQ ID NO: 1234 - protein, 988 aa, Homo sapiens
MPGGKRGLVAPQNTFLENIVRRSSESSFLLGNAQIVDWPVVYSNDGFCKLSGYHRADVMQKSSTCSFMYGELTDKKTIEKVRQTFDNYESNCFEVLLYKKNRTPVWFYMQIAPIRNEHEKVVLFLCTFKDITLFKQPIEDDSTKGWTKFARLTRALTNSRSVLQQLTPMNKTEVVHKHSRLAEVLQLGSDILPQYKQEAPKTPPHIILHYCAFKTTWDWVILILTFYTAIMVPYNVSFKTKQNNIAWLVLDSVVDVIFLVDIVLNFHTTFVGPGGEVISDPKLIRMNYLKTWFVIDLLSCLPYDIINAFENVDEGISSLFSSLKVVRLLRLGRVARKLDHYLEYGAAVLVLLVCVFGLVAHWLACIWYSIGDYEVIDEVTNTIQIDSWLYQLALSIGTPYRYNTSAGIWEGGPSKDSLYVSSLYFTMTSLTTIGFGNIAPTTDVEKMFSVAMMMVGSLLYATIFGNVTTIFQQMYANTNRYHEMLNNVRDFLKLYQVPKGLSERVMDYIVSTWSMSKGIDTEKVLSICPKDMRADICVHLNRKVFNEHPAFRLASDGCLRALAVEFQTIHCAPGDLIYHAGESVDALCFVVSGSLEVIQDDEVVAILGKGDVFGDIFWKETTLAHACANVRALTYCDLHIIKREALLKVLDFYTAFANSFSRNLTLTCNLRKRIIFRKISDVKKEEEERLRQKNEVTLSIPVDHPVRKLFQKFKQQKELRNQGSTQGDPERNQLQVESRSLQNGASITGTSVVTVSQITPIQTSLAYVKTSESLKQNNRDAMELKPNGGADQKCLKVNSPIRMKNGNGKGWLRLKNNMGAHEEKKEDWNNVTKAESMGLLSEDPKSSDSENSVTKNPLRKTDSCDSGITKSDLRLDKAGEARSPLEHSPIQADAKHPFYPIPEQALQTTLQEVKHELKEDIQLLSCRMTALEKQVAEILKILSEKSVPQASSPKSQMPLQVPPQIPCQDIFSVSRPESPESDKDEIHF

SEQ ID NO: 1235 - DNA, 3118 bp, Homo sapiens
catccccccctcccccgccgcggatcctggccgctgctctccagacccaggatgccggggggcaagagagggctggtggcaccgcagaacacatttttggagaacatcgtcaggcgctccagtgaatcaagtttcttactgggaaatgcccagattgtggattggcctgtagtttatagtaatgacggtttttgtaaactctctggatatcatcgagctgacgtcatgcagaaaagcagcacttgcagttttatgtatggggaattgactgacaagaagaccattgagaaagtcaggcaaacttttgacaactacgaatcaaactgctttgaagttcttctgtacaagaaaaacagaacccctgtttggttttatatgcaaattgcaccaataagaaatgaacatgaaaaggtggtcttgttcctgtgtactttcaaggatattacgttgttcaaacagccaatagaggatgattcaacaaaaggttggacgaaatttgcccgattgacacgggctttgacaaatagccgaagtgttttgcagcagctcacgccaatgaataaaacagaggtggtccataaacattcaagactagctgaagttcttcagctgggatcagatatccttcctcagtataaacaagaagcgccaaagacgccaccacacattattttacattattgtgcttttaaaactacttgggattgggtgattttaattcttaccttctacaccgccattatggttccttataatgtttccttcaaaacaaagcagaacaacatagcctggctggtactggatagtgtggtggacgttatttttctggttgacatcgttttaaattttcacacgactttcgtggggcccggtggagaggtcatttctgaccctaagctcataaggatgaactatctgaaaacttggtttgtgatcgatctgctgtcttgtttaccttatgacatcatcaatgcctttgaaaatgtggatgagggaatcagcagtctcttcagttctttaaaagtggtgcgtctcttacgactgggccgtgtggctaggaaactggaccattacctagaatatggagcagcagtcctcgtgctcctggtgtgtgtgtttggactggtggcccactggctggcctgcatatggtatagcatcggagactacgaggtcattgatgaagtcactaacaccatccaaatagacagttggctctaccagctggctttgagcattgggactccatatcgctacaataccagtgctgggatatgggaaggaggacccagcaaggattcattgtacgtgtcctctctctactttaccatgacaagccttacaaccataggatttggaaacatagctcctaccacagatgtggagaagatgttttcggtggctatgatgatggttggctctcttctttatgcaactatttttggaaatgttacaacaattttccagcaaatgtatgccaacaccaaccgataccatgagatgctgaataatgtacgggacttcctaaaactctatcaggtcccaaaaggccttagtgagcgagtcatggattatattgtctcaacatggtccatgtcaaaaggcattgatacagaaaaggtcctctccatctgtcccaaggacatgagagctgatatctgtgttcatctaaaccggaaggtttttaatgaacatcctgcttttcgattggccagcgatgggtgtctgcgcgccttggcggtagagttccaaaccattcactgtgctcccggggacctcatttaccatgctggagaaagtgtggatgccctctgctttgtggtgtcaggatccttggaagtcatccaggatgatgaggtggtggctattttagatcatctttcgtaagatcagtgatgtgaagaaagaggaggaggagcgcctccggcagaagaatgaggtgaccctcagcattcccgtggaccacccagtcagaaagctcttccagaagttcaagcagcagaaggagctgcggaatcagggctcaacacagggtgaccctgagaggaaccaactccaggtagagagccgctccttacagaatggagcctccatcaccggaaccagcgtggtgactgtgtcacagattactcccattcagacgtctctggcctatgtgaaaaccagtgaatcccttaagcagaacaaccgtgatgccatggaactcaagcccaacggcggtgctgaccaaaaatgtctcaaagtcaacagcccaataagaatgaagaatggaaatggaaaagggtggctgcgactcaagaataatatgggagcccatgaggagaaaaaggaagactggaataatgtcactaaagctgagtcaatggggctattgtctgaggaccccaagagcagtgattcagagaacagtgtgaccaaaaacccactaaggaaaacagattcttgtgacagtggaattacaaaaagtgaccttcgtttggataaggctggggaggcccgaagtccgctagagcacagtcccatccaggctgatgccaagcaccccttttatcccatccccgagcaggccttacagaccacactgcaggaagtcaaacacgaactcaaagaggacatccagctgctcagctgcagaatgactgccctagaaaagcaggtggcagaaattttaaaaatactgtcggaaaaaagcgtaccccaggcctcatctcccaaatcccaaatgccactccaagtacccccccagataccatgtcaggatatttttagtgtctcaaggcctgaatcacctgaatctgacaaagatgaaatccacttttaatatatatacatatatatttgttaatatattaaaacagtatatacatatgtgtgtatatacagtatatacatatatatattttcacttgctttcaagatgatgaccacacatggattttgatatgtaaatattgcatgtccagctggattctggcctgccaaagaagatgatgattaaaaacatagatattgcttgtatattatgcagttgactgcatgcacactttacatttatttataatctctattctataataaaagagtatgatttttgttacccaaaaaaaaaaaaaaaaaa

SEQ ID NO: 1236 - protein, 611 aa, Homo sapiens
MPGGKRGLVAPQNTFLENIVRRSSESSFLLGNAQIVDWPVVYSNDGFCKLSGYHRADVMQKSSTCSFMYGELTDKKTIEKVRQTFDNYESNCFEVLLYKKNRTPVWFYMQIAPIRNEHEKVVLFLCTFKDITLFKQPIEDDSTKGWTKFARLTRALTNSRSVLQQLTPMNKTEVVHKHSRLAEVLQLGSDILPQYKQEAPKTPPHIILHYCAFKTTWDWVILILTFYTAIMVPYNVSFKTKQNNIAWLVLDSVVDVIFLVDIVLNFHTTFVGPGGEVISDPKLIRMNYLKTWFVIDLLSCLPYDIINAFENVDEGISSLFSSLKVVRLLRLGRVARKLDHYLEYGAAVLVLLVCVFGLVAHWLACIWYSIGDYEVIDEVTNTIQIDSWLYQLALSIGTPYRYNTSAGIWEGGPSKDSLYVSSLYFTMTSLTTIGFGNIAPTTDVEKMFSVAMMMVGSLLYATIFGNVTTIFQQMYANTNRYHEMLNNVRDFLKLYQVPKGLSERVMDYIVSTWSMSKGIDTEKVLSICPKDMRADICVHLNRKVFNEHPAFRLASDGCLRALAVEFQTIHCAPGDLIYHAGESVDALCFVVSGSLEVIQDDEVVAILDHLS

SEQ ID NO: 1237 - DNA, 2490 bp, Homo sapiens
tgagcaaatgaaagacaccaacaaaatccaacacataaagattcacacttgaaacagattaatcaggaatcaagtttcttactgggaaatgcccagattgtggattggcctgtagtttatagtaatgacggtttttgtaaactctctggatatcatcgagctgacgtcatgcagaaaagcagcacttgcagttttatgtatggggaattgactgacaagaagaccattgagaaagtcaggcaaacttttgacaactacgaatcaaactgctttgaagttcttctgtacaagaaaaacagaacccctgtttggttttatatgcaaattgcaccaataagaaatgaacatgaaaaggtggtcttgttcctgtgtactttcaaggatattacgttgttcaaacagccaatagaggatgattcaacaaaaggttggacgaaatttgcccgattgacacgggctttgacaaatagccgaagtgttttgcagcagctcacgccaatgaataaaacagaggtggtccataaacattcaagactagctgaagttcttcagctgggatcagatatccttcctcagtataaacaagaagcgccaaagacgccaccacacattattttacattattgtgcttttaaaactacttgggattgggtgattttaattcttaccttctacaccgccattatggttccttataatgtttccttcaaaacaaagcagaacaacatagcctggctggtactggatagtgtggtggacgttatttttctggttgacatcgttttaaattttcacacgactttcgtggggcccggtggagaggtcatttctgaccctaagctcataaggatgaactatctgaaaacttggtttgtgatcgatctgctgtcttgtttaccttatgacatcatcaatgcctttgaaaatgtggatgagggaatcagcagtctcttcagttctttaaaagtggtgcgtctcttacgactgggccgtgtggctaggaaactggaccattacctagaatatggagcagcagtcctcgtgctcctggtgtgtgtgtttggactggtggcccactggctggcctgcatatggtatagcatcggagactacgaggtcattgatgaagtcactaacaccatccaaatagacagttggctctaccagctggctttgagcattgggactccatatcgctacaataccagtgctgggatatgggaaggaggacccagcaaggattcattgtacgtgtcctctctctactttaccatgacaagccttacaaccataggatttggaaacatagctcctaccacagatgtggagaagatgttttcggtggctatgatgatggttggctctcttctttatgcaactatttttggaaatgttacaacaattttccagcaaatgtatgccaacaccaaccgataccatgagatgctgaataatgtacgggacttcctaaaactctatcaggtcccaaaaggccttagtgagcgagtcatggattatattgtctcaacatggtccatgtcaaaaggcattgatacagaaaaggtcctctccatctgtcccaaggacatgagagctgatatctgtgttcatctaaaccggaaggtttttaatgaacatcctgcttttcgattggccagcgatgggtgtctgcgcgccttggcggtagagttccaaaccattcactgtgctcccggggacctcatttaccatgctggagaaagtgtggatgccctctgctttgtggtgtcaggatccttggaagtcatccaggatgatgaggtggtggctattttagggaagggtgatgtatttggagacatcttctggaaggaaaccacccttgcccatgcatgtgcgaacgtccgggcactgacgtactgtgacctacacatcatcaagcgggaagccttgctcaaagtcctggacttttatacagcttttgcaaactccttctcaaggaatctcactcttacttgcaatctgaggaaacggggatggttctccatggcaaacgctctgtgaagggtgacctgctgggtgtgaaactgctgcacgacttcctacttcacccattcatctatccgagttttcacggagtccaggagaaagtataaaagttaccttgaggagcaggagagtggaatggttaagactgtttggaatctgaccccttggatttgcatcctggacacacagttgtgtgacctaagggaaaccacttaaactctttatgcctcaatttgcttctctgtgataaaagaataatatgacctgtgtcctacagtagagaataataggtcctagctcgtaaaatgttctcattccatgacacttaaatgagaaaatacgtgtgtggaagtgaccactttgctatatacagatattttattatcattttacaatgccattattttgttccatagtcaaaagtataataaaacaaatgtcaatttgtcttattctaatcct

SEQ ID NO: 1238 - protein, 624 aa, Homo sapiens
MQKSSTCSFMYGELTDKKTIEKVRQTFDNYESNCFEVLLYKKNRTPVWFYMQIAPIRNEHEKVVLFLCTFKDITLFKQPIEDDSTKGWTKFARLTRALTNSRSVLQQLTPMNKTEVVHKHSRLAEVLQLGSDILPQYKQEAPKTPPHIILHYCAFKTTWDWVILILTFYTAIMVPYNVSFKTKQNNIAWLVLDSVVDVIFLVDIVLNFHTTFVGPGGEVISDPKLIRMNYLKTWFVIDLLSCLPYDIINAFENVDEGISSLFSSLKVVRLLRLGRVARKLDHYLEYGAAVLVLLVCVFGLVAHWLACIWYSIGDYEVIDEVTNTIQIDSWLYQLALSIGTPYRYNTSAGIWEGGPSKDSLYVSSLYFTMTSLTTIGFGNIAPTTDVEKMFSVAMMMVGSLLYATIFGNVTTIFQQMYANTNRYHEMLNNVRDFLKLYQVPKGLSERVMDYIVSTWSMSKGIDTEKVLSICPKDMRADICVHLNRKVFNEHPAFRLASDGCLRALAVEFQTIHCAPGDLIYHAGESVDALCFVVSGSLEVIQDDEVVAILGKGDVFGDIFWKETTLAHACANVRALTYCDLHIIKREALLKVLDFYTAFANSFSRNLTLTCNLRKRGWFSMANAL

SEQ ID NO: 1239 - DNA, 392 bp, Homo sapiens
atgaagctggcattcctcttccttggccccatggccctcctccttctggctggctatggctgtgtcctcggtgcctccagtgggaacctgcgcacctttgtgggctgtgccgtgagggagtttactttcctggccaagaagccaggctgcaggggcttcggatcaccacggatgcctgctggggtcgctgtgagacctggcagaaacccattctggaacccccctatattgaagcccatcatcgagtctgtacctacaacgagaccaaacaggtgactgtcaagctgcccaactgtgccccgggagtcgaccccttctacacctatcccgtggccatccgctgtgactgcggagcctgctccactgccaccacggagtgtgagaccatctga

SEQ ID NO: 1240 - protein, 91 aa, Homo sapiens
MKLAFLFLGPMALLLLAGYGCVLGASSGNLRTFVGCAVREFTFLAKKPGCRGFGSPRMPAGVAVRPGRNPFWNPPILKPIIESVPTTRPNR

SEQ ID NO: 1241 - DNA, 6163 bp, Homo sapiens
caggactggagggcttgaggaatgtggtggtccctctcttcgttgtttctgccccctgaggttgtgctttctcagggatatgcactctgcacttccattcctgcagtgaaattaactcgagcttggcagctcgagaggagaatgtggccactttccgaggctcagagtatctgtgctacgacctgtctcagaacccgatccagagcagcagtgatgaaatcaccctctcctttaagacctggcagcgtaacggcctcatcctgcacacgggcaagtcggctgactatgtcaacctggctctgaaggatggtgcggtctccttggtcattaacctggggtccggggcctttgaggccattgtggagccagtgaatggaaaattcaacgacaacgcctggcatgatgtcaaagtgacacgcaacctccggcaggtgacaatctctgtggatggcattcttaccacgacgggctacactcaagaggactataccatgctgggctcggacgacttcttctatgtaggaggaagcccaagtaccgctgacttgcctggctcccctgtcagcaacaacttcatgggctgccttaaagaggttgtttataagaataatgacatccgtctggagctgtctcgcctggcccggattgcggacaccaagatgaaaatctatggcgaagttgtgtttaagtgtgagaatgtggccacactggaccccatcaactttgagaccccagaggcttacatcagcttgcccaagtggaacactaaacgtatgggctccatctcctttgacttccgcaccacagagcccaatggcctgatcctcttcactcatggaaagccccaagagaggaaggatgctcggagccagaagaatacaaaagtagacttctttgccgtggaactcctcgatggcaacctgtacttgctgcttgacatgggctctggcaccatcaaagtgaaagccactcagaagaaagccaatgatggggaatggtaccatgtggacattcagcgagatggcagatcaggtactatatcagtgaacagcaggcgcacgccattcaccgccagtggggagagcgagatcctggacctggaaggagacatgtacctgggagggctgccggagaaccgtgctggccttattctccccaccgagctgtggactgccatgctcaactatggctacgtgggctgcatccgcgacctattcattgatgggcgcagcaagaacattcgacagctggcagagatgcagaatgctgcgggtgtcaagtcctcctgttcacggatgagtgccaagcagtgtgacagctacccctgcaagaataatgctgtgtgcaaggacggctggaaccgcttcatctgcgactgcaccggcaccggatactggggaagaacctgcgaaagggaggcatccatcctgagctatgatggtagcatgtacatgaagatcatcatgcccatggtcatgcatactgaggcagaggatgtgtccttccgcttcatgtcccagcgagcttatgggctgctggtggctacgacctccagggactctgccgacaccctgcgtctggagctggatggggggcgtgtcaagctcatggttaacttagactgtatcaggataaactgtaactccagcaaaggaccagagaccttgtatgcagggcagaagctcaatgacaacgagtggcacaccgttcgggtggtgcggagaggaaaaagccttaagttaaccgtggatgatgatgtggctgagggtacaatggtgggagaccatacccgtttggagttccacaacattgaaacgggaatcatgactgagaaacgctacatctccgttgtcccctccagctttattggccatctgcagagcctcatgtttaatggccttctctacattgacttgtgcaaaaatggtgacattgattattgtgagctgaaggctcgttttggactgaggaacatcatcgctgaccctgtcacctttaagaccaagagcagctacctgagccttgccactcttcaggcttacacctccatgcacctcttcttccagttcaagaccacctcaccagatggcttcattctcttcaatagtggtgatggcaatgacttcattgcagtcgagcttgtcaaggggtatatacactacgtttttgacctcggaaacggtcccaatgtgatcaaaggcaacagtgaccgccccctgaatgacaaccagtggcacaatgtcgtcatcactcgggacaatagtaacactcatagcctgaaagtggacaccaaagtggtcactcaggttatcaatggtgccaaaaatctggatttgaaaggtgatctctatatggctggtctggcccaaggcatgtacagcaacctcccaaagctcgtggcctctcgagatggctttcagggctgtctagcatcagtggacttgaatggacgcctgccagacctcatcaatgatgctcttcatcggagcggacagatcgagcgtggctgtgaaggacccagtaccacctgccaggaagattcatgtgccaaccagggggtctgcatgcaacaatgggagggcttcacctgtgattgttctatgacctcttattctggaaaccagtgcaatgatcctggcgctacgtacatctttgggaaaagtggtgggcttatcctctacacctggccagccaatgacaggcccagcacgcggtctgaccgccttgccgtgggcttcagcaccactgtgaaggatggcatcttggtccgcatcgacagtgctccaggacttggtgacttcctccagcttcacatagaacaggggaaaattggagttgtcttcaacattggcacagttgacatctccatcaaagaggagagaacccctgtaaatgacggcaaataccatgtggtacgcttcaccaggaacggcggcaacgccaccctgcaggtggacaactggccagtgaatgaacattatcctacaggccggcagttaaccatcttcaacactcaggcgcaaatagccattggtggaaaggacaaaggacgcctcttccaaggccaactctctgggctctattatgatggtttgaaagtactgaacatggcggctgagaacaaccccaatattaaaatcaatggaagtgttcggctggttggagaagtcccatcaattttgggaacaacacagacgacctccatgccaccagaaatgtctactactgtcatggaaaccactactacaatggcgactaccacaacccgtaagaatcgctctacagccagcattcagccaacatcagatgatcttgtttcatctgctgaatgttcaagtgatgatgaagactttgttgaatgtgagccgagtacagcaaaccccacggagccgggaatcagacgggttccgggggcctcagaggtgatccgggagtcgagcagcacaacagggatggtcgtcggcattgtggctgctgccgccctctgcatcttgatcctcctgtacgccatgtacaagtacaggaacagggacgaggggtcctatcaagtggacgagacgcggaactacatcagcaactccgcccagagcaacggcacgctcatgaaggagaagcagcagagctcgaagagcggccacaagaaacagaaaaacaaggacagggagtattacgtgtaaacatgcgaacactgctcacacgcgagttttcacagttatttctatccacgcctatgaatctttggacggtgagatctcacagatgtcagaactgctggaactatgaaatggggtatataaccacgactctggtggggaaaaccgttttttaaaggacacacacacacacagcgatgcatctctctctaaagctcagccacggctgcggcaaggtcccagcggtcgctgggagacagaaggttttgtgccctgctgtatcataaagcacacacttagcgctctggagccggacggtggctccaccacttccgcaggcctggaaacttccttctccggaggaccttttactaaaaggtagaagacttcatggcttacttgttccataactccaagtgagtctgtaatgtttgtgaagcttgactgtaaccatgttttttctgtttaattatgtaaaaaacaaaactacaacaacaaaaaaagaaaaaagttaaaaaagaaaaaaacaccaaaaaacaaaaacaaacaaaaaaaaaaacccacaacccttatctggttctgaccagtgtgcgtgtaactttatgatctgaggggaaaaatggcttttgggtttttgtttatttttttgataatgactggacatcagaagaggaaaaaaactcaaaacaaaagcgagagagactattgccatatgaactcaaaagctatcatggtgttcactctacatatcaggttatggtgtctctagaatctgttgtttgtttcctataagatgctttgctgaacacatagcaaaattcatgtgacggatgataaattgattcgaaaagctggtcccccaggatctaatttcagaatttaccacccaaacccggaacagatgggtttagggctggtgttatcagagctattggctttacgtaacaatattgttcctgtccattcacccagccaaattgtgttaaagaggaaagccccacaaactaaaacagcctttcctagggaagaggaaggggaggtgggctggatctgtgactgattgaaatgcatgcaaataaaaaagacaatattaaagtctgttatcaaaccagacagtaggggagttcaactcgtgatggaaccacaaaaggtcacacaagccaaccatgtcatgccagagtacaaaacacatagttctttccccgccccgaatgtgacaatggttttcatagtggtttaattttgtagcctgacatttatggataactctgtccttccatttgctcacttctctcttcacccatcttttttaaaaacaaataaatgaataaagctgctgtgacacacacacaaaaggaatttaatagtataatatatatataaataaatatatatacagatatatttatcatggtatgtttgatgggatgactgacacaggaaatctgttaaagtcttaaaatggaatgagaatgttgttttaaaagaaaatagcaaaacaacaaaaaagcaaaccttaaaatgtgaagaaagtgtgaattttagttttgtcacagttaactgtgtcaaagagaattaaaaaaaaaaacttcagattttgtttacatattttactacatttttgctggtataattccttagccacctatgtacatactgctttaagaaatgtttttttcctgtttatttctgtttggtttatattctggttgtctttttctttttgtaaagaggaaacaatgtacagaaaaacaataaactggttgtatggccatagctatccgaaaagcaagagacaaagcaagacaaatattcacacaaaaatgaagtgtgtcctctggagggtcagatatacaatttcttttgtacagatgaaaatcaatcagctgcttagatttagaaatctactcttgctggtctttgtaagttgcatgaatatttgactttgaaaaaatatcttaacgacatggggcaaaaagtgcaatctaaatggtagcctttactaatgtgtgtggaaagaggtgttcctcattatctaatatttcaatgtgttaagagtttaatttttttgttatcattaaaaaagacaggattataaagagatatcaaagcacgattttagataacctaaacggcccagcctatacgaagttgattatatctcgatgtctgtaaaagattgctgttcttggagtcttgaggtcttgtgaattgatttcctgctttctttcatttttttcaatttaagtaataatacatttgttatattcctttcagtgtaagtttctatttggacaattttatgggaacatgtgcattctctatgtgagcttctatcatattcctgttttattagcagaacctaaaggaatttatttaatgatgttgtgacattactgctttttcttttttcttttcttagttcatatttgcattttcgttcaaggatatgcttagcaataaaatgttcttcccaaaaaaaaaaaaaaaaaaaaaaaaaaaaaaaaaaa

SEQ ID NO: 1242 - protein, 1061 aa, Homo sapiens
MLGSDDFFYVGGSPSTADLPGSPVSNNFMGCLKEVVYKNNDIRLELSRLARIADTKMKIYGEVVFKCENVATLDPINFETPEAYISLPKWNTKRMGSISFDFRTTEPNGLILFTHGKPQERKDARSQKNTKVDFFAVELLDGNLYLLLDMGSGTIKVKATQKKANDGEWYHVDIQRDGRSGTISVNSRRTPFTASGESEILDLEGDMYLGGLPENRAGLILPTELWTAMLNYGYVGCIRDLFIDGRSKNIRQLAEMQNAAGVKSSCSRMSAKQCDSYPCKNNAVCKDGWNRFICDCTGTGYWGRTCEREASILSYDGSMYMKIIMPMVMHTEAEDVSFRFMSQRAYGLLVATTSRDSADTLRLELDGGRVKLMVNLDCIRINCNSSKGPETLYAGQKLNDNEWHTVRVVRRGKSLKLTVDDDVAEGTMVGDHTRLEFHNIETGIMTEKRYISVVPSSFIGHLQSLMFNGLLYIDLCKNGDIDYCELKARFGLRNIIADPVTFKTKSSYLSLATLQAYTSMHLFFQFKTTSPDGFILFNSGDGNDFIAVELVKGYIHYVFDLGNGPNVIKGNSDRPLNDNQWHNVVITRDNSNTHSLKVDTKVVTQVINGAKNLDLKGDLYMAGLAQGMYSNLPKLVASRDGFQGCLASVDLNGRLPDLINDALHRSGQIERGCEGPSTTCQEDSCANQGVCMQQWEGFTCDCSMTSYSGNQCNDPGATYIFGKSGGLILYTWPANDRPSTRSDRLAVGFSTTVKDGILVRIDSAPGLGDFLQLHIEQGKIGVVFNIGTVDISIKEERTPVNDGKYHVVRFTRNGGNATLQVDNWPVNEHYPTGRQLTIFNTQAQIAIGGKDKGRLFQGQLSGLYYDGLKVLNMAAENNPNIKINGSVRLVGEVPSILGTTQTTSMPPEMSTTVMETTTTMATTTTRKNRSTASIQPTSDDLVSSAECSSDDEDFVECEPSTANPTEPGIRRVPGASEVIRESSSTTGMVVGIVAAAALCILILLYAMYKYRNRDEGSYQVDETRNYISNSAQSNGTLMKEKQQSSKSGHKKQKNKDREYYV

SEQ ID NO: 1243 - DNA, 4766 bp, Homo sapiens
gatttgctctcgggagtgcgctatttgcatatgacttgcccatttgtgaatttggctccccaactcctcgcttcacttcacctgtgcctccctggtccgcgcacttcgcaggcgcccgcccgcctctcggccacctctgcagcctgccaggcacctcctcttgcgctctcgctgatttcgcccacccacctccctccaccccgtgccacgttggtttgggtggctgctccgcaccgggttcctcctcctctcctctttccctccagtccttcttattctcttcctctggctgcggtggctgctgctgctgctggttttcatccagttgggaaacccaggaagccggcggctgctccgtggcgctagtccagcacgcccagggttaaaagcctcgcgcccttccgcggagactcccaggaacacccgaagaactcttccacctgcagcccccttttgcctggcagttctgcattgcatctcatggaagtggaaacaggaaaataaaaatgttcaaactccttggatgttgggataaactcacctgaacccacttgggttcgggctgcctccttctcttccttcattgccacctttcctctgtgtggctcccgggagtgtgcggttaagtcatcagactcgaagtgcctagagatccggaggaagccgcgccggtcttcccctgacatgcgtggcatgccggggctccgtaggaggtttgctatacctgggaggaccctggcattctaaatttcagctccgggaaagagaaggggctttttgccttttatcttttttttttctttctttaagtagtaattttttaactgattcattgtttggaaagcgcatattgcttccctcttccccgaattctggcaactcttcctcctgctatgatgggcccttgggcatcatgaacttcattactcctcactggctggaattcaaactgcccatctgtagtggtcccgtgcgttgaccatgcacctgagaatccacgcgagacggagccctcctcgccggccggcctggacgcttgggatctggttcctgttctggggatgtatcgtcagctctgtatggagttcttctaatgtagcttcctcctcctccacctcttcctcgccggggtctcactctcagcacgagcaccatttccatggcagcaagcatcactcagtgcctatttctatctatcgttcccctgtttcccttcgaggaggacacgctggcgctacgtacatctttgggaaaagtggtgggcttatcctctacacctggccagccaatgacaggcccagcacgcggtctgaccgccttgccgtgggcttcagcaccactgtgaaggatggcatcttggtccgcatcgacagtgctccaggacttggtgacttcctccagcttcacatagaacaggggaaaattggagttgtcttcaacattggcacagttgacatctccatcaaagaggagagaacccctgtaaatgacggcaaataccatgtggtacgcttcaccaggaacggcggcaacgccaccctgcaggtggacaactggccagtgaatgaacattatcctacaggccggcagttaaccatcttcaacactcaggcgcaaatagccattggtggaaaggacaaaggacgcctcttccaaggccaactctctgggctctattatgatggtttgaaagtactgaacatggcggctgagaacaaccccaatattaaaatcaatggaagtgttcggctggttggagaagtcccatcaattttgggaacaacacagacgacctccatgccaccagaaatgtctactactgtcatggaaaccactactacaatggcgactaccacaacccgtaagaatcgctctacagccagcattcagccaacatcagatgatcttgtttcatctgctgaatgttcaagtgatgatgaagactttgttgaatgtgagccgagtacaggtaggtcagcaaaccccacggagccgggaatcagacgggttccgggggcctcagaggtgatccgggagtcgagcagcacaacagggatggtcgtcggcattgtggctgctgccgccctctgcatcttgatcctcctgtacgccatgtacaagtacaggaacagggacgaggggtcctatcaagtggacgagacgcggaactacatcagcaactccgcccagagcaacggcacgctcatgaaggagaagcagcagagctcgaagagcggccacaagaaacagaaaaacaaggacagggagtattacgtgtaaacatgcgaacactgctcacacgcgagttttcacagttatttctatccacgcctatgaatctttggacggtgagatctcacagatgtcagaactgctggaactatgaaatggggtatataaccacgactctggtggggaaaaccgttttttaaaggacacacacacacacagcgatgcatctctctctaaagctcagccacggctgcggcaaggtcccagcggtcgctgggagacagaaggttttgtgccctgctgtatcataaagcacacacttagcgctctggagccggacggtggctccaccacttccgcaggcctggaaacttccttctccggaggaccttttactaaaaggtagaagacttcatggcttacttgttccataactccaagtgagtctgtaatgtttgtgaagcttgactgtaaccatgttttttctgtttaattatgtaaaaaacaaaactacaacaacaaaaaaagaaaaaagttaaaaaagaaaaaaacaccaaaaaacaaaaacaaacaaaaaaaaaaacccacaacccttatctggttctgaccagtgtgcgtgtaactttatgatctgaggggaaaaatggcttttgggtttttgtttatttttttgataatgactggacatcagaagaggaaaaaaactcaaaacaaaagcgagagagactattgccatatgaactcaaaagctatcatggtgttcactctacatatcaggttatggtgtctctagaatctgttgtttgtttcctataagatgctttgctgaacacatagcaaaattcatgtgacggatgataaattgattcgaaaagctggtcccccaggatctaatttcagaatttaccacccaaacccggaacagatgggtttagggctggtgttatcagagctattggctttacgtaacaatattgttcctgtccattcacccagccaaattgtgttaaagaggaaagccccacaaactaaaacagcctttcctagggaagaggaaggggaggtgggctggatctgtgactgattgaaatgcatgcaaataaaaaagacaatattaaagtctgttatcaaaccagacagtaggggagttcaactcgtgatggaaccacaaaaggtcacacaagccaaccatgtcatgccagagtacaaaacacatagttctttccccgccccgaatgtgacaatggttttcatagtggtttaattttgtagcctgacatttatggataactctgtccttccatttgctcacttctctcttcacccatcttttttaaaaacaaataaatgaataaagctgctgtgacacacacacaaaaggaatttaatagtataatatatatataaataaatatatatacagatatatttatcatggtatgtttgatgggatgactgacacaggaaatctgttaaagtcttaaaatggaatgagaatgttgttttaaaagaaaatagcaaaacaacaaaaaagcaaaccttaaaatgtgaagaaagtgtgaattttagttttgtcacagttaactgtgtcaaagagaattaaaaaaaaaaacttcagattttgtttacatattttactacatttttgctggtataattccttagccacctatgtacatactgctttaagaaatgtttttttcctgtttatttctgtttggtttatattctggttgtctttttctttttgtaaagaggaaacaatgtacagaaaaacaataaactggttgtatggccatagctatccgaaaagcaagagacaaagcaagacaaatattcacacaaaaatgaagtgtgtcctctggagggtcagatatacaatttcttttgtacagatgaaaatcaatcagctgcttagatttagaaatctactcttgctggtctttgtaagttgcatgaatatttgactttgaaaaaatatcttaacgacatggggcaaaaagtgcaatctaaatggtagcctttactaatgtgtgtggaaagaggtgttcctcattatctaatatttcaatgtgttaagagtttaatttttttgttatcattaaaaaagacaggattataaagagatatcaaagcacgattttagataacctaaacggcccagcctatacgaagttgattatatctcgatgtctgtaaaagattgctgttcttggagtcttgaggtcttgtgaattgatttcctgctttctttcatttttttcaatttaagtaataatacatttgttatattcctttcagtgtaagtttctatttggacaattttatgggaacatgtgcattctctatgtgagcttctatcatattcctgttttattagcagaacctaaaggaatttatttaatgatgttgtgacattactgctttttcttttttcttttcttagttcatatttgcattttcgttcaaggatatgcttagcaataaaatgttcttcccaaaaaaaaaaaaaaaaaaaaaaaaaaaaaaaaaaa

SEQ ID NO: 1244 - protein, 432 aa, Homo sapiens
MHLRIHARRSPPRRPAWTLGIWFLFWGCIVSSVWSSSNVASSSSTSSSPGSHSQHEHHFHGSKHHSVPISIYRSPVSLRGGHAGATYIFGKSGGLILYTWPANDRPSTRSDRLAVGFSTTVKDGILVRIDSAPGLGDFLQLHIEQGKIGVVFNIGTVDISIKEERTPVNDGKYHVVRFTRNGGNATLQVDNWPVNEHYPTGRQLTIFNTQAQIAIGGKDKGRLFQGQLSGLYYDGLKVLNMAAENNPNIKINGSVRLVGEVPSILGTTQTTSMPPEMSTTVMETTTTMATTTTRKNRSTASIQPTSDDLVSSAECSSDDEDFVECEPSTGRSANPTEPGIRRVPGASEVIRESSSTTGMVVGIVAAAALCILILLYAMYKYRNRDEGSYQVDETRNYISNSAQSNGTLMKEKQQSSKSGHKKQKNKDREYYV

SEQ ID NO: 1245 - DNA, 2993 bp, Homo sapiens
aagaactggggcgggctagctgccgaggagaccacgctgctgcatgggccacgtgagctcaggctgtgggagcggatggagctgctacagtcagcgcttggggctggcctcagcttgtagacccgagccctgcagaacaaccccccgtggcgcaggagagcagaagaaagggggcctttatgcccttttgagggaagcacacattctgcaaggccgtggaaacaaagggaggaactgtttgtagccctcgtccagacgccccaaacaaacagtaagtcagaagggaacagagcacagcacagtccctccctccgccccaggcagtatccaccttgccccgccccacctaaggagcccaagggtattctgggagcccaccccaggacaatggcagggcaaaaccagtgagcaaggcagaaaattcctgaaattctccactgaggcccagctgttcctctccttgaaaagtcaaggcttggttcaagccagatagcacctgaggacagaacatatcaggagccaagttacaccctgtttaaccctgccttcaaagggacgactctgtaagattctctgctacttattcaagttgacacgatgcccttcacactccacctgaggtcccgccttccctctgccataaggagtttgattctacaaaagaaaccaaacatcagaaatacatccagcatggctggagagctccgaccagccagcctggtggtcctgcccaggtcccttgctccagcttttgaaagattctgccaggtcaacactggtcctctacccctgctgggccagagtgagccagaaaagtggatgctgccccctcaaggtgctatctcagagaccaggatgggccatccccagttctggaaatacgagttcggtgcctgcaccggcagcctggcttcgctggagcagtactcggagcagctgaaggacatggtggccttcttcctgggctgcagcttctccctggaggaggccttggagaaagcggggctccccagaagagacccagcaggtcacagccagacaacagtgccttgtgttacccatgctggcttctgctgccctctggtggtcacgatgaggcccattcccaaggacaagctggaagggctggtgcgggcctgctgctccctcggaggtgagcaggggcaacctgttcacatgggcgacccagaactgttgggaatcaaagagctttccaaacctgcctacggggatgccatggtgtgtcccccaggggaggttccagtgttctggccttctccgctgaccagtctcggagctgtcagcagctgtgagaccccactggcttttgccagcatcccaggctgcacagttatgactgacctgaaggatgcaaaggctccacctggttgtctcaccccagagagaattccagaggtccatcacatttcccaagatcctctgcactacagcatcgcgtcagtctctgcttctcagaagatcagagaactagagtctatgatcggcatagacccagggaaccgggggattgggcacctgctctgtaaagatgagctgctgaaggcctctctctcgctgtcccatgcccgctcagtgctcatcaccactgggttccccacacatttcaatcatgagcctccagaagagacagatggcccaccaggagctgttgctctggttgccttcctgcaggccttggagaaggaggtcgccataatcgttgaccagagagcctggaacttgcaccagaagattgttgaagatgctgttgagcaaggtgttctgaagacgcagatcccgatattaacttaccaaggtggatcagtggaagctgctcaggcattcctgtgcaaaaatggggacccgcagacacctagatttgaccacctggtggccatagagcgtgccggaagagctgctgatggcaattactacaatgcaaggaagatgaacatcaagcacttggttgaccccattgacgatctttttcttgctgcgaagaagattcctggaatctcatcaactggagtcggtgatggaggcaacgagcttgggatgggtaaagtcaaggaggctgtgaggaggcacatacggcacggggatgtcatcgcctgcgacgtggaggctgactttgccgtcattgctggtgtttctaactggggaggctatgccctggcctgcgcactctacatcctgtactcatgtgctgtccacagtcagtacctgaggaaagcagtcggaccctccagggcacctggagatcaggcctggactcaggccctcccgtcggtcattaaggaagaaaaaatgctgggcatcttggtgcagcacaaagtccggagtggcgtctcgggcatcgtgggcatggaggtggatgggctgcccttccacaacacccacgccgagatgatccagaagctggtggacgtcaccacggcacaggtgtaaccgtccatgttccgtgtgagcagagtccctaccaacgggcaggtctgcatccggggagaatgcagctgcttctggcgacaatcctgctagtaaacactggtcttcggtgagcaacgaacactcgcctggcctgggaaactgcatgcccactttctgggaggggttagtgcaggtgctgtggacaaaggacaacatttctctggggctttttaacttttattcctaagactctaaaggcgttgatttcaaccctccttcactctggcttcttcaggcaacccacgtggtctcctgtgagaatcttctcgacagttacttatggggacacttgtgaacaattaactgccaggcagagcatgagaacaaacattcccaggccatgtaggataggatactccagactccagtcatcctcccccatccatggtttctgttactcatggtttcagttactcatagccaactgcagaccgaaaatactaaatgaaaaatttcagaaataaacaactcttaagttttaaattgtaaaaaaaaaaaaaaaaaaa

SEQ ID NO: 1246 - protein, 616 aa, Homo sapiens
MPFTLHLRSRLPSAIRSLILQKKPNIRNTSSMAGELRPASLVVLPRSLAPAFERFCQVNTGPLPLLGQSEPEKWMLPPQGAISETRMGHPQFWKYEFGACTGSLASLEQYSEQLKDMVAFFLGCSFSLEEALEKAGLPRRDPAGHSQTTVPCVTHAGFCCPLVVTMRPIPKDKLEGLVRACCSLGGEQGQPVHMGDPELLGIKELSKPAYGDAMVCPPGEVPVFWPSPLTSLGAVSSCETPLAFASIPGCTVMTDLKDAKAPPGCLTPERIPEVHHISQDPLHYSIASVSASQKIRELESMIGIDPGNRGIGHLLCKDELLKASLSLSHARSVLITTGFPTHFNHEPPEETDGPPGAVALVAFLQALEKEVAIIVDQRAWNLHQKIVEDAVEQGVLKTQIPILTYQGGSVEAAQAFLCKNGDPQTPRFDHLVAIERAGRAADGNYYNARKMNIKHLVDPIDDLFLAAKKIPGISSTGVGDGGNELGMGKVKEAVRRHIRHGDVIACDVEADFAVIAGVSNWGGYALACALYILYSCAVHSQYLRKAVGPSRAPGDQAWTQALPSVIKEEKMLGILVQHKVRSGVSGIVGMEVDGLPFHNTHAEMIQKLVDVTTAQV

SEQ ID NO: 1247 - DNA, 1154 bp, Homo sapiens
atgtcttctcacaaagggtctgtggtggcataggaatggggctcctgccagtaacagggaaactgacatggtggaactggctgaactctgaattgtgacccctgctacaagagaagggcaaatgggtaatcaccaacccaaacaaagctgaagaagagcaaacatgcccagtgccccaggaagaagaggaggaggtgtgggtactgacacttcccctgcaagcccaccacaccatggagaagatggaggagtttgtgtacaaggtctgagtgggacagatgttggagggtcatcccatatgatgggctccctgactggctgaaggacaatgactgtctgcaggacaatgactgtctgctctatggccatagacaacccatgtcctccttctgggcttgcttcaagagcatcttctatatccatacagaaaccggcagcagccggacacatctgcttggtttcgtgctgtttctctttttggaaatcttgaccatgctcagaccaaatatgtacttcacggcccctctacaggagaaagtgatttggaggatattccttttgggtgcagtgctctagcctcagcttctcctggctcgtccgcactgtctactgtcattcagagaaagtctctcggactttttccaaactgtactattcagggattgctccactgctcataaggagcttcgtcccctggctctgttactccttctactgctcgccacagccacggctcatctacttctccatcatctatgtcctgggcatctctgccatcattgtgacagtgggaccggtttgtcactcctaagcaccggcagacaagggcaggggtgttgctgggacttggcttgagcggtattgtgcccaccatgcactttcctattgctgagggtttcgtcaaggccaccacagtgggccagatgggctggttcttcctcgtggctgtgatgtacatcaccagagctggcctttatgctgcttaaattcctgagcgcttctttcctggaaaattagacatatggttccagtctcagcagattttccatgtcctcatggtgacggtggcctttgtccacttctgtggggtctccaaccttcaggaattccattacagccgagaaggtgactgcactgatgactcccttctctga

SEQ ID NO: 1248 - DNA, 3118 bp, Homo sapiens
gcgcgcccgccagccaggctctccgcgcccgccgcccgcgccgcgctggcccgggctctcccgcccgcgcttcatggctgcacacgagtgggactggttccaacgcgaggagctcatcgggcagattagcgacatccgagtgcagaacctgcaagttgagagggaaaatgtgcagaagaggacctttacacgatggataaatctacatctagaaaagtgcaacccacctctagaagttaaagatttattcgtcgatatacaagatggcaaaatcctaatggctttgttagaagtcctgtctgggcggaatctgctgcacgaatacaaatcctcgtcgcatcgtatttttcggttgaacaacatagcgaaagcacttaagtttttggaagatagcaatgtaaaactggttagcattgatgcagcagaaatagcagatggcaacccttctttggttcttgggctgatatggaacataatcctcttcttccagattaaggagctcacaggcaacctcagcagaaactctccatcttccagcttgtcccctggctcagggggcacagactcagactcatccttcccacccacacccactgcagagaggagcgtggcaatatcggtgaaagaccagaggaaggctatcaaggccctgttggcgtgggtgcagaggaaaacgagaaagtatggcgtggcggtgcaggactttgcgggcagttggaggagtgggctggctttcctggcggtgatcaaggccattgaccccagcctggtggacatgaaacaggccctggaaaattccacacgagaaaatctagagaaggctttcagcatcgcacaggatgccctgcacatccccaggctcctggagccagaagacatcatggttgacacaccagacgagcagtctatcatgacttacgtggcacagtttctagaacgttttccggagttggaagccgaagatattttcgattcagataaagaagttcctatcgaatccacttttgttcgcatcaaagaaactccttctgaacaggagagcaaagtcttcgttctgactgaaaatggggagcgtacctacactgttaaccatgaaaccagccacccaccaccctccaaagtctttgtctgtgacaagcccgagagcatgaaggaattccgcctggatggtgtttccagccatgcgctgtcagacagctccaccgagttcatgcaccagattattgaccaggtcctgcaagggggcccaggtaagaccagcgacatcagtgagccatctccagaatcctccattttatcatccagaaaggagaacgggaggtccaactctttgccgatcaagaaaacagttcactttgaggctgacacctacaaggatcctttctgcagtaagaacctgtccctttgctttgaagggagcccaagagtggcaaaggaatcattgaggcaggatggacatgtcttggcagttgaggttgctgaggaaaaggaacagaaacaggaatcctcgaagattccagaatcctcctctgacaaggtcgctggtgacatttttttggtggagggcacaaacaataattctcagtcttcttcctgtaatggtgctttagagagtacagcccgccacgatgaagaaagtcactctctttcacccccaggagaaaatactgtgatggccgattccttccagatcaaggttaacctgatgactgtagaagctttagaggagggagactattttgaagccatcccattaaaagcctcaaaatttaacagcgacctaatagattttgcttctaccagccaggctttcaacaaagttccttcacctcatgagacaaaacctgacgaggatgctgaggcttttgagaatcatgctgaaaaactaggtaaaaggagtattaaatctgctcacaaaaagaaggattcgccagagcctcaagttaagatggacaaacatgaacctcatcaggactccggagaagaagctgaaggctgtccttcagccccagaagagacaccagtggataaaaagccagaggtgcatgaaaaggccaagagaaagtccacccgtcctcattatgaggaagagggagaagacgatgacctccagggtgtgggcgaggaattatcttccagccccccaagcagctgtgtcagcttggagacccttgggagtcacagcgaagaaggcctggatttcaagccctccccacccctctcaaaggtttccgtcattccccacgacctcttctatttcccacactatgaggttcccctggctgcagttttggaggcttatgtagaagacccggaggatctaaaaaatgaagaaatggatctcgaagagccagagggctatatgccagacctggactccagggaggaggaggccgatggctctcagagcagctccagttcctcggtgccaggagagagcctccccagtgccagcgaccaggtgctgtatctcagcaggggtggtgtgggtaccacaccagcctcagaacccgctccactggccccccatgaggaccaccagcaaagggagaccaaagagaatgaccccatggacagccatcagtcccaggaatccccaaacctggaaaacatagcaaaccccctagaagaaaatgtaacgaaagaatcaatcagtagtaaaaaaaaggaaaaaaggaaacatgtggaccacgtagaaagttcactatttgtagcaccaggaagtgttcaatcctcagatgacctagaagaagacagtagcgactacagcattccttccaggactagtcacagtgactccagcatttaccttcgacgacatactcataggtcttcggaatcggatcattttagctatgttcagttgaggaacgcagcagatctggatgacagaagaaaccgaatattaaccaggaaggccaacagctcaggagaagccatgtcactggggagccacagcccgcagagtgactccctgacacagcttgtccagcagccggatatgatgtattttattctcttcctgtggctcctggtgtactgcttgctgctcttcccacaactggatgttagcaggctctgatacgtgtgtctggataataaaaaagacaggaccctg

SEQ ID NO: 1249 - protein, 1002 aa, Homo sapiens
MAAHEWDWFQREELIGQISDIRVQNLQVERENVQKRTFTRWINLHLEKCNPPLEVKDLFVDIQDGKILMALLEVLSGRNLLHEYKSSSHRIFRLNNIAKALKFLEDSNVKLVSIDAAEIADGNPSLVLGLIWNIILFFQIKELTGNLSRNSPSSSLSPGSGGTDSDSSFPPTPTAERSVAISVKDQRKAIKALLAWVQRKTRKYGVAVQDFAGSWRSGLAFLAVIKAIDPSLVDMKQALENSTRENLEKAFSIAQDALHIPRLLEPEDIMVDTPDEQSIMTYVAQFLERFPELEAEDIFDSDKEVPIESTFVRIKETPSEQESKVFVLTENGERTYTVNHETSHPPPSKVFVCDKPESMKEFRLDGVSSHALSDSSTEFMHQIIDQVLQGGPGKTSDISEPSPESSILSSRKENGRSNSLPIKKTVHFEADTYKDPFCSKNLSLCFEGSPRVAKESLRQDGHVLAVEVAEEKEQKQESSKIPESSSDKVAGDIFLVEGTNNNSQSSSCNGALESTARHDEESHSLSPPGENTVMADSFQIKVNLMTVEALEEGDYFEAIPLKASKFNSDLIDFASTSQAFNKVPSPHETKPDEDAEAFENHAEKLGKRSIKSAHKKKDSPEPQVKMDKHEPHQDSGEEAEGCPSAPEETPVDKKPEVHEKAKRKSTRPHYEEEGEDDDLQGVGEELSSSPPSSCVSLETLGSHSEEGLDFKPSPPLSKVSVIPHDLFYFPHYEVPLAAVLEAYVEDPEDLKNEEMDLEEPEGYMPDLDSREEEADGSQSSSSSSVPGESLPSASDQVLYLSRGGVGTTPASEPAPLAPHEDHQQRETKENDPMDSHQSQESPNLENIANPLEENVTKESISSKKKEKRKHVDHVESSLFVAPGSVQSSDDLEEDSSDYSIPSRTSHSDSSIYLRRHTHRSSESDHFSYVQLRNAADLDDRRNRILTRKANSSGEAMSLGSHSPQSDSLTQLVQQPDMMYFILFLWLLVYCLLLFPQLDVSRL

SEQ ID NO: 1250 - DNA, 5235 bp, Homo sapiens
gcggggagctcgcaccgccgcgcccgggccgcgagtgatgataacctaagaggccggcgcgggcgggcgtgagcggcggaggagccgggcgcggcgacacgcggccatggagcgggagccggcggggaccgaggagcccgggcctccgggacggcggaggcgccgagagggcaggacgcgcacggtgcgctccaacctgctgccgcccccgggcgccgaggaccctgcggctggcgcggccaagggcgagcggcgacggcggcgcgggtgtgcccagcacctggccgacaaccggctcaagactaccaagtacacgctgctgtccttcctgcccaagaacctgttcgagcagttccaccgcccggccaacgtgtactttgtcttcatcgcgctgctcaacttcgtgccggcggtgaacgccttccagcccggcctggcactggcgccggtgctcttcatcctggccatcacggccttcagggacctgtgggaggactacagccgccaccgctccgaccacaagatcaaccacctgggctgcctggtcttcagcagggaagaaaagaaatacgtgaaccgattctggaaagaaatccacgtgggagactttgtgcgtcttcgctgcaacgaaatcttccctgcggacattctgctgctctcctccagtgaccccgacgggctatgccacatcgagaccgccaacctggatggagagaccaacctgaagcggcggcaggtggtccgcggcttctcggagcttgtctccgaattcaatcctttgacgttcaccagcgtgatcgaatgcgagaagccaaacaacgacctgagtaggtttcgcggctgcatcatacatgacaacgggaaaaaggccgggctgtataaagaaaacctgctgctgaggggctgcacccttaggaacacggacgcagtcgtcggcattgtcatctacgcaggacatgaaaccaaggctctgctgaacaacagtgggccccgctacaagcgcagcaagctggagaggcagatgaactgcgacgtgctctggtgtgtcctgctccttgtttgcatgtctctgttttcagcagtcggacatggactgtggatatggcggtatcaagagaagaagtcattattttatgtccccaagtctgatggaagctccttatccccagtcacagctgcagtttactcatttttaacaatgataatagttctgcaggttttgatcccaatttccttatacgtttccattgaaattgttaaagcatgccaagtgtacttcattaaccaggacatgcagttgtatgacgaagaaacagactcgcagctgcagtgccgagctctgaacatcacggaagacttaggacagatacagtacattttctcagataaaactggcactttgacagagaataagatggttttccgaagatgcactgtgtctggtgtagaatattctcatgatgcaaatgcgcagcgtctggccaggtaccaagaggcagactcggaggaggaggaggtggtgcccagagggggctcggtgtcccagcgcggcagcatcggcagccaccagagtgtccgggtggtgcacagaacccagagcaccaagtcccaccggcgcacgggcagccgggccgaggccaagagggccagcatgctgtccaagcacacggccttcagcagccccatggagaaggatatcacgcccgacccaaagctgctggagaaggtgagtgagtgtgacaagagcctagccgtggcgaggcatcaggagcacctgctggcccacctctcgcctgagctgtctgacgtctttgatttcttcatcgcactcaccatctgcaacacagtcgtcgtcacgtccccggatcagccacgaacaaaggtgagggtgaggtttgagctgaagtccccggtgaagacgatagaagacttcctgcggaggttcacacccagctgcctgacctcaggctgcagcagcatcgggagcctggccgccaacaagtccagccacaagttgggctccagcttcccgtccaccccgtccagcgacggcatgcttctcaggctggaggagaggctgggccagcccacctcggccatcgccagcaacggctacagcagccaggcggacaactgggcctcggagcttgctcaggagcaggagtcagagcgcgagctgcggtacgaggcggagagcccggatgaggccgcactggtgtatgcggccagagcctacaactgcgtgcttgtggagcggctgcacgaccaagtgtcagtggagctgccccacctgggcaggctcaccttcgagctcctgcacacactgggtttcgattccgtccgcaagaggatgtcagtggtgatccggcacccgcttaccgatgagatcaacgtctacaccaagggggccgactcagtggtcatggatctcctgcagccctgctcttcagttgacgccagagggaggcatcaaaaaaagattcggagcaaaactcagaattacctcaacgtgtatgcggcggaaggcctgcgcaccttgtgcatcgccaagagagttctgagtaaagaagagtatgcctgctggttgcaaagccacctagaagccgaatcctccctggaaaacagcgaggagctcctcttccagtctgccattcgcctggagaccaacctgcacttgttaggtgccactgggattgaagaccgcctgcaggacggagtccctgaaactatttctaaattgcgtcaagcgggcctgcagatttgggttctcactggtgacaaacaagaaacagctgtcaacattgcatatgcctgcaaactgctggaccacgacgaggaggtcatcaccctgaatgccacctcccaggaggcgtgtgcagccctgctagaccagtgcctatgctacgtgcagtccagaggcctccagagagcccctgagaagaccaagggcaaagtgagcatgaggttctcctctctctgcccaccctccacgtccactgcctctggccgcagacccagcctcgtgatcgatgggagaagcctggcctacgctctcgagaaaaacctggaggacaaattcctcttccttgccaagcagtgccgctccgtcctctgctgtcggtcgacgcctctgcagaagagcatggtggtgaagctggtgcggagcaagctcaaggccatgaccctggccataggtgatggagccaatgatgtcagcatgatccaggtggcagatgtgggtgtgggaatctccggccaggagggtatgcaggcagtgatggccagcgactttgcagtgccgaaattccgatacctggagaggctcttgattcttcacgggcattggtgctactcccgacttgccaacatggtgctgtacttcttctacaaaaacacaatgttcgtgggcctcctgttttggttccagtttttctgtggcttctctgcatctaccatgattgaccagtggtatctaatcttctttaatctgctcttctcgtcacttcccccgctcgtgactggggtgctggacagggatgtgccagccaatgtgctgctgaccaacccgcagctctacaagagtggccagaacatggaggaataccggccacgaacgttctggtttaacatggccgacgccgccttccagagcctggtttgcttttccattccttacctggcctactatgactcgaacgtggacctgtttacctgggggacccctattgtgacaatcgcgctgctcactttcctgctccacctgggcattgaaaccaaaacctggacctggctcaactggataacgtgtggcttcagtgtccttttgtttttcaccgtggctttgatttacaatgcgtcttgtgccacgtgctatcctccgtccaacccttactggactatgcaagccttactgggtgacccagtgttttacttgacttgcctgatgacgcctgtcgctgcactgctgcccagattgtttttcagatccctccaggggagggttttccccacacaacttcagctggcacgtcagttgaccaggaagtcccccaggagatgcagtgctcccaaagagacctttgctcagggacgcctcccgaaggactcgggaaccgagcactcatcagggaggacagtcaagacctctgtgcccctgtcccagccttcttggcacacacagcagccggtctgctccctggaggccagcggggagcccagcacagtggacatgagcatgccagtgagggagcacaccctgctggaggggctgagcgcaccggcccccatgtcctctgcgccaggggaggctgtcctgaggagtccaggagggtgtcctgaggagtccaaggtgagagctgccagcaccggcagggtgacccccctgtcttccctcttcagcctgcctaccttcagcttactcaactggatttcctcctggtcgctggtcagcaggctggggagtgtcttacagttctcccggacggagcagcttgcagatggacaagcgggacgtggacttcctgtccagccccactcaggccgatcaggacttcaagggccagaccacagactacttataggagcatcttcaaggcggtcacagtgaaaaccttgaaatggccttttttaatatatataaataaatgttaatattatttatgtttattatttgcacagaagagttctagggagatgtatttctaaatgtttcccaggctaatacaggaaacaagaggtaccaaaaaagaaagtttattttttaaaattctaagtagagtatattgaaaagaaaaagaagagccttaacatatataaaagtttaaagaagagtaacacttgaaaagtgtgtttagatttattttttcatctcatttttaagaacaagcagtacgatttgttttcttcaacatgtgtgactgcgcactgagtacaaatgtgtgactgctcatggttaatgcaggcaggtgtgaacatgggggaacaatgagcagagatggcagagggcagagcacatggcccccagaggcttccagtctcactgacacaggagggctgggctccacttcatccagatgaaggaaaggaagacctcaagaaaaattcacagttgagtgcatcccagcattctgttccgggcaggcatttcaggaagaccgccttgtaggtattacatccctggtgtcgtattttgcctgttaaatcgtaacaagcaataaacaactttcactttgcaaa

SEQ ID NO: 1251 - protein, 1499 aa, Homo sapiens
MEREPAGTEEPGPPGRRRRREGRTRTVRSNLLPPPGAEDPAAGAAKGERRRRRGCAQHLADNRLKTTKYTLLSFLPKNLFEQFHRPANVYFVFIALLNFVPAVNAFQPGLALAPVLFILAITAFRDLWEDYSRHRSDHKINHLGCLVFSREEKKYVNRFWKEIHVGDFVRLRCNEIFPADILLLSSSDPDGLCHIETANLDGETNLKRRQVVRGFSELVSEFNPLTFTSVIECEKPNNDLSRFRGCIIHDNGKKAGLYKENLLLRGCTLRNTDAVVGIVIYAGHETKALLNNSGPRYKRSKLERQMNCDVLWCVLLLVCMSLFSAVGHGLWIWRYQEKKSLFYVPKSDGSSLSPVTAAVYSFLTMIIVLQVLIPISLYVSIEIVKACQVYFINQDMQLYDEETDSQLQCRALNITEDLGQIQYIFSDKTGTLTENKMVFRRCTVSGVEYSHDANAQRLARYQEADSEEEEVVPRGGSVSQRGSIGSHQSVRVVHRTQSTKSHRRTGSRAEAKRASMLSKHTAFSSPMEKDITPDPKLLEKVSECDKSLAVARHQEHLLAHLSPELSDVFDFFIALTICNTVVVTSPDQPRTKVRVRFELKSPVKTIEDFLRRFTPSCLTSGCSSIGSLAANKSSHKLGSSFPSTPSSDGMLLRLEERLGQPTSAIASNGYSSQADNWASELAQEQESERELRYEAESPDEAALVYAARAYNCVLVERLHDQVSVELPHLGRLTFELLHTLGFDSVRKRMSVVIRHPLTDEINVYTKGADSVVMDLLQPCSSVDARGRHQKKIRSKTQNYLNVYAAEGLRTLCIAKRVLSKEEYACWLQSHLEAESSLENSEELLFQSAIRLETNLHLLGATGIEDRLQDGVPETISKLRQAGLQIWVLTGDKQETAVNIAYACKLLDHDEEVITLNATSQEACAALLDQCLCYVQSRGLQRAPEKTKGKVSMRFSSLCPPSTSTASGRRPSLVIDGRSLAYALEKNLEDKFLFLAKQCRSVLCCRSTPLQKSMVVKLVRSKLKAMTLAIGDGANDVSMIQVADVGVGISGQEGMQAVMASDFAVPKFRYLERLLILHGHWCYSRLANMVLYFFYKNTMFVGLLFWFQFFCGFSASTMIDQWYLIFFNLLFSSLPPLVTGVLDRDVPANVLLTNPQLYKSGQNMEEYRPRTFWFNMADAAFQSLVCFSIPYLAYYDSNVDLFTWGTPIVTIALLTFLLHLGIETKTWTWLNWITCGFSVLLFFTVALIYNASCATCYPPSNPYWTMQALLGDPVFYLTCLMTPVAALLPRLFFRSLQGRVFPTQLQLARQLTRKSPRRCSAPKETFAQGRLPKDSGTEHSSGRTVKTSVPLSQPSWHTQQPVCSLEASGEPSTVDMSMPVREHTLLEGLSAPAPMSSAPGEAVLRSPGGCPEESKVRAASTGRVTPLSSLFSLPTFSLLNWISSWSLVSRLGSVLQFSRTEQLADGQAGRGLPVQPHSGRSGLQGPDHRLLIGASSRRSQ

SEQ ID NO: 1252 - DNA, 3627 bp, Homo sapiens
atttacgcgttgctgaatctcctgtggacaaaccaccaataggccaggactgtcctgtggacagacggggtgagcctcttcttgtgtctggagattctgaaaagatttgatcaccaggagatttttcgggacattaccaaaccactcattttagtggctgcctccgggtgatgatggctgtgtgaacgactgccatggcccaccggaagcttgagagcgtggggagcggcatgttggaccatagggtgagaccaggtcctgtccctcacagccaggagcccgagagcgaggacatggagctgcccttggagggctatgtgcccgagggcctggagctggctgccctgcggccagagagccccgcgccagaggaacaggagtgccacaaccacagccccgatggggactccagctctgactacgtgaacaacacctctgaggaggaggactatgacgagggcctccctgaggaggaggagggcatcacctactacatccgctactgccctgaggacgacagctacctagagggcatggactgcaacggggaggagtacctggcccacagtgcacaccctgtggacactgatgagtgccaggaggcggtggaggagtggacggactcggcgggcccgcacccccacggccacgaggctgaaggcagccaggactacccagacggccaactgcccattccggaggatgagccctccgtccttgaggcccatgaccaggaagaagatggtcactactgtgccagcaaagagggctaccaggactactaccccgaggaggccaacgggaacaccggcgcctccccctaccgcctgaggcgtggggatggggacctggaggaccaggaggaggacattgaccagatcgtggcagagatcaagatgagtctgagcatgaccagcatcaccagcgccagtgaggccagccccgagcatgggcctgagccagggcctgaggactctgtagaggcctgcccacccatcaaggccagctgcagccccagcaggcacgaggcgaggcccaagtcgctgaacctccttcccgaggccaagcaccccggagacccccagagaggcttcaagcccaagaccaggaccccagaagagaggctgaagtggccccacgagcaggtttgcaatggtctggagcagccaaggaagcagcagcgctctgatctcaatggacctgttgacaataacaacattccagagacaaagaaggtggcatcatttccaagttttgtggctgttccagggccctgcgaaccagaagacctcatcgacgggatcatctttgctgccaattacctggggtccacccagctgctatcagaacggaacccttccaaaaacatcagaatgatgcaagcgcaggaggccgtcagccgggtcaagaggatgcaaaaggctgctaagatcaagaaaaaagcgaattctgagggggatgcccagacgctgacggaagtggacctcttcatttccacccagaggatcaaggttttaaatgcagacacgcaggaaaccatgatggaccacgccttgcgtaccatctcctacatcgccgacattgggaacattgtagtgctgatggccagacgccgcatgccccggtcagcctctcaggactgcatcgagaccacgcccggggcccaggaaggcaagaagcagtataagatgatctgccatgtgttcgagtcggaggatgcccagctcatcgcccagtctatcggccaggccttcagcgtggcctaccaggagttcctgcgagccaatggcatcaaccccgaagacttgagccagaaggaatacagcgacatcatcaacacccaggagatgtacaacgacgacctcatccacttctcaaactcggagaactgcaaggagctgcagctggagaagcacaagggcgagatcctgggcgtggtggtggtggagtcgggctggggctccatcctgcccacggtgatcctggccaacatgatgaatggcggcccggctgcccgctcggggaagctgagcatcggggaccagatcatgtccatcaatggcaccagcctggtggggctgcccctcgccacctgccaaggcatcatcaagggcctgaagaaccagacacaggtgaagctcaacattgtcagctgtcccccggtcaccacggtccttatcaagcggccagacctcaagtaccagctgggcttcagcgtgcagaatggaattatctgcagcctcatgagagggggcattgctgagcgagggggcgtccgtgtgggccaccgcatcatcgagatcaacgggcagagcgtggtggccacagcccacgagaagatagtccaagctctgtccaactcggtcggagagatccacatgaagaccatgcccgccgccatgttcaggctcctcacgggtcaggagaccccgctgtacatctaggccaccccagcctggccacgcagccaggacaccgggcagggccgcccgggcccagaggagctgggagccgggccgcagacttgaccccgacgccacagcccagccacggacgctggctccccaaagggtgtgccctcaccacccacttgatttttttcattttgccaaaaaggggtatgtctttatcaaaggagagtcacagaacaaatgtttgtttgtaaagcgttccaagtattttgccacgttctggactgtcttctccctgcacaagccagggtgtgtctcggtagctgtgcgtggtgtggagtgtgtgtctttcctccctgaagctgtgcggagcgaactggcgcctccgagggacgcggctcccggggcagggcagccgtcacccctgcctcccgcccccttggctgggacgtctggggtcctgtggggcccccacaatggtcccaaacagctgcctctgccactgactgcagggacacgggcagcctggctcccaggacacgacttgtaatgaaagtttggggacatgtgattgattgattgattgattgtaaataaaggatgatggccacaacatgaaaactccatatttatttagatgctattattactgtttggacttttattttggcaggcttttttccagactctagggttttccaatgtgactaatgaccacacctgcctctcccgtcgtctcttctgggcaccctcccacccggctgcatacccgggcagggctcccacagagacaaggagggcacaggtgtctgccccctctttaaaatcgatctacacacatccacgcacatgcgaccccgaggaaacgaaacccactctagaaaacgcgaccttggccgcacctaaagcagccagccgtgagtgcagaccccttggccagcgtggcgcagtggccctgagcagtagtggcatgtgtgtagatcaagtcggatctagtccagctcggttcattagcgatccatgtaatctgacgtcatcttgtctcgaagtctctttttttggcccaggccttgaagaatacactgtgacttaagaagccttaccacgcagtaactaaagctttaggatgactgtattcgaggagtgccgtgtgttgcatgcagctacccgtaggaagacttcgcgcatatcactaataaacctgaagtcgtgatga

SEQ ID NO: 1253 - protein, 749 aa, Homo sapiens
MAHRKLESVGSGMLDHRVRPGPVPHSQEPESEDMELPLEGYVPEGLELAALRPESPAPEEQECHNHSPDGDSSSDYVNNTSEEEDYDEGLPEEEEGITYYIRYCPEDDSYLEGMDCNGEEYLAHSAHPVDTDECQEAVEEWTDSAGPHPHGHEAEGSQDYPDGQLPIPEDEPSVLEAHDQEEDGHYCASKEGYQDYYPEEANGNTGASPYRLRRGDGDLEDQEEDIDQIVAEIKMSLSMTSITSASEASPEHGPEPGPEDSVEACPPIKASCSPSRHEARPKSLNLLPEAKHPGDPQRGFKPKTRTPEERLKWPHEQVCNGLEQPRKQQRSDLNGPVDNNNIPETKKVASFPSFVAVPGPCEPEDLIDGIIFAANYLGSTQLLSERNPSKNIRMMQAQEAVSRVKRMQKAAKIKKKANSEGDAQTLTEVDLFISTQRIKVLNADTQETMMDHALRTISYIADIGNIVVLMARRRMPRSASQDCIETTPGAQEGKKQYKMICHVFESEDAQLIAQSIGQAFSVAYQEFLRANGINPEDLSQKEYSDIINTQEMYNDDLIHFSNSENCKELQLEKHKGEILGVVVVESGWGSILPTVILANMMNGGPAARSGKLSIGDQIMSINGTSLVGLPLATCQGIIKGLKNQTQVKLNIVSCPPVTTVLIKRPDLKYQLGFSVQNGIICSLMRGGIAERGGVRVGHRIIEINGQSVVATAHEKIVQALSNSVGEIHMKTMPAAMFRLLTGQETPLYI

SEQ ID NO: 1254 - DNA, 6817 bp, Homo sapiens
gcgcggcgaagctgcggccgcgacttggcgaggtggtccctaacgttgccgctcggcatccttagaaccggccgcccctgacgccgcgcggggaccccagtcgcccgcgcgccccatgcgctcactcttcggtgcccggccgggccggcgcctcgcagacgcggagccgcgcgggtgacggcacaggcggctgcgcgcccagcccagcccagcccagcccgaggagagggcgcgccgcgcccccgccccccgcccgctctcccgaggccgtgggtgcggatgcgcggctgacgactcgcagcaagagcaccgccgccggccccagcccgcagcatggcagccgccgcctatgtggaccacttcgccgccgagtgcctcgtgtccatgtcgagccgcgcggtcgtgcacgggccgcgggaggggccggagtcccggcccgagggcgcggccgtggccgccacccccacgctgccccgcgtcgaggagcgccgcgacggtaaggacagcgcctcgctcttcgtggtggcgcggatcctagcggacctcaaccagcaagcgccggcgcccgccccggcggagcgcagggagggcgccgcggcccggaaggcgaggaccccctgccgcctgccgccgcccgcccccgagcccacctcccccggcgccgaaggcgcggcggccgcgccccccagcccggcgtggagcgagccggagcccgaggcggggctggagcccgagcgggagccggggcccgcggggagcggcgagcccggcctcagacaaagggtccggcggggccgaagtcgcgccgacctcgagtccccgcagaggaagcacaagtgccactacgcgggctgcgagaaagtttacgggaaatcttcgcacctcaaggcgcacctgagaactcacacaggtgagaggcccttcgcctgcagctggcaggactgcaacaagaagttcgcgcgctccgacgagctggcgcggcactaccgcacacacacgggcgagaagaagttcagctgccccatctgcgagaagcgcttcatgcgcagcgaccacctgaccaagcacgcgcgccgccacgccaacttccacccgggaatgctgcagcggcgcggcgggggctcgcggaccggctccctcagcgactacagccgctccgacgccagcagccccaccatcagcccggccagctcgccctgagcccgccacagccatgagcagccgctcccaccccctcgtgagtccctggcctttccttttgtaataagaaagaagagagagaacttgatgcaaagtccacgaaaaaacaatttttttcacctcaggtgtcaaagtaaatttgttaaaaaaacaaaaaaaacacaaaaatttcaaaaaacaccacccaccaaattgcacaatagatacacccacaaagttgagattcagcgttgttgaaccccctttctcagggatggacacgtttcacgaggtcagtgaggacaccccttcctgccgccttactctgtacatagatttgcactctggagttttctgttaggttcgggaacacgctggggacagagcaggccagccagtctggtggagctcagcgtctggctggctggccagcctgtgggtctgttgggagcagatgtgctcactgacgtttgtgcctccagggcagattcctaagcagctggcctgacctcttcctgcccagcccccaacccagtctctggcctctgcccaacgagcctggctgggcttgcaacgcagctgattctgagacaggcccctgcagagggatgccttaaagctgtccctggctggaggagcactccaccttggggatagtggagggggccttcagccctctgcaccctgcctgcctcacaccccgccttcaggagccctctcctacggcgctagggagcactggaagcagagatgccagccctggctgagcgtagcactgcaccgtccgacctccgaggcaggggccggggtcacacctgccaggactccgcttctccgtgtcccagcagaaggcatgcaggaccctgtcactactatacctgggcctctgatggggaattctggtcttctaaaaagatgttagaaattcctggtggcacatccagttccgagtttgcccgcatgggcacttttgttggaaacagtgggcaggtcatggggcctcctcatcagagggtctgtgtgagcggctgtgcatgtggcagcgcaccatgcttcacagagaccattctgtagcaagagaccggaacattgtgacttggaccttttcaggagtggcgcggatgttacaggaaatgctgtcggagagcgcgcattctatttcctccgcagggaatgccagatagaaagttgcgggcaacacttttctcagacccaccatgtccccaactcagacttagcaaacctccagcctctccgtttcccctggactcctcctcccttttcctcctgcttctccttgtcctgcctggaggctccaggccacacccagctggtggggctgctccagtgccccatcaccggccttctcctggcaggagaggaggagcagagagctgggtcctgggctgggattcgagccctgggcgggggtcagtcaagccgtggtccagcaaactcctctgcagatggctggagtgttgacccaggcttgtggcccaggtatcaccttcccttcctcctgagagttgaggcctgtaaatacaagggcccaggacagagtgtgtgcgtgcgtgtgggtgtgtgcgcgcgtgagcacacacgcgtgtgttggggggggtggggggattggggtggactcagggtatcttgccagagatacctgttttgatgagtacctattttgatgcaaaggaacggccctgggacctcagagggccacagatgggcttcctgggcctagcgtgccttggttgtggccatcctgcttctactcagccctgccatgctatggggtgcagcacaaacccaggacccaggcctagccactgcccacagctgatggtcactgttttggctggctccagagtggacaggtacgctctgtccacagcagctgctcaggcacagtatgccgtcaggtgcccgcttcttaccactgtgtgtcagctgggattggccgacagcgtggtggtgacttctaggtagaccgatggaccctaaattgggcagtggcattgtttctgctgtggtgggaactggcagggagagggtcacctccactctggttggatgcggagctggtccctctggctgccatgctgtgttggggctctctgacctccctgcttgcattgggtctgggagagagagtggaatatttggtagggaccttgacagaagagagccctgggtgcttgtggtgcaaagatcttcatgcccagttccaaagtgaggtccctcccaaagttgttttcgtgtgaggcagagaaagccacactctgaatacattttatgtctcaggaattcacattccaggttcaggaattttattccaaagtcctttggtgcactcaccgtccaccgttccccaaggcagggagagggagtggcccgtccctgggaggctggcaaagtgctctccagggaggggtcagacgtccttgtgatctgcccagggtgtcacggaaggagattttctagctccacatctgtctgcacataggaaggaaaagataggactctaaacctagtcatcttggaataaaaagaagagctggtttgttttagagcagggcggggggtgggggagggaagcgggtgttggctgtttccaaagagagcacttaatttaatttttcctttaaatgacccagggctgttccgtctgatagatggaagggtaacattgccttaaaacagaaatatgcaggcgttggctatttttggcataagagcgtgtcttcattcccaaagtggttctcgtttaatggcagggtgcggtccttaggccccggcctggactgggaaatgggggtagggcaccaggagagaaatcctcctgggtactcctggccagaccctcctgaatcatctgcggcttaaactcatctcgcttgaagggcagggagaaacccatgaatctcaggcacggttcacaggggtcctcaagggcaggtttccatttcatcatgaagtgagggactcctgtggaagagggtggtgggccttggaacgctgcctccactgaggcgggcacacaaggcggaccctcctgaaacagcctccattttcttcaaacatgcagaatgttttcccagactgcgtctatttcagggtcttccatttttgtggtttatggccatgcttgccagttttggtggggttgaggaacccataggactcatagaaataatagtgaaaactcaaacccttattttgggacttcagttctcgtggtccataggggcagagatgtcaaagtgaaggttgcctgagtgaagggagagttcccctataaaaggcctaaaattgatctggggctcagccatcaaggggctggtgttgctcctgtcccagacaaggaagcccctctttacatcagccatattaggggaacggttgtcagctccccaaatgcctactggatcctacagccatacaggaaaacagacggacacagccctttccttaaagagccctggggtcctgtcctgcaggatgctgcataggaatgggcagagatgtcctggatgggaacatggtcctggaggtgccctacctgcatcctgctgcacccccacccacgacactcgagtgcaagatcgcctcactcctaaccctgactttattcccaggccccacaccgaggcaggtgcaggattcgccatggtgcagcctccgggtacaaacatctgaggcactggcgatcccagtccttgcagcaccctgaacacagctcagaccagtgaggggtgattcagaggtggggatgggcagagagggctggccactctgcctcaggacttgacctcaagtgttctgtctccccacccggtgtgtccagaagaccagcctctttcttgccagaagcaggtgctaagatggactgcacagggtcccggcactccctcgggacccattcaggatctcagctgggcaggggtgccacccaacaggaagatgtgatctgagcaatagtgtggccttgtttctccgcttctggttgtggctgtgtgtacagggctacctattttgacttctgacaggtgtcactgattttctttcccccatttaaaaaaggtcatttagtcaaagacacagtgctagaggtttaaagggtgtaatgtgttggtcacatcacaaccagtaagaaacgcttggtaggttatccacatcttttgctgactgtttccatatacaattctggtcaccatattttccaaagctaaaatctgaggcgtgggctgatggtttttgaaatcaggattaccccaggaagaaccaggtcctattactaattttcctgattctgaggctctgaaggcttgtctgagacacattccggagacctttgtaccagaacttggatgcatagtccaccttactactgatacacgcctgagcaccctttagggcgaggcgccgcctcctgcctgctgtcctgtccctcagcatcagaagagttgaattcagcaggagacgggagcccggtgtccatgagggaagaggggtcgcgcttggtttctactgacccccatgaagatttcagacttgcagtgcggccacctggccctgccctgcctctctctttctcatacagctttaaaactttactacttttatttaaaaatgaactggatgggagagaagtagcgtcccctaccctacaagtcacacattccggggaggggggtggggggtggaggcaggaagtcatgggggtgggggtgggagcacgggaacagctttcttaaggcctcagggtcctgttttccctggcctcttctagagggcccgtggacaggtcgcagtgcgtgcttatttggaaaccaggtgtgtgagccgaatgcctgccaggccatgcactcagcagaggagcccttgtacctggctgccctgagaggagcaagaggccacctcccatgtggctctagacaccacgtgggctcattagccccagcgtctgtgccggctccaggtgcctgcctctgggtgtgtgagtgggagactttgctccctggcctcatcctagagaggcccctggtgcctagtgctgaggcctctggggctggaaagcctcagcagaaaggaggcactactgagcaactatgcattgtcattgtcgggtttggggctttcggtggttccttggtgactgggaattgcttgtgtgcatgtgttgggtgcatgcttccgggtctcagctgccccaggcccgcacaggcaaccccttcccatccaaagccattggtggagcttctctggaatcatttgccaaaagcccaaggcagaatccaagggtccaagaccatttccatggagctcatgtttttcttttctgtaggaacttttttttaaccagcacccaccataattccgaaggccacgtttcatctttcctggatcactacagtgaagtattacagttgtacagttcccagtctggccttggcttgctcggataaaactttgtatgtattttgtatggcatagattctatattgtaatgatgtcctatgcaaaaagaaaaattaacgaaattgtaaattttattgttttaacgtgtatgcatgtttagtgacgtttacattttgaaataaaatttatgattcattattttaaaaaaaaaaaaaaaaaa

SEQ ID NO: 1255 - protein, 288 aa, Homo sapiens
MAAAAYVDHFAAECLVSMSSRAVVHGPREGPESRPEGAAVAATPTLPRVEERRDGKDSASLFVVARILADLNQQAPAPAPAERREGAAARKARTPCRLPPPAPEPTSPGAEGAAAAPPSPAWSEPEPEAGLEPEREPGPAGSGEPGLRQRVRRGRSRADLESPQRKHKCHYAGCEKVYGKSSHLKAHLRTHTGERPFACSWQDCNKKFARSDELARHYRTHTGEKKFSCPICEKRFMRSDHLTKHARRHANFHPGMLQRRGGGSRTGSLSDYSRSDASSPTISPASSP

SEQ ID NO: 1256 - DNA, 1118 bp, Homo sapiens
ggtccctgcggcgggtgtgtttcggcctggcctgggcaggcgcttgtgctgccagggcgccgggcccggggaggccggggtctcgggtggcggccggcccaggcgctggactgcagcaggatggggaaggcgaaggtccccacctccaagcgcgccccgagcagccccgtggctaagccgggtcctgtcaagacgctcacttggaagaaaaacaagaagaaaaaaaggttttggaaaagcaaggcgcaggaagtaagcaagaagccaggaagcggccctggtgctgtggtgcgacctccaaaggcaccagaagacttttctcaaaactggaaggtgctgcaagagtggctgctgaaacaaaaatctcaggccccagaaaagccttttgtcatctctcagatgggttccaaaaagaagcccaaaattatccagcaaaacaaaaaagagatctcgcctcaagtgaagggagaggaaatgctggcgggaaaagaccaagaggccagcaggggctctgttccttcaggctccaagatggacaggaaggcgccagtacctcgcaccaaggccggcggagcagagcacaataagaaaggaaccaaggaaaggacaaatggtgatattgttccagaatgaggggacatcaagcataagaagcagaaagctaaggaggcagaccctgccccacccaccgaggaagacatgtggtttgacgacgtggacccggcggatatcgaagctgccataggtccagaggtggccaagatagcgaggaaacagttgagtcacagtgagggcagcgtcagcctcagactcgtggaagagccggccttcggcggcctgacaagagccttagccttggactgtgagatggtgggcgtgagtcctaaaggggaggagagcgtggccgcccgtgtatccatcatgaaccagtaggggaagtgcgtttatgacaagtagtcaaaccaaccgagcccgtgacggactataggacagcggtcagtgggattcagcctgagaacctcaagcagggagaagagcttgaagttgttcagaaggaacaactgtcagaaggaacaacggtactgtcaccgcttatcttcagtgacaccctggggtga

(The sequence listing continues in the following parts.)

1.-20. (canceled)

21. A method of diagnosing schizophrenia, the predisposition to schizophrenia, or the progression or prognostication of schizophrenia, comprising determining the amount and/or concentration of at least one polypeptide from Tables 2-4 and/or at least one nucleic acid encoding the polypeptide present in said biological sample.

22. The method of claim 21, wherein the diagnosing comprises the steps of: (a) obtaining a biological sample of mammalian body fluid or tissue to be diagnosed; (b) comparing the amount and/or concentration of said polypeptide and/or nucleic acid encoding the polypeptide determine in said biological sample with the amount and/or concentration of said polypeptide and/or nucleic acid encoding the polypeptide as determined in a control sample, wherein the difference in the amount of said polypeptide and/or nucleic acid encoding the polypeptide is indicative of schizophrenia or the stage of schizophrenia.

23. The method of claim 21, wherein a nucleic acid probe is used for determining the amount and/or concentration of at least one nucleic acid sequence from Tables 2-4 encoding the polypeptide.

24. The method of claim 23, wherein said nucleic acid probe is selected from the nucleic acid sequences designated as SEQ ID NO: 1 to 19625.

25. The method of claim 23, wherein said nucleic acid probe comprises nucleic acids hybridizing to the nucleic acid sequences designated as SEQ ID NO: 1 to 19625, and/or fragments thereof.

26. The method of claim 23, wherein said nucleic acid probe comprises nucleic acids hybridizing to at least five nucleic acid sequences from Table 2, 3 or 46.

27. The method of claim 23, wherein said nucleic acid probe specifically hybridizes to at least 10 nucleic acid sequences from Tables 2-4.

28.-31. (canceled)

32. The method of claim 23, wherein said nucleic acid probe is at least about 10 nucleotides in length.

33.-34. (canceled)

35. The method of claim 23, wherein a PCR technique is used for determining the amount and/or concentration of at least one nucleic acid from Tables 2-4.

36. The method of claim 21, wherein a specific antibody is used for determining the amount and/or concentration of at least one polypeptide from Tables 2-4.

37.-38. (canceled)

39. A method of detecting susceptibility to schizophrenia comprising detecting at least one mutation or polymorphism in the nucleic acid molecule selected from Tables 2-4 in a patient.

40. The method of claim 39, wherein said method comprises hybridizing a probe to said patient's sample of DNA or RNA under stringent conditions which allow hybridization of said probe to nucleic acid comprising said mutation or polymorphism, wherein the presence of a hybridization signal indicates the presence of said mutation or polymorphism in at least one gene from Tables 2-4.

41.-42. (canceled)

43. The method of claim 39, wherein said method comprises sequencing at least one gene from Tables 2-4 in a sample of RNA or DNA from a patient.

44.-48. (canceled)

49. The method of claim 39, wherein the mutation is selected from the group consisting of at least one of the SNPs from Tables 5.1, 6.1, 7.1, 8.1, 9.2, 10.1, 11.1, 12.1, 13.1, 14.1, 15.1, 16.2, 17.2, 18.2, 19.2, 20.2, 21.1, 22.1, 23.1, 24.1, 25.1, 26.1, 27.1, 28.1, 29.1, 30.1, 31.1, 32.2, 33.1, 34.1 and 35.1, alone or in combination.

50. The method of claim 21, further comprising comparing the level of expression or activity of a polypeptide of Tables 2-4 in a test sample from a patient with the level of expression or activity of the same polypeptide in a control sample wherein a difference in the level of expression or activity between the test sample and control sample is indicative of SCHIZOPHRENIA disease.

51. (canceled)

52. A method of diagnosing susceptibility to schizophrenia in an individual, comprising screening for an at-risk haplotype of at least one gene or gene region from Tables 2-4, that is more frequently present in an individual susceptible to schizophrenia compared to a control individual, wherein the presence of the at-risk haplotype is indicative of a susceptibility to schizophrenia.

53. The method of claim 52 wherein the at-risk haplotype is indicative of increased risk for schizophrenia.

54. The method of claim 53, wherein the risk is increased at least about 20%.

55. The method of claim 52, wherein the at-risk haplotype is characterized by the presence of at least one single nucleotide polymorphism from Tables 5.1, 6.1, 7.1, 8.1, 9.2, 10.1, 11.1, 12.1, 13.1, 14.1, 15.1, 16.2, 17.2, 18.2, 19.2, 20.2, 21.1, 22.1, 23.1, 24.1, 25.1, 26.1, 27.1, 28.1, 29.1, 30.1, 31.1, 32.2, 33.1, 34.1 and 35.1.

56.-59. (canceled)

60. The method of claim 59, wherein determining the presence of an at-risk haplotype is performed by electrophoretic analysis, restriction length polymorphism analysis, sequence analysis or hybridization analysis.

61.-63. (canceled)

64. A method of diagnosing a susceptibility to schizophrenia, comprising detecting an alteration in the expression or composition of a polypeptide encoded by at least one gene from Tables 2-4 in a test sample, in comparison with the expression or composition of a polypeptide encoded by said gene in a control sample, wherein the presence of an alteration in expression or composition of the polypeptide in the test sample is indicative of a susceptibility to schizophrenia.

65. The method of claim 64, wherein the alteration in the expression or composition of a polypeptide encoded by said gene comprises expression of a splicing variant polypeptide in a test sample that differs from a splicing variant polypeptide expressed in a control sample.

66. A drug screening assay comprising: (a) administering a test compound to an animal having schizophrenia, or a cell population isolated therefrom; and (b) comparing the level of gene expression of at least one gene from Tables 2-4 in the presence of the test compound with the level of said gene expression in normal cells; wherein test compounds which provide the level of expression of one or more genes from Tables 2-4 similar to that of the normal cells are candidates for drugs to treat SCHIZOPHRENIA disease.

67.-68. (canceled)

69. A method for predicting the efficacy of a drug for treating schizophrenia in a human patient, comprising: (a) obtaining a sample of cells from the patient; (b) obtaining a gene expression profile from the sample in the absence and presence of the drug; the gene expression profile comprising one or more genes from Tables 2-4; and (c) comparing the gene expression profile of the sample with a reference gene expression profile, wherein similarity between the sample expression profile and the reference expression profile predicts the efficacy of the drug for treating schizophrenia in the patient.

70. The method of claim 69, further comprising exposing the sample to the drug for treating schizophrenia prior to obtaining the gene expression profile of the sample.

71.-73. (canceled)

74. The method of claim 69, wherein the gene expression profile comprises expression values for all of the genes listed in Tables 2-4.

75.-76. (canceled)

77. The method of claim 76, wherein the oligonucleotides comprises nucleic acid molecules at least 95% identical to the gene sequences from Tables 2-4.

78. The method of claim 69, wherein the reference expression profile is that of cells derived from patients that do not have schizophrenia.

79.-80. (canceled)

81. A method for predicting the efficacy of a drug for treating schizophrenia in a human patient, comprising: (a) obtaining a sample of cells from the patient; (b) obtaining a set of genotypes from the sample, wherein the set of genotypes comprises genotypes of one or more polymorphic loci from Tables 2-35; and (c) comparing the set of genotypes of the sample with a set of genotypes associated with efficacy of the drug, wherein similarity between the set of genotypes of the sample and the set of genotypes associated with efficacy of the drug predicts the efficacy of the drug for treating schizophrenia in the patient.

82.-84. (canceled)

85. The method of claim 81, wherein the set of genotypes from the sample comprises genotypes of at least two of the polymorphic loci listed in Tables 2-35.

86. The method of claim 81 wherein the set of genotypes from the sample is obtained by hybridization to allele-specific oligonucleotides complementary to the polymorphic loci from Tables 2-35, wherein said allele-specific oligonucleotides are contained on a microarray.

87. The method of claim 86, wherein the oligonucleotides comprise nucleic acid molecules at least 95% identical to SEQ ID from Tables 2-35.

88.-117. (canceled)

118. A method for identifying a gene that regulates drug response in schizophrenia, comprising: (a) obtaining a gene expression profile for at least one gene from Tables 2-4 in a resident tissue cell induced for a pro-inflammatory like state in the presence of the candidate drug; and (b) comparing the expression profile of said gene to a reference expression profile for said gene in a cell induced for the pro-inflammatory like state in the absence of the candidate drug, wherein genes whose expression relative to the reference expression profile is altered by the drug may identifies the gene as a gene that regulates drug response in schizophrenia.

119.-121. (canceled)

122. A kit for assessing a patient's risk of having or developing schizophrenia, comprising:
(a) means for detecting:
the differential expression, relative to a normal cell, of at least one gene shown in Tables 2-4 or the gene product thereof;
a sequence of at least one gene in Tables 2-4; or
a genotype of at least one polymorphic locus shown in Tables 2-35; and
(b) instructions for correlating the differential expression or the presence of said gene or gene product or the presence of the genotype with a patient's risk of having or developing schizophrenia. [Support in original claims 124 and 126]

123. The kit of claim 122, wherein the means includes nucleic acid probes for detecting the level of mRNA of said genes.

124. (canceled)

125. The kit of claim 124, wherein the means includes an immunoassay for detecting the level of at least one gene product from Tables 2-4.

126. (canceled)

127. The kit of claim 126, wherein the means includes nucleic acid probes for detecting the genotype of said at least one polymorphic locus.

128.-136. (canceled)

137. A method of assessing a patient's risk of having or developing SCHIZOPHRENIA disease, comprising: (a) determining the level of expression of at least one gene from Tables 2-4 or gene products thereof, and comparing the level of expression to a normal cell; and (b) assessing a patient's risk of having or developing SCHIZOPHRENIA disease by determining the correlation between the differential expression of said genes or gene products with known changes in expression of said genes measured in at least one patent suffering from SCHIZOPHRENIA disease.

138. A method of assessing a patient's risk of having or developing schizophrenia, comprising (a) determining a genotype for at least one polymorphic locus from Tables 2-35 in a patient; (b) comparing said genotype of (a) to a genotype for at least one polymorphic locus from Tables 2-35 that is associated with schizophrenia; and (c) assessing the patient's risk of having or developing schizophrenia, wherein said patient has a higher risk of having or developing schizophrenia if the genotype for at least one polymorphic locus from Tables 2-35 in said patient is the same as said genotype for at least one polymorphic locus from Tables 2-35 that is associated with schizophrenia.

139.-140. (canceled)
